United States Patent Application Publication US 2015/0376612 A1 - sequence listing, part 48

SEQ ID NO: 113837 - DNA, 1916 bp, Homo sapiens
tgcaggatgagtgaaaatgcactggattatatttgggatttttgtttttggaattgtctgttttaatcacagccttaattcacaattggcaaaggcagtttactcaaaggactgggctaaatattctgtaattatgcatttttgataggaaaatgaaatttttgcaaacagacattttctttttttttggctggagtgcagtggggcatggtcttggctcactgcagcgttgaccacctgggctcaagtgatactcccgcctcagccacccaagtagctggcactacgggcacacgccaccatgcccagctaatttttttgtatttttagtagagatggggttttgccatgctgcccaggctggtctcaactcctcagctcaagcaatctgcctgcgtgagcctcccaaagtggtggaattacaggcgtgggccactgcgcctggcccagacagacattttctgaaacacaactggcaatgagctgtttttacattttgaaagtgattcttcacttcctagttcttaattatagtatacctattaagatctgtaagatcctgaagacataagatcatgaagccatataagaatgaggattgaaagttgagcaaaattttcgggattttgggaaacattcttagctgtgctatctgcctaaaattattccttattacttctctcctttgacagacttcaagttttcttcatagccctttcaaagttttttgagccatccagagtaaaatcatttctaaatgatagttctgtatatctccaactcgtcttaagtgtatttgcctgtgtgcaacgtattgctagactatgaactcctcagcatggctgctggataacttaattgtcctgagttaatagccttcaaaggacaaatcggtttctttgcagatagcttcgtaaaacttcacatggagtttattttatcatatttcccttttttatttctgctcctcctttaattgcccatcttgcttcagagactgacatttcagggtggatattaattaaagcattaattttgttttttggtatatttctatccctagtatttctatcttactgctaaaatacaggaaaagtgccgtatttttaatgcatttagtggttttctttggtgttatctgttccatttttctttttcatacattgaagtgtgtctccttttcaaccaaaataatgaaatagtggagaccatgaaattgttgtgcctggctaattggcaaattaatttaccaatataataagtgtagcgccttgtttgaataccctttttgagaaggtatgatgagaatgggcaagggtgtcagcatctcttcttcttaataattaattgttttcagttttggttcacgaagaatgcttagttaatctgtaatgttgcctagagctgtatttatctgtttttatttatactagtgtagtaaagctgcatatcattacagtaaaaacgactactgtgatgagttaatcagaaaatctattaaaatctatatgacaatgtgtggtttggcctttaattatatctgtaacagtcctccctcttcactgctgccctacgcagtgtaggccgatatgcctggcacagggagccccaaaaaggtaataattataatgcttctctcaggttacaaagcatttctacactttgcaagcaaggagcaatagaagagtagatagatgctggattgacagcaggatgttcataccaccagcaatggtttagcgcccccatttgtcagtgaaagctgcaggtccacagaaaactgatttcatttcagctcactttcaaaagtgatttttttttttttcgcaagaaaaattacgctatttgcatgaaaagaggtaaaacgatttatttacatgtctttaaaaaatcaccttggacatttgctaatagaa

SEQ ID NO: 113838 - DNA, 1125 bp, Homo sapiens
ggtagctggagaaaaaacacaaccatggcagcttgtcttattttaacctcaagttggccacactggatgcccatcgatcctactttctcatctctcaacccccaacccccaccctcatcctcagtttatttcactgagaaaatagaagccaccaaaataactttaacagaatcccactgccctaccaactacccaaggaaggttgaatgtgtgcccaagaccccatcctcccttgcctactcgaggtcctctcctctatttttcctctcaaacattcctatcattaacaaaaaggctataatttcctgcatcttaaaacccgaatgttctgattaattttccctgtcaaaccatcaacaggaaaagaagctataatatcctgcatcttaaaactatcacgtattactttcctggaaacctgataggaagaattggaatcgttgtcttcaattcttcaaatctctgttggacccactcctttcaggctttggcttgccaccatcgcgctgaacctactctgggggaagttatcagttctctctttattggtccattttgagccctcatttacttcacctatcagcaacacgggacagttaatcatcgctccttgaaactattattcatttggtttaggggactacccttgctttttgagacagggtcttgctctgtcacccaggctggagtgcagtagcaccatcttagctcactgcagcctccaactcctgggctcaagtgatcctcctgccttagcctcctaagtagccaggactacaggcatgtgctaccatgcccagttcatatttttatttcttaattttttgtagaggagacctagtctctttcccacgctagtcatgagctcctgggctcagatgctgctgccccgccttggcatcttgaagtgctacaggcctgagctaccacacgcagcttattttttaatatatccaccagtggaatacccttctttgaaggtcactactcctaacccaaccatactggcagctccctcatttgctggctcctcacctccccaaatctaaacataagcatgtgtcagtgctcggtccttgtacctcttctctgtctgcattcaatgcacggtactctcctgtctca

SEQ ID NO: 113839 - DNA, 1468 bp, Homo sapiens
accatcctggccaacatggtgaaatcccgtctctactaaaaatacaaatattagctgggcgtggtggcatgtgcctgtagtgccagctacttgggaggctggggcaggagaattgcttgaacctgggaggcagaggttgcagtgagctgagatcgcaccactgctttccagcctggtgacagagcaagactccgtctaaaaaaaaaaaaaaaaaaaaaaatcgtgactgtaactaaatcctgtgaaatagtcgttaataaagaaatacttgttaacctgtttttaagcttgaatcctaagtagaaaagttaccaaattgccattctaaattagagtgctgaagactactacccaaggtggcacaagttgtattagtacaaagtcttaggaggaaaaaccctctttataatcttcttacttttgaagactgattcattttctaactatgtagataatcttttatattattgatttctttcagctgacctcaagagaatttgcaagacaatagttgaggctgcaagtgatgaggagagactaaaagcttttgctcccattcaggaaatgatgacttttgtgcagtttgctaatgatgaatgtgattatggcatggggcttgaattgggaatggatctcttttgctatggctcacatgtgagtaaaaaaaccctccaccttctacccactgccacacctccctcctctccccgcgacatacatccacacatgaatacgtgcacatttatacccccaaattccagcagaggtaagacagggattcagcttgtatttcaaaatgaagtttttgaagtgattttttttaacgtagatgtcctaaaaatgttttaaactcatcttatattctggcaaaggtgaatatttgcattcactcaaaggtgaagattatttgcattcaggcttacattaaagtgaatttactcattagacacattatagggacatgccttcttgccgtgtgtgtacgtttggggctaggtatgggggtgtgtgcacacaccttaggctccatttcgtttccattgtggtgggggtatttgttattgtgcttaaattcttagatgaaaaatgcactttaaattatttaagctttataagagatgctgttttaccgttaactaattgctcattaaataagaaaattttacttaatagctaaaccagtgcttactcgaccatagttgcctgaagatcaaagaggcaataaggtgtagcggatatgacctgtttctggggccaaactggttgtaaatcacatcttcccagtgtgtaagatcgggcaagctttccaacacctttgcatctgtttctttacctgtaagatatgtgtgcacatgtgcacgagtgcatacccacacgcagatcatttaattctcatttaacctactttgtaaccaagtcacagagaggcaaagcatcttgcccaggttcacacaagcagtctggctcc

SEQ ID NO: 113840 - DNA, 1372 bp, Homo sapiens
ccaagatcctgaactacgtcatctgtaagtataaaaacactttgaaaatggaccactgcgcataatctagttattgctacgttaaacatcgagaattaaaatcgcttctcaattcttttccccttgtctccattcccttatcgtgaacagccctgctggtattcctttattgatcatcctcttctggggggataaaacttaaagggaaatcaaacttagcatcttctcaaagaaccacatattcctgcccaatgcacgtatttggccgtctgcttttcagaacagaactaactagccttggtagttaccagtctctgggggttgtgacctggacatctgcatttaaaccaattctctaaagcagttcttctcaaattttactgtgcagagtctccagccagtaggtagagatgtcttagatggcagctactcatacggacctgtttttgctgtacccctgccacttagaggagtgccatagggaagacgaatgtggctgagctgtccagtgtgatggccactgagtgcctcacaggtggctcctgcaacaaaatttgtaactcgtatttattttttacttctttttttttttttttttgtgacagggtctcactctgtcacccaggacggagcgcagtggtgcaattaacctgtctcggcctcccgagtagctgggactacaggtgtgcaccaccatgcctggctaattggtgggttttgtttttgtttttgtttttgtcctgtagagacggggtctcactctgttgccgatgctggtctcgaactcctgggctcacgtgatcaacccacctcggcttcccaaagttttgggattataggcatgagccaccgaacctggcctgtaattttctataattttaattagtttaagtttgtaaattaaaacaggattaaatgtttcttacattgattatatgttgacataatactattttggaaatatgggttaaataaaatatcttaatttcacctgttttttgttgttggtttttttttttttttttagctccttctcctgccccacctgtttcttttttcatgtggatactggaaaaaatgtaacccacactgtatttctcttagacaggctgatctgtcctatatctcctctttgaagccagagtcaattagtctctgatgggaccattgtgggccctagctactggtcagtcttctgcttctacactaagtcatcttctcttcatgtctctgctcacagagagagctttaaaaagcatgattactatctcgtttgggaaaggttgcgcacatttgttgtagagatgggcagtctctaaagcttttggggtgatggatgttaaattgtagtgccctggagtaaagcctgtta

SEQ ID NO: 113841 - DNA, 1079 bp, Homo sapiens
cgtagcaataactagattatgcgcagtggtccattttcaaagtgtttttatacttacagatgacgtagttcaggatcttgggcttctgaaagctaaatcattttataggcagatgaaaaaatgttcacaaagaaccataaaaacacaatttcaataattactactttgcaagttgactgtaatgtcaaaggttcggaaatagttcccaagaagcaggcaatgggttaaaattctgaaaccccgtctctactgaaaatacaaaaattagctgggcatggtggtgggtgcctataatcccagctacttgggaggctgaggcaggagaatcgcttgaacctgggaggcggaggttgcagtgagctgagattgcgccactgcactccagcctgggcgacagagcaacactccgtctcaaaaaaaaaaaaaaaaaacaaacaaaaaaagaaactactgaattttgaacactgaggcaagcattttgttaagtattttaatacttgtttacaccacaaattcctttatgaagtgcatatgattagctccattttacagatgaaaaagacaagatttcacagggttaaataatttgttcaaggccacacagctatgaactcggttttaattcaggaatgactgactctaaaacctcagcttactctttattactaaggtctagcgactgtgtcagaaaaggtatatagacatacctacttcccaatataagcaaaacctttattcatgtgcattaacatatatgcacatgtttactatgaaatacattaccatctgtttcagggagctctcggtacccaacatcatttttatctactggaacaaccaagcctgcaccatgaaaggtctttgtcacaacctacattaaagaaaagaataaaatgtaatcatggtaagcagacatcaaaaaaaaaaatccccaaatacataaaccctcaacatttctgccaaaatgtaacatttaatcacattttatttcagtaaatttggactccagggtaaaaatttaacactatttttttcttgaaaatcagctaaaagttaaacagttgaagtaatcacagaac

SEQ ID NO: 113842 - DNA, 1111 bp, Homo sapiens
actgccctacttttgggaagtttgcagagaagcctaaatattccaggtaaaaataggggagtctcaatttggcaggatggatgagaggagttctgtcctaccatatcttcttgctgacaagaactatttcttactctttttcttttagaaccaggttcctctgtgctttctaccagaaggtactttgaccttagaggaaaccaatattttgacttgccttctaggatgtattgggttcttccttaacaaatcagggtgcagacttccaagtgactggcacaattaagaaaagccaattatttcactgttctgtgattacttcaactgtttaacttttagctgattttcaagaaaaaaatagtgttaaatttttaccctggagtccaaatttactgaaataaaatgtgattaaatgttacattttggcagaaatgttgagggtttatgtatttggggatttttttttttgatgtctgcttaccatgattacattttattcttttctttaatgtaggttgtgacaaagacctttcatggtgcaggcttggttgttccagtagataaaaatgatgttgggtaccgagagctccctgaaacagatggtaatgtatttcatagtaaacatgtgcatatatgttaatgcacatgaataaaggttttgcttatattgggaagtaggtatgtctatataccttttctgacacagtcgctagaccttagtaataaagagtaagctgaggttttagagtcagtcattcctgaattaaaaccgagttcatagctgtgtggccttgaacaaattatttaaccctgtgaaatcttgtctttttcatctgtaaaatggagctaatcatatgcacttcataaaggaatttgtggtgtaaacaagtattaaaatacttaacaaaatgcttgcctcagtgttcaaaattcagtagtttctttttttgtttgttttttttttttttttttgagacggagtgttgctctgtcgcccaggctggagtgcagtggcgcaatctcagctcactgcaacctccgcctcccaggttcaagcgattctcctgcctcagcctcccaagtagctgggattataggcacccaccaccat

SEQ ID NO: 113843 - DNA, 1742 bp, Homo sapiens
ataagaaagtatgatttcaacctgttggtctctgttttgctatagcatatttttttcccctcttgattccttcccatctctactttacccttctcttccctagtcctatcttaagaactggatgctgtcccttagggatgttaggaggatggcactgaaagaggatggcactgaaacaggggtcagatggctcctttgggttggtacactgattgaattgcgcaactggtgatatcactgctgtggttgaataactcatgccagtatttaccactcttttaatcttgtttaccatttaatcacttcataaagttaagtgaaagctgctttgtacataatgaaatttacatacatacattttctccagtaaacgtgtatataagcagtgctcctttctttttccttattaatcctatcatttccttttgcatctctcctaatgtctgcaatatgaggggagtattttgtaaaggagcaaatacttgttaatgttggattcttttggtttttcagctatagatttcagagtaagttaatgacaagctggaagatttctggtttggagtaaatgagaattctataggagtttgttcttatggcctctggggaaaaaacaaaaacaaaaaaaaaatttgtcactggaatgagggctccccagtctcctccagcctctcaccatttgtctgcccatgctggttcatctgaatgttctaagctaaatggagaacttgctattccttaataaactagcactggtaatgaagtaccttagtgtacttaggcattaaatcctacttcagttccttctctgatcttgattcagctgcaggggtgacatttgtatcaagttctaggcactctttagtcctatagactggaaagtttcttaaaacatacattttaatgaaacccattacaatatggcattttaaatattaagattttatattgccatttacctttctggttatcacaggaagcttcttccactttgtgactaggaggaagggtagcatttgtaacctagttaatgtatttctaatttgttttgactaaagtctgagcatccgtacacataatagctgttagcaaattatttaatcagtctttttttatttttctaccacaagctatgatttatttcagaggagattttcttaattcttccccataaagaagatatgattgaggtttaaatttcatagatatttttgtcctagacccctcccctatgaagtttcattttagtatttgttttttatacaaaaacagctggtaaaaacaaagacaaaaaagaactttcaagacaatcatgtttttaatcctcccctgttaatgactatactttcaaacccttttctgttaaatgcaaggttgttcttttattgtttttgtgagatcttcattgaattcatatttttctactgaagaattcaattccactagtatatgtgagttagtggctttgtccttgtgtgtgagcgtaagcatatttccactctagtatgatagagcactgtgcagcacactagaaatcagtgtttttatactgatagtaacttagcatactttggaatgcagagtctttatgagttatatcatttgactccctacaacaaatctgcaaagttggaattatcctattttatagatgagtaaattgagggttatagaggttttgtgtcttgtccaaaatcttaaatgacacatgtaaaacccaacttcatattttccatatttag

SEQ ID NO: 113844 - DNA, 1053 bp, Homo sapiens
catttcccaagtttaccaatcagttaagttcctccagttcccctagggtggagggagtagcggtggggagaggcttgggaaaaatccctccccatggaaaccaggagggagcaagacatttctcctcagtattgctgactaagtgtgtgtaagagggattcgactgcttaaaaatttgctatgaaaaattctcgacttgagtaatttacacccagattacctggctggaattgctgctgctggccgcgcagccgcctcatcataagaggcacttgcggaggttgatggtgaggggctcttccgggtaccactctgtctccctggcaacgtggctccacttccacagctcagaagaacacaagttttccagtccatcgtccgcgtgaggagaaattacatgcaatttacagaataccttgacgtgatactcttcatcctcacagggttacgtttttaaaggaatttacagtaggattcagggggctgatttaaaaaacacaaaaaggtaaagtctgtccatcttgagacattatcctttaagttgatgctaattgagatgaatccattgcttttaaaaacgtagcacttaaaaatccattcttattcactttcctaaaatcttaattttttttctgacgattgttggcttttacctctttaagtcacaaacctatgaccattttgcactgcttttcattgcccggatgctttaggtcattcataaactccagtcttttctcctctccgattctttcccacccttctaatatagtgactcatctcattatgttcctaaaagcctgacaaagatagtgtgtatcgattaagaatcctttaagacatgcttttctcataaatgcacctttgtgtagctgctctgggtctgaaattttgggctctcatttcactcgaactgggatgaacatttctggggacaaaacagctcaatggcgtttgtcaggaccccgtggttatacccaggaatgcagaacacagctttgagtcacacaatcaggacccccagtcatgcctcagtagtaaacaccgagttgt

SEQ ID NO: 113845 - DNA, 1193 bp, Homo sapiens
aggactatcatggaggagattatggaggtggttgggctggaggagcaggggcagaattttgtgaggcatactccagagggccaggaggccgcagacagggatgaggtctacacaatccccaactctctgaagcggagcgactcccctgccgctgactcggacgcctcatcgctgcacgagcaacctcagcaaattgccatcaaggtgtcagttcacccgcagtccaaaaaagagcatgcagatgaccaagagggtggacagtttgaagtcaaagatgtagaggagacagaactgtcggcggaacattcccccgaaactgcagaaccttctaccgatgtcacgtccaccgagctaacatctgaagagccaacacctgttgaggtaccagataaggtactgccgccagcttacctggaagccacagagccagcagtgacacatgacaaaaacacctgcattatttacgaaagccatgtctaataccaaccccgaaaagctatgcatatcaagaaaatcaggggctgctccttgtaatacagatgtagtacgcacttgccgctaagccttaccaggagactctcatcccttaggtaggagtgatgccactttaaaaggagaaacacctgcctgcagtgaatgggactggaatttccccagtagagaagggtgcgagaaacatcagggtgcagaattgataccagacagaaggtgtctatgtgataatgagtttcagaggctgatctctgccaaataccttaattggtgatgccttcttggcaaagagtacaccactgtaagatattctgagttcaagaaccctgtccagtgccccctgcattgcttttccttttaaaaagtataggtctgctacaatagcaaatgcacgtacgtgggttttttgcagtttcttctcagttttaattttgcttttcctttataatggggtcattgttattaatactaattgttctttctggtttagtcctcattgccacttttgtccttatgtttccctagaacacgtacctcagagactttggtatcagtcaccagtaccagggctgatatctacaagtcacattacatttgtcatgttccaaagtagttacgaggcttgttatttttttttcattccccaggcctatttccatagatagctttttttgtttgtttccaacgaagctgctgttaaa

SEQ ID NO: 113846 - DNA, 1104 bp, Homo sapiens
agccacttcctccaggacaagtcagaaggcagtgatgtcacacttgtgaatggagggcaatagccatggtaacaaagacactgcaggccaggtaccttagcaggtctttctgcagggctgagctatcgctagggaacccacggtgactgaatcaaagggaagaaagacccaagacctggatctcccttttacatggaccctaaagcaaaggttatccctgggtattaaaaagctgggttggggcactgaactcctcagtcctagagaggaagagaactgtgggaatagcatagcactggggcctgaatttcagttccaacatttcgaggattatcccaaagtgtagtatcttactgcgtctgagatacatatgtggtatcttagcgaaaaggtccttgtaactgctgactcagcgttggcaagctgactctgcaccgtccctccttcatctgtgtattgagggcattgaactagttggtagttatatttggctccattttcttttgtttgtgggtgctaagatggactatagtagtagcctgtcagtagaccccaagctagtggccgccagtcaaaagcctttgccacagagaactgctccatcagaattcagcactctggtttgtagccagcagccttgctgataaatcagttagctattttaaatctctttaaaactttcaagttttaaaaagaactcgtgatactagtacttgatgttccagctcagcttttgtaattacaatgcatgatggtaatttcagagcataagcaacatgggataatatacaaagcagtgtacctaacaaccaagcaatacacagaaaacaacagaaacgagagattcttgctcaaaaaatatcagaatctgagagctggaatggcctattggtaaacccacagtctttaacttttcatttttgaagggggaaatgtccatattataatatggacatagatttccattttcaaaccaataggctagaagtttatatggagcggtgttttttgtgttttgttttttgtttttttttttaaataaagaggtgattgaatatagtatgaaaaatactaggccaagcgcgtggctcatgcctgtaatcc

SEQ ID NO: 113847 - DNA, 1090 bp, Homo sapiens
tctgtgtcaggctctacagaagtgcagagggcccacctgctgtggcctttggaatactgtgcccttagctattcccaatattttttttattgctctttctccgagagcttgtactctgctttccctgggttctaacccgggtctcttgtcttgcttgtggccctctgtgttctttccgggtgacttatttttcctcatgactgcatcagtcacccatgcaccagtgtccagcctttctcaagcccatattccatccattcattaattcattcaacaggtagtgacaacctgagattttaatctaatgaagggtcaaatgtgcaaaaagataattatagcgaaaataggaagttatgagtaaagggtggtgagaaaaggagtgtctggggctaccttgggagtcttggagggcttttgaaccaagacctcaaagctaggggtttgccagatgtgcaaggtaaggaagggaacgtggctggaggtggtgccgtggggaactactgggagttgaggaaagagaacttgctggggttggggagatgggaggaggaggctccagagatgcagtcagggaggggaatgggaggagggaggggggagggggaggctccagagatgcagtcagggaggtggatgggagtcagactgtgaagaatcacctaggtcctgcgtaggacttgagtttcacactgttgacacaacgaagacatggaatatgttttagatctttcagagtcagctgactctagtaatgacatggtatgtggattggaggcaggcaagactagaggcaggtcggcaaggaaggagtccagtagagatgatgagcacataacccaggggaaacccaggatgtggcagcccaatattgaggagtgagaatcattagaactcagtgattgatatgtttctcagggcagggaaggaaaggggacattttaaacaatgtctttatagtgaaccagattctgtctcaggtacagcagaaatgtggaaggcccacctgtctcgaggatagtggggtctgagcatctctcaggggtcttcctaccaaaggcaagactttgcagcaccagagagactaacttcc

SEQ ID NO: 113848 - DNA, 1031 bp, Homo sapiens
atctctggcctggcgccctttgggtgagatgacggggtgctggcatccctgtcggtcccagattacccggaaaagccctggcaggtaaagagaggacccgcgcaggctgggagctcccactcctcctccagcgtcacgctcgccctccgccgctgcctcgcgtccgggtctgtttatatagcgtctggaggccgggaggcattgcccacccccgccaggcggcccgccctcccctcctgggctccgggctgccgcacgtggcagacaccagcgacgtctccgcggaaggcaggcgccggggagtggggcgcgggcgaccgtgtgcagccgcggcgcatctccgccttccgctcctcctcgcagcgccctcgtccgcttccaagcccagcacagacttcggtttctccgcctccatcccctttacgagaagaggagatcaaaaaatattgccctttaggtgctcgtgatggtcctgtgggttcgttcagttgccagaaaagaatggtaacatgaacagcggagcgtgagagcgtcaccgggggaagggacgagattgatgggcagagcgctcacttctcagaggatcgcattccgaggaccgcgcgaggaagggacgtcgcggcgccaccacttcctggctggactccgctgacatctgtagcctcctttccaccaggttcccggggctcccagccgctgcctgcagaggagcgtgtagacagcgcgcgagggtccggcacttcgtggacctccatccgaaccggagttctgcccggatcccgagtccctggatcccggtggagcccgccggcaagctggctccggagggagttgaacttgagttcaggtgggttatcccaaggggagcacaggaaaagatgttcagggaagacgaagaaggtgacgctgttccaatgtcaaaagcggacacttttcttcctgacacttgaaggggttgagccagttcctctcagttctgtctcctaacccgctccaccccgacccagccctcccacactaaggaggtgggg

SEQ ID NO: 113849 - DNA, 1032 bp, Homo sapiens
actggggaaggatctgttccaagcctctcttagcttctccaagctgcatgcattccttggcttgtggaagcatcgctctggtgtactcccgtgccttcacatcctctcccttctgtatgtgtatgagatgcaacctgagaaagaagagttacaacacaggacaaaggcatgcaagatattcgccatccacctacatgcactcttcggagcgcaaaacacagacaggagaggaagagaggcagggttcagatccacaaggatgtcagcagagagcgtgtctgcctgttcctggctggaacttcacacagtgactcctcatggtacctactatttgttggatgaaggaaagagtttggagtcagtattggtagggatactctgggctatatctttctttctacccatcctttggcacctcattgcttcaggttctggaatctgatatccatgtttgagcagcacaatgaaagaagaaggtaaaatatttactagaaagtaaatggggatgcagggcatgggatctgtagtaggaagattcctcttgcctctagaaggagaaaatacaccaaagaacttcaaatgcgtatttagacacaagtgaattggaataacctaaattgcaagtatttattcaccataattgaacattttgcaactcactgtcttttctgaaaacaaaatgcagtagacatagcctttaagtaatagatttctaacttcctgatgtacttccaacctttgcttcttggtatctaaaagtttaactaggcacatcctgcaaactacttcttggctcctgagacataaaattcatcttggtctgatgaatactttcttccagttttatttgagaaattccctagaagatatggataattttaaaagtctgagaaacgaaatcaaaggaaatctaattccacaaagaatgctgagtctaaaaaataaattataattctggaagattgaaataactctttgaaagacaatatccccataagtatacatatatctagaatgtgtattcaaataaat

SEQ ID NO: 113850 - DNA, 1031 bp, Homo sapiens
tagttttccttttaatagaaacatcagccaggtgtggtggctcatgcttataattctagcattttgggagcctgagcctggaggattgcttgaggctagaagcctgggcaatatagcaagaccttgtcgcttataaaacaaacaaaccaaacctgataagatattctttaatgtgagcaaggtttgcaagtagctttttcaactgtgcaaatgcccaactccttctacaagtggaacccttgatttaaaaccaacccattgattctagttattaaagtaaaacaatagtttcaattcctaatgtagtatgaagagacccctttgaaccatttcacagaattttaagaattaatacttgtagagaagtgatatcatgacaacatcaatgtagtatctttatgcatctgtgagaatttggtttttaaaaaatatattccttagaaagcctaaatagaaaacaaaacaaaacaaaagaacagtaaggtacagttgtacattgcaaaaaagaagtccttaagtcatgatgcgtgaagttctctagaagttcttgtcagtacttactgctgtacttcaaattttttattctgtagatatgaagtaaatattttatatactttttattaacatttattatcgcaaaaatagttcccttacaaccctagcataaattaaaactatcagtatacttaagtgagtcatgcaagtgtcattttgccaggatatataaaagatatctgagtaatgatatttagaaatggaaaatgtgaaaatagcatcattataggaagattccaaatctgtttagatttataggttatggtcatttatataaacattttaaaaatgacaggaacagtctaattacgttaagtcaattaagttttttttttgcttgattgtttaatgctcttatgaaaaacacatatttgtaaaagaaattatttgcctagaaaaatttaccatgcaatatatttcatcatattggagttccttttttttttttttttttgagatggagttacactgttgtc

SEQ ID NO: 113851 - DNA, 1034 bp, Homo sapiens
ttctgacctcaggtgatccgcctgccttggtttcccaaagtgctgggattacaggcgtgagccactgcacctgcccagttctttgttaatgaaagcctgtgtacctggaagtcaaaggtatactttgcatagccatttcaaaacttgtcttaggtattttctaaaatgtttgtctcattggatataggttttgattgtgcttacttgagaagacttaaatctttacccttctcctggtagttttcttctggcagttcagtattttgccatgcaatttttattagacaatttgatcattgtgtttcttattgcctaatccaacagatttaatcttttaatctcaaatacagcaaggtgtgctgtgcctttacagtctgtttgcagagttttacatcttcgtttgaaaggaagtgtttaaacacccctgttcaaaaatctgctagttcttgccaggatgatttaaaatgaattttaaaaatccattagatttttggcaaataagctctcaattatggtacagaataaatgactacaaagtgctttttagagtaatggaatagaaatgactgaaattttattactttacacatgcagatttttctactgtggtagatgttcttaaactaaaagattactgtcaagattggaaatttttatcacttaaaatatataattatatttgaacatttaagcagaagattgctggaatggggatatacaggcctgcagtttcgttaactgttgctccctgtgtgatggcctcagaggaaattctaagtccagtgttcgtcaaagaggctggagaatgtttcccttttagtgatcagtgaaaataaatttgcttacagtccagggagatcatggtagtagagaaaaaaatactttagtaaataattttctaaaattctctattctaaaaatatactaagaaaggatgatttttaaataccttggtattttaaagaaatacattttctgtatgaaattaagataactctattcctcttcttatagctaacatttagactctaaat

SEQ ID NO: 113852 - DNA, 1091 bp, Homo sapiens
cggccgggcagaggctgcaatctcggcactttgggaggccaaggcaggcggctgggaggtggaggttgtagcgagccgagatcacgccactgcactccagcctgggcaacattgagcactgagtgagcgagactccgtctgcaatccctgcacctagggaggctgaggctggcagatcactcgcggtcaggagctggagaccagcccgaccaacacggcgaaaccccgtctccaccaagaaatatgaaaaccagtcaggcatggtggcgcccgcctgcaatcccaggcactcggcaggctgaggcaggagaatcaggcagggagattgcagtgggtcgagatggcggcagtacagtccagcctcggctcggcatcagagggagaccagggagagggagctcggcatcagagggagaccagggagagggagagggagggggagggggagggggagaagtgggcttaatttaaaattgccttatatatgcagtgatgaaaatcaaatcaaatttaaattactatatggaacaacttcctgataatgtaaaaaaaaaactgatttaggagagggttttcggtactttgaaatattaatattatgaaagttgaacactgatgtttcaatctgcttcactccatccccattacttcttgtcagctgtctatgagcattgggccacttgccacagttttacatgataaccatatttaagtggtaaaaaagatcagaacatatacagtgccttcttaagtcaggttcctgatttatttctggtactatccatttagatacatattaatttacctaatttcttaaatccatggaccagtactgatattcctgtttgtctttatttaggattttacatgtgtacgttaaaaaatacattggtaacagctgactgacaaccaaaaaagtaaaaaagcaaaacaaaaatcaccgtgctttgacaggtttgtcatgaagcaaaatgcatgagaaatttgatctgtttcagtttgcttgttatcagtcagaaatcacctttgctttgcccagagaagactcaggttcactgaattctcttcaccactccgtgaaagtgtgtagc

SEQ ID NO: 113853 - DNA, 1047 bp, Homo sapiens
ttcaagagtgctttaaaaatgaaaatacttaagttctgcaaacttattatgaattcattattttgaattgtaagtgaaggagggctgaatattgtcttttctcctggacttttagacttttgccttaaaagttatatccttaaatgaacagtgttctcaaatggggaaagaggaaaatattattgtttacttacttttttttttttgagatggagtcttgctctgtcaccaggctggagtgctgtggtgcaatcttggctcactgcaacctccaactccctgggtctcctgccttactctcacgagtagctggcattacaggtgcataccaccatgcccagctaattttttaatatttttagtagagacggatgttggccaggatggtctcgatctcctgacctcgtgatccacccgcctcggccgcccaaagtgctggaattacaggtgtgagccaccgcacccggcctacttacttttaaaatacatttacattaagaaaaaaagaatgtatgttcattgtagaaaatattacaaagttaaagcaagtaagaaacaaaattatctacaacccatcctatccaaagataattatcattagctattggtgtatttcttgcctaaatatatgtactatacatagacatagtccacagtataaataaactctgtggattgcttttttaatttcactgtagaaatattttaattgttgttaggatatgtatagatttgtaattttttttaaccatctggtcattttagtattgagatggtttgaggaaagaggacattagaaaaaaaaaaaaaacctgtgtactgggaattacagatctgaaattgtcatatacaccacatttgcaaaattttttcacctgcccttgaaaaaaaccaaggcatgattttgaattttataagatggtctattaagattgctgaaacttggagtgctttctggcaaaaccagcaattaaatgaagagaaacagaagccatcactagaagagcaactattttgtggcagttacttgtttcactatctcttccc

SEQ ID NO: 113854 - DNA, 1007 bp, Homo sapiens
gcatcaaatactaataagtaacttatactgaactcttaggtatgtttacattcttaatttaatcttctgacattttacagttgaggaaatttgtggcttagagaagttaaattaccttgcccaaggtcacttggtcttctaggtaacaactagagttcaaacctaggctgactgcagagcctaccttttcaggtgggattcagtaccaccaagtagcactttctgaactgtgttctatgaaccaaggtgtattatcaggcattactttaaacaggggttttgggccagtaaggttgataagtgttgcatattgtatcaccccctcagagatttcacggcatacattggtacgttaaaagctttgaaaagtactatagaaaagaaacttcagcattttagcatatctttcacaaactgacctggtcactgatccagtttttaaagaacatccagttttctttaaagaactttagtgtcctgagagaagagaaagcgctgtggacagatggacctgtcttcaggggaggaatctggctgcctctgctcgctgaattctgccttgaggccttcctttcatgttcatgtgcagcatggtatcatccagctgtgtaaatcttaccatccttcaagatcagttcaggatctacctgttctctgaagattttcctgaccacttgagtccataccgatatatctgacctcagcaaagttcctgattatgattgatggtaatgctctttagcacgtggctgtttccccagttggttcctaaactcctcaaaagcagacacaccctactttatattattcccctgtccgctgctgagtagcccctggccttactgccctcgagggagaggttaaagtgttccagtggtttttgtttggtttacaaatactcttcgtctccctggtcttgaaccccggttgagacctgcagttcattctcaatcctcaaacttgaggtgctcatgtgatcatcttacactcatatcagcacttatgct

SEQ ID NO: 113855 - DNA, 1034 bp, Homo sapiens
caaagtgttgggattacaggcctgagccaacactcctggcctccttcttttttataaggatgtgtgcctcttcacatagagtgctgtgtaggacttgaacttctatctcatgaatgtctcatgttggcggaggtcatgcagcatgattctcattgcttttaagtgatggataattgagtgattaataattgatttcactgcattctgtgttttttgcaccttttaaaaaaaatcgcttaagctagggtttttgtttctgttttttaaatgctaccccaagtttggttgtgttctcaagtgaaaaacattgctagctatgccgtgtgtgaactttcagcctagtcattttgtggccataaatattgtttctatgagcctcttttcagctgtgctagtcatgtgttttctgtttgttccttaaattatgtaaaatgacccctttggcagccaacaaattttatagcttactatgataaagagcttccttatggaaaaaatattcaagttatataaaatgttttctagcaggtcaatttttttctgaataaatagttttaaaaacaaatttaacaggaagcttaacaattttttgaaaatttgtacaagcagtgctcaatgtagggaataaggaaaaccaagagatgagaaaaattaacacccaaaagctcatcaccagagaaaactgcttttactctctcttcttctagtcatttctatgccccattattatttttgcatatttgaggtgatgtggtgtaaacagtatgtatattcaatgtgtatattctacttcttcaaactaatattatatataaagattttctacaaaaattattttttgaacgttttataattatatactattcagttgtgttaagttcagttagcataatttttctaactgttctcattaagggcattttgtttgtttctagtagattggctagtatacaggctgcagtgagcatttctgcataatgtctcttctgtaattagaattgtgtccctagaatatattcacaggtctgaaattt

SEQ ID NO: 113856 - DNA, 1163 bp, Homo sapiens
tgccaatgttgagaaacagtgtcttgtgcgaagaatggtactggcttaggaaaaaacttaacaaataatacctcagaagcaaaagcactcaggatatctgactggaagatctgcataggtgatgaagacggcccaaacagaaaagagaggcaccctttactgtgaatgaatatccttgtacaaagaatctgttttgacccatgctgcttctggaatggggcaaactagatatgggggagtggtttaaaagcccgagctgacttagttacagatattagctttttttatacttctgatttcagataaactctcagtgagtaaaaaataccaaatcgggactctgcatatccccgccttgttcctctgccatttggggcactgagccagcctgctgacagtgacatccatctaataccactgccaccatatggttgtgctaccgacaaaaggttatatttatcacacacggtacaactgggaaaaccacatactgtacaaacatgacctattaagcatctgttttaatcaaagattctagaacttctttgctctaacccttaaaaatatgctttattaagaggtctttgatagagaagtagatttgtaaagggagaagtaaaaatgcatcctttcattaattttgaaatagtaaggcgaggagatagcctatttcttggtatttcttctctaccctgaaagatatctcctaatgggaagtcctgattaatggcccgcttgtattccaaactgttttattgttgcctcagcctttttcaaaacctgaaaattggtctcatgagctctactgtggtggtttgccttcatgtactcattgtatatcccctcccttttgtataggaagacagagatgtcaatgaccccatgcccaaccgaggcggcaatggactagctcctggggaggacagattcaaacctgtggtaccatggcctcatgttgaaggagtagaagtggacttagagtctattagaagaataaacaaggccaaaaatgaacaagagcaccatgctggaggagattcccagaaagatatcatgcagaggcagtatctcacatttaagcctcagacattcacctaccatgatcctgtgcttcgcccagggatcctcggtaactttgaacccaaagaacctgagcctcctgg

SEQ ID NO: 113857 - DNA, 1038 bp, Homo sapiens
ttgtaaacaatgctgtgaggaacccgcttatggctcagtctttgtgcccatcattgattatttcaagaggacaaattcctagtggaatcactaaatcaaaggattaataactggttccttttacttggtagtgttttgtcaactctggagtctctcctctgctctccatccctgtccctcactgcttccacttcatacagaatatatttgttttgcccttttccatttttctctttttttgtctcctttggtaatggtctccccctgtatatggactatctgtagaccattagaaattgagggactctcaagagagaatgcaacaaactgatactatttcaagatgacagttgaccatagcttacatgcagtgttcacatgagttaagtcattgggttccctgccagattttaagtgaactaaaatgttttctaaaattttggtttgagattttctggcatctgcctctttcagagtgagaattaacataccatctcagttgttataattccatcccatctttgagccataaactatttgataactaacttcaactcactcttcgtgactcactcgcctcagaaagatttgattttctggaaaattacaatgaagcagagatgtaaaaagataagtaaagataactcaattgattccggaaatgaggtagactaccgcaataattttttgaaatagtattaccaaattttctcctttacaacgtttttaaacatctcatatgtatcaattatatgctaatgaactacttgtttcctaatatctttaacaagataaattactaagtgtagccaacatatattcttactaaccccagaaaatgtctgttctgtgagttaataaatgttaactgttgtatattacatactcttttccatatttgttttacagtggagagggtcttcaaaaaacgatctagtacatctcttcattttgctatagggccattactatcaatgtttaagacttctgtaagtaaatattacaacctgtcttgcaaccaatcctgtaatatctaac

SEQ ID NO: 113858 - DNA, 1027 bp, Homo sapiens
tctagtttcatcctgaaaggcagacccatccattaattccatgagcattgattttgactttcagccttaaatagagcaacaagtaaacattttttattccccttttcattaatatttaattcattaatgaggacagtgggtaatgttctgtgatatagtactcgtgtgacaaaggagtagtcccaggaaaatttttggaatcaaatcaacaagtatgtattgagttttgacataatacatgaaaatgctgttttggctaagagcagaacttctgatgattagttttgctgacattttaatcttggagatgataaggtagaattataggcttaattttgaccttcacagggattgattgataataacattggaaaaaggtaactaggttatcttagagtctctattagccaaggaaaagaagagaaagtcttcaaggaattgaggcattgtttgagaaaatgattaaataaaaaactataaccacagttttattttgtctagttaaaataaagaatatatagtattatcaagaaaagaatagtctacatgggggttagaataagggaacctaagaaaagatgtgattattgtaccactagctatccatcagagagggagcttgagtcagtcagtataaatttagtctgttcagcacaccctattgtggaggaggaagcagggagcttcaaaactgtaaggcatcagccattaaaacagattctgtgtttgccaagcaaccttctcattgtgaccagagtttgcaggcagagtttccagtgatgactaggttgcatgaaaattttttttttctcatttcaaacagtattttatgtatcagcttcttgtttggtgagcatgtgtaattctcttaagtttaattaattttgcatatttataacaatttttaggaccttccaagtagtaccatctctgtctctagcttaccttcctgtaacttcaacaatgaccatagaggaagatctccaataatctcaaatttaaagagacgatagatagattgattgat

SEQ ID NO: 113859 - DNA, 1813 bp, Homo sapiens
gagtaaaccagttgttgctctcaaggaacttgataagaagatattagaattatacttaaattcataatacaagaaggcagaatggcattcagttggtgtgcttaaaaaaccgtcggccaggcgctcatgcctataaacccatcactttgggaggccaacatgggcggatcatgaggtcaagagatcgagaccatcctagccaacatggtgaaaccccatctctactaaaatacaaaaaattagccgggtgtggtggtacacacctgtagtcccagatactcgggaggctgaggcaggggaattgcttgaatctgggaggcggagattgtagtgagccgagatcgcaccactgcactccagcctgggggacagagcgagactccgtctcaaaaaaaaaaaaagaaagagcgagcgttatgctagatgcagaatttgcggcagaagtaggaagatgggtatgatgttagtaagcacagataagggatgggagggggacttctaagcaagtagcatggggaaaagtacaaagaagagaacacaaggaacattcagagaacagcaaggagcaaactttggcagaatcaagcaacatgaataaggaagacatctaagaagataaaatgggaaggtgtattagggccatattgaagagagcctttaaagctgagttaagagatttttatttaatttgataagcagtggagaacgatcaaagatattaagcaagggaataacatgacccaaagctgcccttcacctataataatctcttgctataaataaggatagttgagtagagagaagccgaaggtgaagaagccagttaggagtttattataataatcacccaagtaggaaatatattagcaatggaaatgattaatgagttaggaataaagaatccacatgactttgcaaggttatattgggagaaagttgctaggggctatgagtacacagtaagaggccccttagtagcagtttattattaatactgtattccctgttgccttcttggttgttacatgagcttttaaaagcaaattattttaggatttgtttagtttaagaattctgtgtggacactgtatataatttagattttagatttacacttacaagataaattttcagttatggtttatgtttgtatttgaaacaactttcacaacgtgtttttccttcatagatatggcagtgtggtggcaaattattatttgttccttgttctcgtgttggacatatctaccgtcttgagggctggcaaggaaatcctccgcccatttatgttgggtcttctccaactctgaaggtgagttttttggataaaaggggaggacagggaactaacatttatgtaccacatgctatagtagttacttaacaattgtcagcttattgagtgggctcttcagcagtcatgttgattctcacctttaacttagctagacttattcacgaaatatcttattgttctttaagattattcagctgaagcaggaggattccttgagcccaggagttcaaggctgcagtgagctatgattgcaccactgcactccccgctggatgacagaacgagaccccatctcttaaaaaaaaaaaagattgcaccctatttttttaattgacaagtaaatattgtatgtatcttgtacaatatgatgttttgatatatgtatacattgtggggatggctaaatctggctatttggacatgtattacgtcacctacttgtttttgtgctgagaacacttaaaatttgttctcagcaattttcatatatgtaatatattataaattgtagtcacc

SEQ ID NO: 113860 - DNA, 1604 bp, Homo sapiens
ctactcgggaagctgaggtgagaggatcacttaaacccaggaagttgaagctgcaatgagccaagattgcaccactgcaccctagcctgaatgacagagcaagaccccatcacaaaaaaaaaaaaaaaagaaaagaaaagaaagagattattatagggaaagaagtacagtgtccagccaagctctcataaactctctctgagattcaatttattcttctgttagcagaatagaatacattatctcagcatatatgatcttccagctcagggatatcaggttttgtacaatactttttacttaaatacacatgatattttaatccttggcagatgacatattagagtcattaacttgcatttgttgtttaattaaatgccaggtcctgttgaaatgaatttgttatgtgtaggccattttcatgtgtctaatataggctgtttatgatatgacatttgtatttttataacgatatatatatatatattttttttttacagaattatgttagagttgtggaggtttggtgggatgaatataaagactacttctatgctagtcgtcctgaatcgcaggcattaccatatggggatatatcggagctgaaaaaatttcgagaagatcacaactgcaaaagttttaagtggttcatggaagaaatagcttatgatatcacctcacactaccctttgccacccaaaaatgttgactggggagaagtaagtagtcacatctcaaaatgtatgtgtttgtagactgagtttgggagaaggcagagagaggtggaaatatgtaagagggaagtattcttggggaaaagttggggtaaaaactgtctgataggatctaccacctttccactaaacagctatagctgccagaccagctggccaccatgctgtctcctggcagcctttgctcattggccccctagcctgcaagacatccactcttcactccagctcctggcgcctccatgcctcttactccaactcccttccttaactaatttcaatttatcttactgctctcaacttagagatcaccaatactgaaaagcccttcttactattccccacttcatcaaaaagatgcagttctatgttctttccaggggttctcacaacacccaaaatcacctatctcccaaccagtctgagtgcttcaggaccttgatcacttgtgtccaggtggactgatgcagggacccatatacagtagatactccaacaatgcttttcaaatgaattaaaaataattaaaatcagacaaaagcactttgacaatcagacattgtcatttctttgtttattcaaacttgtcttcagactcacttctgattgctccctgcagccccgctgtatgcctcacaggtacactaaacctgccatgaacgttcaagtctacatccctctgcttaattatgttcagcaaatattggttgagggcctactatgtgccagtcactcttctagacagaaaaccagagaagcaaagtcgtttttctcagggaactggcatgctacctggggagagagaccaaaaaagtctgagaaaacaaaaatgataatgacagatggtgataaatgataatgacacataat

SEQ ID NO: 113861 - DNA, 3064 bp, Homo sapiens
cagataatgaatttaggtttgtatacattgagtgtgagataccagcagtatattgtgacttaacaatgaaagatcttaggacttagaaaactgacaatcaagagaaatccagaaaactgacaatcaagagaaatccaaagtctgaggtgtggttgagaagcttttccatttccttaaactgtctcctcatgaaagtcaagtgatgatttctgatgtcagtgatatcaagggtccaaatttgaaacttttttcttactgtgttttccagaacctgcacagatttactcatattccttcaggaaagtgtttagatcgctcagaggtcctgcatcaagtattcatctccaattgtgactccagtaaaacgactcaaaaatgggaaatgaataacatccatagtgtttagagagaaaaaaataaaccaataacctacctactgacaagtaaatttatacaggactgaaaaccgcctgaaacctgctgcaactattgttattaactctgtatagctccaaacctggaacctcctgatcagtttgaaggacattgataaactgtgattttacaataacattatcatctgcagttactgtttacaagactgcttttaccttaaactttgtagatgtttacatctttttgttgtgttttaagatgatgttggtaatttgtgcctttagctctgttttattagacagagttaaagcatgttgtcttctttgggattacactcaggggtctgaaaggcagtttgatttttatttttaacacacttgaaaaaaggttggagtagccagactttcatatataacttggtgattatcaacctgttgtgtctttatttaattttacatctttttgaagcactgccacaggttattagccaaggtggccttccttcacagtcatgctgcttttttgaaaggtgaatttcaacacatttagtgcctctttcatttctcagtatatatttcaagagcttgtgatgaaatctataggatggtaatgatggacttgtcacctgtatggggaatacttttactactcagaaatgaatttatgtgctgccatttgctataaagttgaactttgtatggcttgaaaaagaaatgacaatatggaacatcccaaggctgtcccatagggttggaagttgtgtagcattcactcccttacctactggcattcccagtgccctctgtccatacctacttctaggattgcaaaggagtcttccaactagagaaaaattgtccactgacatttgggatttacttttctccaatacctgccaatacagaaaactattatcagttgttattgttatcccttgaaagcgagggtgacaaaaacaacaaaacaccgttataaacacatcaaaggttcattctgactgaggtaagactttccaagcccttgttagattaggccttataaaacttgtgtgcattataacctaagctgtgcaacctgtgaagccaagagtgaactgatgtttcatttatattttcatccaaatgacattatctgcacgtttttaaaatttaaaaacaaaggactatttaaaaatacagtttattaacaaacgtgaactactttctgttacattaggtgttccctagtgtttcttaatttctttttagaaagtgtatttttattagtatttttccggtgaacagaagatttgtttggatttaaacatttactaagacagtacctattaggaaaaccaaatattgcaaatggtcaattcgattttaatttctcaaaagatactctgttatccagaagattaaaatgcctacattgagtgcttaaaaaaaaaaaaacaactgtgatgatgtgagcagaatggcaagtaagttaagcatttttgatcctgtaatcatggtatcattacaatgaaaggaattcacaaactactgccagaggaagtttgttttttaatttaagagggaaatataacctataaatttgtttcttccaagcttagctcttaaatttggagactcaaagttaaacatcctcaacagagttttatttataattttgaattgtcaatttgtattttgctactgatctgtgatcaaccattttaactttcatctctagggatgtttaacatttataattgcaaaataaaccaactataaaaaaagaaactaagagagaattggtactttaattacttgtgtgtttgcaaataggctccattttccatgttgagtagattataaccttattaactatgcataggcctaagaaaggtggcaatgaactgtgcatgtaaattttaaatgggtactttgtgcaattcgttaaaagaagatactctatgaatatgattctatatattgaaatcagaaaacctaccaaacaaaaacatcagaagctgctgccataatgactattttctactgtaggctgctttggaaataattcccatatccttgctttgtaagttggtaatatcactatgcatttctacacattttataaatttgatttatgcagattttgatacactgtatgtttctgtagaaattgtataaatattcaaaattttattaggataaatttgagaaacttacgtatatcttaattctgggttgcttgttttttaggtgacaaaaataaaatattgtattttaattcatgggtttttttggtgcttgtaatcatttcaaatctaaacactgcacatttgaaagaattacttgattttactatttacaagacacacaatacctaaaatattatagaccatagttattagttgagtatgtgcttgactgttgcttagcattctgttacacatgcttagaatactcagagcttatgtatctgttggaaggaaacaaaggtttatttttacctgtttgcctatgtataccaattttttaagtttatactttttttaattataaaaaattaccccagcaacatatatccttcttggctgtatatagaattgccttcttggctgtactatagaattgcctattagaagcaaacatgccttcaaatcaaatttgtttacaacctgacagatcaggttaagtgg

SEQ ID NO: 113862 - DNA, 1058 bp, Homo sapiens
ttatatatgccttacagctaaccattgtttttataggtcagaaacccttcttgccctgattggaaactcaacttaccctgcagcaaaggtaaataaaaatgtttcaattgaacttcattgtgctcctgggcctttattcttcaagagttaacagtgcagacttctggtgatcctcatcctaggtgttaccacatctatagaatagtaactcaggagtgcaatagactgtcgcattaaaaggaaagaaaaataacttttcagcattatgtagcactaaattttggaactggaaatggcctttatatcatctagtctttcattagaaaagcaggacaatcaacttggacattgtcctcgggcagataagagatagtaaaataccataatccattcatatttgtgtaattctttgattctccaaattttttccaaaaaatattaatggcttatacaaagaaaaacaagaacaaaatatacaaagaaaaaaacaaggttatgaaagaaattaaaagcaaggtagtgaatcacggatttgaatagggctctgtttttcttactggttttgtaacatcagacaactcatgtaacatttcggtttcctcatctgtaaaatttgaatgtttttgaggattaagtaaagtaatacatttaagacacttatcctggtggcaagaaatagtaaatgctcgataaatattagctaaaagtatatatgccgatatacatgggttaatacagatactacgatggagtattagataaagttctagctcactgcagccttcaccttccagactcaagcgattcttctgcctcagcctctcaagcagctgggaccacagatgtgtgccaccacacatggctatgttgcccaggcaggtcttaaactcctggactcaagcagtcctctccccttggcctcccaaagtgctgcgattacaggtgtgagccactgttccagccctgaggttcttgatagtctaggtagagaggaaaattaaagaagttatgtggaaaacatacattctttaggagagtttttcctggcaccaaataaa

SEQ ID NO: 113863 - DNA, 1974 bp, Homo sapiens
tacaaaaattagccgggcatggtggtgcatgcctgtggtcctggctatttaggaggctgaggtggatcacttgagcctgggatgtctaggctataatgagctgtgatcatgccatcgcactccagcctgggcaacagaccaagacttggtctgaaaaaaacgaaaccatttgatgtcacatgtgaaaaaagacctacaagtgaagtaggtgggccaaaagacatgcacatttaaaaatgtgctaactatactagctaaaacctgtgcttaatatatgccagaaactgctctggtgctgttaatggagcctgctaaacaaaactgcttctcaacaatagaagttgtactacgctatggagtggacactccatagcaatgaaatgttttggagtgcctgtttcctcatctcagcaacataatagttctcaaacttcttagtctttgttattctgatatagataaaatgttttctattatgagtttcattttttttttatgtttaacagccatttgtggggctgagtgcagtggctcatgcctgtaatcccagcactttaggaggccgaagcaggcggatcacttgaggtcaggagttcaaaaccagcctggccaacatggtgaaaccctgtctctactaaaaatacaaaaacattagccgggtgtggtgatgggcacctgtaatcccagccacttgggaggctgaggcaggagaatcgcttgaacccgggaggcagaggtttgcagtgagtagagatcacgccactacactccagcctgggtgacaagagcaagactctgtctcaaaaaaaaaaaaaaaaaaaaaaaagccatttgtattctttcctgtggtcttttctcactggtctttttattaatagtttttgggaatactatatattaaggaaaatgacccttttgactttatgatgcttttttcatgcagagatttctttatgtaggcaaatttagcaattctttcactaaaacttttctagtgaggtccttcccactcaaagatcataaaagactataaaaataattatcctttggtttctttttttaaatttttgattacatctttgatccttctggaattaattttggtgcaaggactgaggtaggggctcacgtttccttcccgatgtcagccactacttttggtcttttaatctataaaagcagggcactgggttagaatttcctaaattctcttatatatcaaacaaagcactcactgcaaacttgatcaatagaggaaagtatgctttttttgtattttaccttttaccagtttcacttactgtaaatcataaggttgtcttacatagtagaaaaatagcattatcttaaacctggctttttattactaaatatatcactaaaaatgctttacaaagcagtaatgattttatttcttggggaataaaatcaagaaagctaaaggagctgctatgccactgtgtaagatctagtcctttaaaaatgaaatttcatacctcaccatgtttggattagttcttcatgagattcctgttggagactgacagttttagagaaaggcagagtatttattgacattaggaaatgccaagacctatagagactagccagggaaaaggactggatgtggtgaagtgaagaacattttgaaagtaagctctgtgagggcagtaaaattttcacttttgtatactgctttgtctctaatgcaagaaacagtgttctaagcatgtttgtaaatatacaaatacccaggttaaaggggatagccactgtttagctcagtcctgttgctagatggaaatgtgaatataggattcccagatctctcaaattttcaagtggaactagaactcgtgaattctgaattttaaatacagtattggcaatgaattccaattttggggtcaaaacatgtctataggtaagattctgcccaaaggtcaccagtttgccacttctataaattaaata

SEQ ID NO: 113864 - DNA, 2584 bp, Homo sapiens
cccgggagccacttgctgggctgagccgcggccgctcgggccgggaggaggaggaggaggagggtgtgcgccggggcgcgggcgggggcgcgggcggccgcccttgggaggacgccctcgggaggaggggggcgcgggcagggcgggagcggatttgggcgggaagcggagccccgccagcgcccgccctggcagctgcgggctccgcgccgaccctccggcttcccctctcccccctcggccccgtcaggtggacgcggatctgtcaacatgggtaaaggagaccccaacaagccgcggggcaaaatgtcctcgtacgccttcttcgtgcagacctgccgggaagagcacaagaagaaacacccggactcttccgtcaatttcgcggaattctccaagaagtgttcggagagatggaaggtgaggcaggagagggacggagctcagggggtgcaggtgtggttttcggctaggagggccttaggcaggtagtaggcaactcatgagcttcaactttgccaccccagtgactcacctgaatatcttaagagttccaggcagacgattttaggtttttacttatataagacttcgaaagcaaaatgctgttaaggaaaatgtggtccttaaagatgatcttgtcgtctttggatgtttataggtaacaattttgctgtatttttggctcttattttatgtccacagaccatgtctgcaaaggagaagtcgaagtttgaagatatggcaaaaagtgacaaagctcgctatgacagggagatgaaaaattacgttcctcccaaaggtgataagaaggggaagaaaaaggaccccaatgctcctaaaaggccaccgtaagtttaaaataacccaaattgctccttggatttttccttcagtttattaaactctgttgcttcctttcagatctgccttcttcctgttttgctctgaacatcgcccaaagatcaaaagtgaacaccctggcctatccattggggatactgcaaagaaattgggtgaaatgtggtctgagcagtcagccaaagataaacaaccatatgaacagaaagcagctaagctaaaggagaaatatgaaaaggtacagtgtcatcttttttaaagccgtggataagactaggtataggtaataactgtagaaaacctgggaaatttagttaatcttgtattaatggttgtcagctatgttttgaaaaggcctaatgaaaattgtacacttcaacacaaggtaattgaaaccttccttttgactgaaaccagtgtttgtagcactagtatattcctgcagacagacttgtagttacttgtagttattgtatagtctgtatagtctgttatttttttttttaagcagagagtcaaagaaattgttttatgtagatatatataaaatgtgaaggtacaggagggactatggcactgtgtgtgatgtaaaagggtattggtagtgaaagtactgatactgctgtatcgcaacccttgtcattttacgtcattaacttgttaaagcctagtgggataagtgctctaaaaacttagactggttacctttttagacagttattagggttattggtcaatcatcttagattgtttacaactaagtggtttttcacagttgagtaatgataccggatgctttatttttttgacaatatttcaggatattgctgcatatcgtgccaagggcaaaagtgaagcaggaaagaagggccctggcaggccaacaggctcaaagaagaagaacgaaccagaagatgaggaggaggaggaggaagaagaagatgaagatgaggaggaagaggatgaagatgaagaataaatggctatcctttaatgatgcgtgtggaatgtgtgtgtgtgctcaggcaattattttgctaagaatgtgaattcaagtgcagctcaatactagcttcagtataaaaactgtacagatttttgtatagctgataagattctctgtagagaaaatacttttaaaaaatgcaggttgtagctttttgatgggctactcatacagttagattttacagcttctgatgttgaatgttcctaaatatttaatggtttttttaatttcttgtgtatggtagcacagcaaacttgtaggaattagtatcaatagtaaattttgggttttttaggatgttgcatttcgtttttttaaaaaaaattttgtaataaaattatgtatattatttctattgtctttgtcttaatatgctaagttaattttcactttaaaaaagccatttgaagaccagagctatgttgatttttttcggtatttctgcctagtagttcttagacacagttgacctagtaaaatgtttgagaattaaaaccaaacatgctcatatttgcaaaatgttctttaaaagttacatgttgaactcagtgaactttataagaatttatgcagttttacagaacgttaagttttgtacttgacgtttctgtttattagctaaattgttcctcaggtgtgtgtatatatatatacatatatatatatatatatatgtatatatatacacatatatacgtatatatacatatatat

SEQ ID NO: 113865 - DNA, 1523 bp, Homo sapiens
atgtaaaaacatgatatgcacctcctgccttcaagaaactcctaaacaataatttttggtattacattttatattttataacactctctcataggcgttctttcttttgaaatttataactccatgcattaggcagataaaatttttacctgatgaagaagttgagacagaccctgctcttgtctctctggccattaccacttcaacattgatttcttgacctgagggctttctccaaagctgtggaaggcagctctgtccctatgtgatcagggcaatttggaaatgcctgggaattaacaaactcccactctagcagccttcaccaagtgactggaaagatttgttatatagataccccagctcacttggccttcagatgggataactttgaggcctgtgttttcccagagttttctcatgggattatgctccagtcattataagtggtatctggcttgataccgcaccctttattgactgttttcccttctttgtctcgcttccccacctcctactggtgtttcctgcatctcttagataaactatttgcaacaaaatccttgtctcaggtttctattgagcatttccactaggttatttcccctaatacctgccctgaaagtgcctggcttaatgaggggggcacacgattcaaatcaagccagttggaatccttcacagggaaattttgtccagtctgaaatactgagaaaggaactctcttccttcatccttgtttcattttggttttgcatcattctatttcgagtagtgtccggcacaacgtagaaacttaatctttctggaatatttaatgaatccaattcctacaatttctttcctgccaacttgcattcatcatcagccattaattttaaaatgtatgaaataatgttgctatagcatatcatagtgtcactgcatactgtagtagttaagtgcatggactcaggagctagactgcttgagatataaactctgccacttgccagttgtttgactgtgctggttatatttctgttgtctgtcagttccattctcattcttttactctctctatattacagagtactggaattctaaatatcatttcccagattcacttgccaatttctttccggttcagttctgttaatgggagattcaaggccaagaggatggaaggcatttttgcttttcttctggctccggcctctgcaatgctgtgctctactaccctgactccaggagtggcccgaatagggtgaaggatgcataatcctcaattatgcgtaagtgcattttttcagtctaattagaattccaggctttaaaattagatgtatattttgaaaagtatatctgaaaatttcatagtttgtgaatatatttttaaatacagtcaaaatactaagcacagtaacaacacgatttagaggacaaagttgtaaatatgccacctttatatttataagagtatttacacaagaatttgcagttttaagtcgttatcaatcattgagttgatataaggtcaatat

SEQ ID NO: 113866 - DNA, 1049 bp, Homo sapiens
gcgcggggtcagggcggagctcaggttgactctgcagcagagaactacaattcccatggggccgcgcggcagaaagaaaggggcgggacgggagggggcgcgtcgcgcttgcgcaggtcccggggccggagggaggcggaggcgtagcggtccaactgctgaagtccccatgtgacagtgagcggggtccccgctccaggagacgctcgagtctgcgtcccggccctcagcactgtccactgtttcggtgccagcagagaccagcaggcccgggacagttggtgtttggccgtgccgctgtctaacttggtgtgcagagtgaattgccgctgccggagcggagagaggcggagcggccaggagagaggggatttctgtcagcgccggcctcgggagctcggagacatgaacggcttcacgcctgacgagatgagccgcggcggggatgcggccgccgcagtggccgcagtggtcgctgccgcggccgccgccgcctcggcggggaacgggaccggcgcgggcaccggggctgaggtgccgggcgcgggggcggtctcagcggctgggcccccgggggcggccgggccgggccccgggcaactgtgctgcctgcgggaggatggtgagcggtgcggccgggcggcaggcaacgccagcttcagcaagaggatccagaagagcatctcccagaagaaggtgaagatcgagctggataagagcgtaagtaaaccgcgggaccgccctgccctcccgcccctcggtggggccccaggagccgggcaaaggcacgggttgtcggcggggtcccccagacaaccgcactggctgcagtgcggtctcgtggagtctgtgtttggaagcaaataacaaagtcgctgcaactcctaccgccaccccaacacacacaccacacacaggctgtcgttcccctcttctttcccaccctggcccccaacctcccgctgcctgcgtctctcccgcgcagtcttccctcttccttctcctctgcgaccgggacacgaaacaaaggggaccggcgcactgagggc

SEQ ID NO: 113867 - DNA, 1044 bp, Homo sapiens
gcctatctaatttttgtattttttttggtagagatggggtttcgtcatgttgctcaggctggtctcaaactcctgggctcaagtgatccacccacctctgcctcccaaagtgctgggattacaggcatgagccaccacgcctggcccaattataaaatttaaaataaataaaaggaaaatatattttctaatcaatgtatattaaattgagtgggtcaaagggtcctttgaaatcacactatctcttgttcgtaacattttattcttgaatgctttctgtcttgttgatattttgttaaatataatttttaaaggaaatagcccttatcacatagcactttttcttttgatgaaaccgtattttttacgtagtttatgaaacctgttatatctaaaatttaatttccttaatttttcttttctttgtagatagttggttgccactttaggtctattccagtgaatgaaaaagacaccttaacatatttcatctactcagtgaagaatgacaagaacaaatcagatctcaaggttgatagtggtgttcactaggagacgtggaattgagactaataacttggatgttaacactgtttactgttttttcacatgtagaaatgttctttgtgtattttttctacagaggattttctctgattttattttctttgtttctgactctaataattagttggaaactcatataaaatgagctttcctaaattaaatctattttaaataaaggttattactattatagttgcttcagtgtatttattttgtgaaacttgatttttcttttaaactgactaagagatcagtattgagattttaatgtaaagtccttcattttgtaatccttttttttttttttttttaaacttccaagaaattaacagggtaaggagaagtaacaaatgtagcacatttgcattctctgggacaatctgacttggaagtgaagataatctaaatagcattattttttaaagtgctttatagggctagcaaatttgaaaaataaacttctcttggaatgcaact

SEQ ID NO: 113868 - DNA, 1036 bp, Homo sapiens
gatctcactatgttgcccaggctggtctcaaactcctggactcaagtgatcttcccgccttggcctcccaaaatgctaggattacaggcattagtcaccagtcccagcctgaaatgtacttaaagttattagcatacataatataccctcaaatattgttcccttttccttttttttttttttttttttttttcgagacagggtcttgctctgtcacccaggctagagtgcagtagtgcaatcatagctcactgcagactcgaaattctagattcaaatgaccctcttgagtaactagaactacagatgtgggcacccacaacctgctaattttttaatttttttgtaaagagggggtctcactatgttgcccaggctggtccctttttccttcttactagaaaatttctagctcccttccaagaatctcagcttatacctggttctttcaatatgtggttaataactgtcaactaaggactgaaagtattttcaatccttgagccatgcctatggctcttcatctgggggacagaactctttaactgagtataatgaacacctcatagattacattttctaggcaaaatttttaaccaatgccaacaatgtccacagagaaaaattagattgaattaacttttattactacttgtttaacacagatttacttgtcttagacaagtaagaatttatagaatctatgctctattgcactatatagaaactagaaatgcagttatactgatgtagtgcagtttgtgggaaatcaggaatggtgttctccagaatacatgaagattctcattgattgttgcaaggaatcacgaaagagatctttggtccaaagaaaacgtctctgaaagaaaatagagcatcaattaaattcaccttaaggctaagatattagttagtctattctaggttaaaaatagacagtgatttccaggatttcagttatgattattctttttaggtgactaaaatgtaaagagatgagtgggaggacttgccacagaagcaacaaagaccgaga

SEQ ID NO: 113869 - DNA, 1029 bp, Homo sapiens
tggaaacaattagactacaccgtgcttatggtgggcagaaaatagaagacacttctggcacatttaagaaaacttactatccccacgcaccccgcttcttcccctgcaggaggtttattgtaagtctctactttgctacaaatgacaccctcctaaaagctgttgggagtttgggcagatccaccactcatagaattagggacatcgcgaagatgtaacttaagctgcttatcagaggctgagtggcaagtgcttaaagcaattcagagtcaggcacatctgggttgggtcttggcttctggactgactttgtggtctccagcatgttgacttcctcctttatacctttgcaaaacaaggatatttgtcacatatcctcattgctgtgtgtttgtgtcttcggaaattctattttcttcctaaaaacttgaaaagccatctcccctcaacactcaccatgcatggcgaggtgtagcttcctaggccagctgtttacccttgcaacactcccctccccaccccaagaccctggactctgggaacttcacgtccttctctctggtcttacaagtgagtttttgaatagctttgatctgcaatctctgactttggtggacaaggtctgaaccttgagttctggcttctgctcttcagccagttctattatcatccagctgggaagtccacgtccaaccctccccacaagtgatggtccctgaagctggccggatcccaagcaaaaactccaagatgtagctggaacaccaccttctcctgcccacctgctgccagtcctcatgtatatgactgggggcttgggagtgggaacgacacagggtcaagctggcctaaaccgagaggtggacacctgctctagctgtgccagagccctgggacgtacccagggacctggtcggtagggaaccacctgagcttgaattccactgcccctccctgagctgagaagggtttgaggtccacgggtgctaggtgctctcagagcacactccttcttcgtgagtcccactg

SEQ ID NO: 113870 - DNA, 1036 bp, Homo sapiens
attcttccatgcatgtattttacttttttgtataatttttcttcttccagtttcatcccagtagcccaccccactcctgcccaaatcctattggttatcacaagctagtgcagttaaaagaattgcactgtagaactttcagttatctgacattaagtgcctgttcctctacctcataaccaatggtcatttgtatctttctaaagggagaaaaacgggtgttttagcaaaactgaggaaaaagtctgacatgttcaatggatggccaagctcaatttctatctttcacctcttgttcaggaaagaaatattgagtgcattgagggaccagtttagccttcaaacaaaatgcaaaaatgtcacagagcttgtttgcaaagtttctattgaaagcagtaagtgggctgttgccagtgtaatgaaccctgatccaaaagtattcaagaaggtttaaaaaatgagcttcactttcaaagacaataaaagtaggatagatggaggttgcacggtgagggaggaaatgggcgagaaaggaaaatatttcaacttttatgccttttgatcctttgctttaccttacccatcattgtatcagtatttggaagtgagagaaagctgtcactcagatttttgtcatggtttctccttttgttttactaggaatgttctgctgttacacactggaaatatttatagtagaaaaacattccgacatgtaatttgaagtataaatagaattaaaataaaagagtaaaatctaacatatgtcctggttgaacacagatttacttttcacttgcttttcatcctaccattttttgggttcactttatcttttttatattgtcttttaatgttataaaggccctgtccttcacacccacctttccagtttattctgtaacaaactgataatattccattaaaattagttattataagaaaatgactttcataggctttaaattttagtttttttttcccgtccagagagagaaaaaactaacaaactattcattaatggaattctaatttg

SEQ ID NO: 113871 - DNA, 1385 bp, Homo sapiens
ttagtcaaaagtggttgtcaatattacaactggaatgttgtactacagatttttcaaggacaagacatacgataatcaaattttgaatgtctaagggacttttagactgatagtaaataatttctaagattctgaagcaaatatccaaatcatttttgcatgtgcacaattttgaattccatgacaattctaatttttaacttcaaaactgctttattacatttcaaaagacaaagggtggtgataactattatttactatcatgcctagttttcagtgattaacactttgccctctccctctgtctacctccttctgtctttccttctttgtttttcttcatacctgtctcttaccatccagttctctctgcttctgttttagcttatatcttttcctttttttgtatcctcaatttcctaactttttttctttttcctattttatttttctaccctgacttgattataaatgtggattggcaatatttccttttccaacattttcttaggaatatttcaaacacatagaaaagtggggccaggcacagtggctcatgcctgtaatcccagcactttgggaggccaaggtgggaggtttgcttgaacccaggagtttcagaccagcctgggcaacatggcaagaccacgtttctacttaaaactaaaaaattagccaggcgtggtggtacatacctgtccgtagtcctagctactcaggaggctgaggcaggaggatggcctgagcccaggagttcgagattgcagtgagctgtgattgccactgcactccagcctaggcaacagtgagaccctgtgtcaataaaatttaaaaataaaataaattttaaaatagaaaagtggaattattttgcagagaatgcctactcaccacctagattctacaattaaaattttactgtattcactaaatcatgtttatctattcctctatccatcaattattttgatacagctaaaaataagtttgagacgtaacttccttcctaaagacttaattaaacttgcaaatcattagctagagatcatttttttagcttttttttttttttttttttttgagacagagtctccctctgctgcccaggctggagtccagtggtgcgatcttggctcactgcaacttccgcctcccaggttcaagcgattctcctgcctcagcctcccaagcagctgggactgcaggcacgtgccaccacgcccagctaattttttgtattattaatagagatggggtttcaccgtgttaaccaggccaggcacagtggctcaagcctgtaattccagcactttgggaggccaaggtgggagaactgcttgagcccaggagtttcagaccagcctgggcaacatagtaagaccaca

SEQ ID NO: 113872 - DNA, 1047 bp, Homo sapiens
tttttacttcagactaaagctacccaaggacttagcagatatgggggttacatcagtgctggtcattgtagcctgagtatacaatcaagcttcagtgtgcaacctttttttcttttgccattttctattttagtaatttccttggggaactaaataattttgcagaatttttcctaattttgtttatcacgttttgcacaaagcagagccactgtctaacacagctgttaacgaatgataaactgacattatactctaaaagatggtgtatttgtgcattagatttgcctgaaaaactttatccatttccattctttatacaaataccatgtaatgtgtacatatttaactaaagagatttatagtcataattattttattgtaaagattttaactaaagtttttccttttctctcaaactgagttctgaaatttatttgattctgatctgaaactattgtcttcgtaaaagttagatctgacttcagacagaaaccaataccagcttccttttcctttaaactttgaagagtgttgatttgttactatattactatgcaaaactggcagttatttttataatataaatttataatttgattttttattttaaaaactgggttaatcaagtctcggtaagtcctttaaaccatttaggatttttaaaacatcaaaatttatgatttacattcataggaataaaataaaatattattagaactctggtaaatgtttgcttgcttatatgtggtgtgattatgcaaactttactatttttgtaatcttgatgatccccgttcagagtccattgagaaagacatattgtgaagaacagtaaacactctttactcattggttcagtgaatgtctatccagggctttacatgtgttaacattgtgcgaggtactagacatgggccctgctctcacagataatacataactgggtactgagaagaaaaaatctgctgaatggagagcaactatatgaagtatatcttaattaacaattatttaatagttaaaatatgcagcattagaatgata

SEQ ID NO: 113873 - DNA, 1173 bp, Homo sapiens
agggggttgtttttgtatttttcccttggttgaattatataatccttggaagtttacagcatgtcttgaaagtcagctggaagctttgtacacgtagattcaaacattcattcaacaaatatttattaagtatctctaccacttacaatttatgtaatgttggctctgagcaagttatttaacctctgtgcttcagtttccccatctgtaaaatggggacagtaataatacttataacagtgttcttgtgaagattaaatgaaataagacatgttaaacatgcctctaagtgttcaccaaactgtaactctatgtttatactaaaggtacaactacaacaacttaaaataccaagaaccaggcactgttctaggccttgacgttcttcctcttcttgaacttttggattctagtagataactatatgacacctgacgaatggtccttcatgaagtatgtattggtcacatcaatatctcctagctttaaatgataccctttgtctttaattgtattttctgacatgtatatgcaatcttttgcatatacagtaacattttgtttcagtagtgctgctgagtttaatctttttgacatttaagcaataattaggggtccagagttatgttaaaattaaaatatgtgtcttggctacaatgttggcaggatgaacagatacttacgttacatgattaagtatatacatgtgctagcagtgaaactaccatgtaaatcccaacttgcttgtctactagtagactttttttaaaaatgttgtttactttaaaactgtttcagagctgttaaaatatatttataaatgtacatattaagatctaggtaatatgataaaactagtatttatgggttagtcatttaaacagttgtatatatgcacattgcaaatccagtatttgtatgtgattcttataaagcaagaattctaaattagctagcatcattgttaaatgtgtcactttctcattagtttcaattattaatcataacctaatagagatttatctccatattttgattagaatgctttctttttctaatatagagacaggttagagatagagggggcttttccaagaagcgtgactcaactagcagcaacttttttgataataattacaataatgattgttacatttaattgatagtagtaat

SEQ ID NO: 113874 - DNA, 1095 bp, Homo sapiens
ggttagtgggcaggtgagtatgtgtatactgagaaggtgggttaggatatgctaccatgactacagctgattacagccactttaagtaaatagtgatacaattaagtaagaaccatataattaaaaataatgctagtgagaagtatgatacatttattttaaagtttcaaatagttggacaatggagcatttcttgaaaaacaaaccacagaaattgaataagcctaaaattcttagatttttggttgcatttaaataacacatcttaatttttacatttatttagttgccattttggtaacactttttatagaataaaattaacaggaaaaaaaccttcagggaacaaagtaatattgtaaatctttttgaattaaaaaaaaccaaaacctgcaaatggtatgccttttagtaacaaaaactgctcttgcaggaccagatctttaaatttaatgagtaggggctttttatgtgttcaatgtaccttgtgacctcttagtacttagctatttcccttttctccttagaaagacctccttgtggacttacccttcctttatttctctacatttgttgcctttaaattttagggatgtgattggttatcagggtttttttcttttttaaaaaatttctctacgcagtctgttctaaacttctttggtggtctattcttttggaagtgaagaaataaatgctaggctcctgatttgattcaaaatgtctcagaaaatattttctcatagactctcccatgttcttatgctattgaataatatcacatgatatcccttaaagatttttaaaacctgaagtaaccaaaaatagagttgctactttttacttaaaagcactgaaaatttataaaaacatataagtggatttccttatcgttagaatttgtattttagagataactattgtagcacacattttaaacctttatctgagacaggacatttacttataaattccactatttagacaactaagaaatactgaagaaaaatgaccatttataatgtgtatttaaatgaggctattcatatgtcagtcattacataccaatgatttaacaccgtttgctcagtaaaa

SEQ ID NO: 113875 - DNA, 1049 bp, Homo sapiens
aaggtgaacagggaaaagagacaagagatctaaaatatctaggttgactcctgtacctgagcgacctgcgatctccaccgccgccgcgacgaattggcctctgggcggggacttttagccaaaaggaaaatggctcagccgggaactggtgcccaggccatggagaagctgattcaaactttacttgtccacaccggtagaggtgaccgcgatgagaataccagaaacagcactacgaccctcagaactcagggtacctccagctgcaggggccagaactgccgactatcccaattttgacgtttcctattgttgccggaagtgacgttaggctccgactcttaacggagacgcatttttatttctgttgtttacgattcgctatagattccttgtttctcacttcgtagcacgagccactctgaccatcaagatcagaaaaacttctcagctgcaagttagaagtggactggccattgaggaggctctcagcggagtcgctcttcacaggagtcttgaacgcggtgtggaatcggcagcgaggaatcctggagcacagagaagctcccagctttgaaggtcttgcggtggtgcgtggcgggcaggaacccacaattccaaatacaaacggtcggcgcgagaagcgcttctgggcgcaggcgcctggctgtagcgactggttgcgggaggctggactctggtgactgtgtatggttgcatatgctccgttttcctctccctgtcgtgctgggcctttgaaaccggcttctttgctggtggctgcttggtgagccccgaggagacggcaaggctgcgcctggtattgggcggaggtcgcctctctccgccgtccttacagagaccccgggcggagacgaatgaccagatccgccttttcattcttttaaatcaaatggcgggaggggagccttgcttatatacccaactagtatatgcttttagtcacaacgaagtgggaagtatcgtggtagctcatcctatcagaattaggttgtgacttagggttggaaagttataggcttactgat

SEQ ID NO: 113876 - DNA, 1044 bp, Homo sapiens
tttttaggaaaggtatctttttggcaactatgtgagatcagagccctgtgactctgattaaatctgcgctaaatttgtctccattttttattgattgtgttatgtagcttctataagcatccaaaagagtcactgatggatgttattccaagttgatgtgtcttctcaaacggtgctttatgcttaaaaaaaaactatttgggcaagtgttatataagatacattataataagatgaatataaggcaaacttatttttttgggaggaaaacatgtaggagggtaggggagacaccctatattcagaaacttatagtagttacaaagtagaacttgagtagtagagaagaagctcggggaaaaagagctagggtaagataaatatggtaagtgccaataggagatatgaccaaaatagaatcaagaagcttcaaaaatacagagacttaaccagtatttcatggatttctattttcaggtgaaaaattagacgatttcaagaattggagctgaatctgatgttaagtaatggcaacaggtgacttaaaaagaagcttacggaacctagaacaggtgctccgcttgctaaattatcctgaagaggtggactgtgtagggtaagctataatatcaaacttaattgtattcttcttgctagtgatttgagatgatatttaacatgggggactacctgagaaaaatcagattttacctggttcctatttaaatctgccttgaaatgattaaaatatttgagaaagcagggaattataggagtttatttctaagtatgaactaatgaagaattccaacttaaaagatttaaaactgtttagaagcacagtatttatctgtataagttataatctctgtacagcttttaaactcatagaggtataatagattttattatttgtataatctaccattctctcatattcagttggatgatatttcttacagttaaatatatccagaataagaagagattgttgccatttcttgtcagtcttttcttatcatttatttgtttattcttttatag

SEQ ID NO: 113877 - DNA, 2235 bp, Homo sapiens
gaagagttataaacaaatagaactatagtttctgactctggtatggtattctagtgaactaagaagtttttctaatatctctgaagatatttacactttttgatgattgactatatttttccatctctctggacagacatctgttctccagcatatcctttgctacctgttttccacctgatacctgtcttactggatcatgacttaacaccagccctatgaattactttagtactctttagttaatggcttggttttccttgtcctctcaaaggtggccattattcccctgaccaggtgggcattatcatttggaattttagaaataaattgctcccaattattacaagagtctgtttcctctgcagcttcttcgtgatcaatttaattataaaccaattttgacaaaaaagcagtttatccaatgtgggtttgcagaatggaaaatccaaattgtttgtgatattttgaattgtgtgatgaaaaagcacaaggaattaagcagtcttcagaaggtaattttatgaatagatattaatgctgatgtatgctattaatagatggctcagtattttaatgtataaaatcaaaaccctagacagcaaattatttcatagtgtaattactgtattattcaaagatttgagtaaccttataaagcttgttgtttattttaaatactactctcttgttttatacacctgtgactgggaactcctagtgttaaactaatagttcaaacataatacattttcattacttcttagtttttaaaagtcatgtagtctcattagagtctcattatttgtcagctatatttcatatatgaaaatttaaatgttaatggaattttaatatataattatgctttcacacaaaatttgttattttgactaatacctttttttttagattccatcacaacaaagaaagaaaatcagttctggtaagtcagaacctcctttgggcaatgagaaaatatctgcagaggctgttggcgttgatatcagtggcaggtttatgacctcaggaaaggtatgcaaccacaaagaaaatatcatattgtttaagagttatctaattaatccaatatacagttttcacttttctgattggcacctgatgaacattctagttagatattggagttcattgatttttaacagtgcatgccatatatttttgggcagtatgcctgaagttataacaataggatagaaatataaaattaaatacgtgttctctttatatttctaatttctaattctgccggatttcctaaacagaagagtagtgatttaggaagattatcttatgcagttatctacatttgctcttaattgtgttctggtcttcctaaaacatgggaacatatgaagagcctacattagcagtagtgataggttataatgattcatttatgtacattatatttctgtaaccaagtatgaattatccaataattggtagtccctacacgtagaatctggttttcagttaatattttgaatattttctctttcttgaaagataatttttctgccattatctgctttgagcagctgtggcaaattgaatctaatgcacttagagctacagtgtttctatcactaagggagacttaagctaaaatattatttattaatatattttcagctgtcttccagctggagaagactctgattgaatgatagaatatcagatgaattatcaatggtgtaattaagtaaaggatgtgaatactttctgactgaagtataatctagagtattatttctgccctaatccaaaatacatgagttatgtaaacagaatctattttaaaaatttattcttgggtctagcacagtagctcatgcctgtaatcccagcactttgggaggccaaggcaggtggatcacctaaagtcaggagtttgagaccagcctgaccagcatggcgaaaccccatttctactaaaaatacaaaaattagctaggcgtggtagctggtgcctgtaaccccagctacttgagagactgaggcaggagaatcgcttgaaccctggaggcagaggttccagtgagccgagattgtactactgcagtccaggctggctgacagagcgagactccatctcaaaaaaatatgtttattcctttataccttaaaaaagtgaaattttattataagaaaatgttcttatgccacttctttttaatgtacctgttttgctctaggtaatgaagacaatat

SEQ ID NO: 113878 - DNA, 1019 bp, Homo sapiens
aaacttcttccatgtgaatagttcactgataatgataaaatgggaaagatctgatattaggataggtcttttcctggtcactttactaggctactgatattttgcttagtgtgactgagcagcaagggtaagatttctgtttttcagtgacagctttgttttgattgttatgtatttttaaaagatctaaattttgtgccatatctatgattaaatcatagctatagaagagatgttttgtccaattgagaattcatcgttaagttaaatttttaatatctgtggattgttaacgttataaaatctttcagctctactatatgtgtaacaataaaataatatatattctagcactaacagtgtgcctggcacgattctaactactatattaactcatttaattcttgaagtaaccattgcaagataagtactatttttatattttacagttgaggaaactgaagtacagcaaaattaagtaactacagcaaaggtcacacagttattgaattgtagatcaaatttgaatccaggcaactgatctgaagttttttcttgactgctgcatatttggagcacatatcaatatcattgcacaaagaacaatttcagtgattagcttgttaagtataattatttgagatgctatttaaggcaactaaatttattataggctgcagatttcagatttggtaaaatgttgcctgttttatttatccattcatatatctattcaacaaatgttaatgcttgagtataagatccttgagagcaaaaactttatcttatggtctgcctgtctagcacacagaaagtatgtcggtgcttttatcaccagtatttgcatatagtagagtttaaatatttattcactgaaagaatattgaatgcttgtgatttgcaaaacattgcctttttcaagtttgattttgcatgctcaggcttatttttttttaatgacatgattatagaatatacctttaacctatttagaaaacacatggctaagtttttttttt

SEQ ID NO: 113879 - DNA, 1802 bp, Homo sapiens
tttctcagcctcctgagtagctgggactacaggtacgtgccaccacacctggataattttttatttatttacatactgtttttagtaaaacaaggtcttgctatgttgctcaggctggtcttgaactcctgggctcaagcaatcctcccatctctgcttctcaaagtactgggattacaggtgtgagttaacatgtccgggttcacatagctaaatttcaacaactgtgccaggactgaaagtaattaacaggcctctatctgaaatggattacagattatgattaggttgaatacctggtctcatagagtttatgatctgatctagattaattaaaagactcaagtttataaagacttacacattataccttatacatgctacttggaaatagggtttgatttcatttgaatgcagagagcaataatttactactctgggtttaggatcatattaaatcaggaatagtttttgtgaggttccagatttgttttgcctttatcaggaatacagtgttccatggggaattgtaaggcaccttaatgtcttggtaagagtgaattagcagaggcttttagggattggacttgtgttggataattttggagagggtttgaggaagcaagggctacgggtgctgtcagggagcaggagcaatttgatgattgatggtaagaatgaaatttttagcataaaataagtactcatgttaggcaaggggggctatatctgctcatttatgtggttacatggtgcccttgttttgtctatgttcggacatgaatggtggttttgggtgtgttgtttcattatgctaatgaagtgacctcatgtgatgttctttttcatgaaattatttatattcattagagggtacagtagtttaggtgttaattgccagacagggcaccaactgttagtgctccttttttatttgcttgtttgtttcgctttgttttgtgccttttttccctcagaggaaaaaaaaaaaaaaggtgtgctaccacagaagagtgtggtttgttcctgtgtgactagcaggaagggtacatgtgagcacctgaaggaagctgtagcagaagagtagaaagatcaagtcatggagtttatcccagagtcgtaggaagattttcagcaaggctaatattcttaggtttgtgtttcacaaaggttatcatcaaagcagaatagtgatttgttaggaaagtaagataggcaaggataatttgaagagaattttagtagtcattatttcagaataataatgagggtctctactaaggcaatgatagtgaggataaagagcaggtgatttatttgggagaaatttagatgttaaaattgatatgccttgatcctgatagatacaaaaagggtgaaggagagtaaggaaggtaacactgactacttgtgtttggctcatgtgattgggtaggtgattgttactctttaataaaataaaaaattcaggaagaggagaaggtttgggagaaataatgagttcacttttgaatataataaattatatatgaaatccttaagacagaatatctagaaatcagttggatacatacattggtccttgatttagaagtattggcttacaaattattaaatggtaaaggaccctactgattcccttcgtggaataaggtgataagcctccaaagatggcagtgaaagattagttgttacgtggtaagagttgggtagaagatttcatgtcccatacccccataatcttagaagtagaagagtccctttctttacagagacttcttagcagtcactactgaagtaca

SEQ ID NO: 113880 - DNA, 1050 bp, Homo sapiens
aaatacaaaaaattagccgggcgtggtagctggcgcctgtagtcccagctactcgggaggctgaggcaggagaatggcgtgaacccgggaggcggagcttgcagtgagccgagatcgcgccactgcactcctgcctgggcgacagagcgagactccgtctcaaaaaaaaaaaaaaaaaaagaaaagaatatacatgattgattcaataggttatattttaaaataaattattaacttacctgtttattcaaactgattgctatcatgataataatactgccttttgtaatttttattgggcaatttttaacatctagatctccatatgaaagctgttaccttaagagtactaaaaactctttgatctatgcggatagccatttttaattaaaatagtatgtttttcttccatctgtaaataatatttttagatatttgactcttctgtgaaaggaaaaggtaatctaaaacttaatttcttcacagacagaaaaagcgaagtagagaggccagcaagtattcctctgtcctctggctatagtacagcatcatcagattcaactcccagagcctctactgttaattactgtggtttgaatgagatttcagaggtaagaaaatgcttagattatttcctttctaaatgaggaaaacaagcaagcattagcttttgttgtaaatattgctagcaagaaaaatagcaaacgcgaatcttagtctctcaaaattctttcataagtaaacagtacttaatgcaatgtttcaaactgtgttttgtacattctcggtccatctttgatgatggtttactttgagaaatcatctaaatttgttgctttttaaattaaaggaaacaacaatccagaaaatggaaaggatgaaaaaaatgtaagtaacagaaaggggcaacagaaattcatttctctatagggaattgtattggattacagtatatatagaatgtgcatgtgtgtttcaaaccttaaaggtctctcaatcaggtgtggaatttccttcaggactccactggataataaatccacctacagt

SEQ ID NO: 113881 - DNA, 1647 bp, Homo sapiens
attttcagtgttgtgaaaatatcactggtgtttttcggcaagttattgatgagatactaaaaatgatgtttttgtctagtacaaatggtgtgatttttctaaagagcagttcaaaggaaatatgaaatgaaattgcatataagatgattatgcagcctactactatagaaaattataatattatttagaaatgcaaaaagtacttaacttacacttcaagaatatgactcataatcgactcctctttgtcttccctctggtcatacttaagtttattcatagtaactgtacttatagataagaaaaatattcaaatttattttaggctaaaaagcataatttcaacaactaaaatgctatgctttattatgaattattgatttacttaatatattatttattatatttcaggtttgaagaaactgcagagttactgaaatgtccaaatcactacttgtaggattttctacatgaacttttttctaggactttggttactatacatattgtatattttaagaattctttatacaattttaatatactgcaatactgcagtttttgacaatttggattccatttggtatatgaatttttgcattcattattgaataactcttttaatatttttgagcaatgattatactgctttaccttgtgtcactttttttttttttaggaaaaactcatgttccagtatatttctcttacagagtgaagtcattacagcactgtatttctgtgttgacatttgttggcagtgtgctaagtaatgttttttaaagcacaggcttgaggactatggtttacatcctgttggaaacattccaaatgggacttgtgtattatacccaggaggctctcatatataccatcttggcatctgtactgatgaataagttataatgaacagttaaaaatgctcattgaaaattaaataaaacaaaaaggcagttatttcatgcttggtcaaaaacatcaatacctttccaattaacactgagaaattaaggttaagattctccttttgtactgggaaacaggctggaggactatggtcctcaagtttagaccaagaggactatggtctcaaggttcaccatgagaaatgtgttgaacattttagtatgctctattgtataatttttttggagggggggatggagtttcgctgttgttgcccaggctggagtgcaatagcacgatcttggctcaccgcaacctctgcctaccgggttcaagtgattcttgtgcctcagcctcctgagtagctgggattataggcatgcaccaccatgcccagctaattttgtatttttattagagacagggtttctccgtgttggtcaggctggtctcaaactcctgacctcaggtgatctgcctgtcttggcctccggcgtaacactttttaagaccagtgtaacagaaagagaatgtagccattctagccaccgttaaaagatacacagtgaggtgttgtgttttgtttttttaatgatgaaaagttacacattttttggagagaaaagtcttagctgaaggtaaatcaatggaaaaatgaaatttatttttaatattactactatatgaattatctttttttaaacttgtagataaaagtgttccagtaatcagaaaatcctc

SEQ ID NO: 113882 - DNA, 1055 bp, Homo sapiens
attcaaagagactgagtaaattgtaaggcactttttaatcaaggggtctgaaaacttttgcaaatcttattccagtgctcctgttcttaaagggacatcaaatgtacatttattttaaaattttaaaatattctgtaagagaatgaaaatgaactgacgtgttagaaggaagtggtgtaccaacagttaagagaaattgtaaaggaaattacataactgaaatctgaaaatgctaataaagacctataacacagatgacaagcatgagcagaacagatttgtaaacacaatgcaagaggaacatattgtaccagaggacaattatgttgattgcacatgatattttggatcaaggatagagccaggtcagatctcaacattcatgctgatggcataaggaacagtataaacaatctgaaagccatttctgtctcaatttatatagtttcataaatgacatttaactacaattgtttttttcccagtatttaaaattaataccttggctataaactcattccttaaggataaatgattgtggaggaggaaaaatactcagacacataagtgacccgggaaggcatgttggtcatgagaaatccacatgttgtctggacatgagcatttgcttgcatctaaaggaaacatgacattgattcttccagtttcaggatttaatgttgcctataacttttaaaattgtttagacagtgtggaaattataaaaatatgagatgaaaagtttcttggagataatctaaacataacttattttccaaatgaacaaatcacagccaagagagtttaggtaagttacaaagagtaccatagcatataaatgtcagcaagaggtagactgtctgttgcttgagcctggaattcaatgggatgtcagaaaacaagatggtatactatacattggtaagggcagagtataaggaatacggtggagaacagaatgaggaaagaaaattaaagcggcaattagacatacatatttaacaccctcattttccaaaaggtgaaggttgtttctgtggagttatgaagagtta

SEQ ID NO: 113883 - DNA, 1060 bp, Homo sapiens
caccaacaactatttattgcgggctaggtaaaaagttctttttactgtaattccccattaatttataagttttaaagggcctggtgctcccagcaccagacaatgatcagtgtttttaaagataaattacacaggggaggagaaagagccctgtgttgggcctgcagattctgtccttgcattggcctcttccaatcctgagcctcgtgcctctggcctcagtctgtgccctcatccagtcactggggaggttggactagatgagtggatgaatcccgaggggactcttccaataacagggacatttattctctgattttacctgaaagtggcagtagtttacatttatacagtacagtttatgaagcactttcatacacaagcatctcttgctacttacatctaagctgttccaaaaagagtgctagcaggtttaacaattacaggatctatgttcctttattttgaatggaaaaaattgttatatgtctcagcatatccaagaactttaaccaatagctcaaaacatttaaaaatctctttaatatctaccaaggatttctgtataacaaagcctttaaaatatcagttacctaattatttaattctcaaatgaactcatttgtaggcatgtttatatacagaacacaacaatattatacaatattagataagcatatcttcactgaacttgttacaatgagtgatgaaataatgtttggagacataatgaaagcaattaacatttagcaaaatataataaagcctttgtttaattggtgaaataaaacagaaggatcatctacaattgtaccattttctgaagaaatataaattttcaagttggcttatgaaggattagaaaatgtaaaaaagccaaagattaagggagcccattttagctttcaataaataaattcttcaaatattattaaattaatggtttgtgaagaatatatagcatgctaggcactagtgagcgtgtaaactgctacagactttcagaacagcaaattagcaatataaatcatgaaccataaaatcttccacaccaataatt

SEQ ID NO: 113884 - DNA, 1043 bp, Homo sapiens
accaagtagagcaaaatgtgatgaataaagattcaacatctgtttatattctacctcttttgcatattataatctaaacagaaaaacaaaatagccaaaagtttcatactgcgtttcttggtgcattttcagttctctgcactgcccaccacatgccagccaggcctactgcagcgcccacttcgttgggcagtaaatattttctttctgaaatgactctgcaatacactcctcttttgtgccaagcccttatggatgatatttcaatttccattacttatttttggctggagaagtggtagtggaagtggggagtaatgttgcagtcttataagcttgtaatgcttgttatgaaaccatttagccaaggcaccacgtgtggacaagaaaaagagaaaacagctagataattttcccaggtaaaggcttgtatcgctagagcaagcttttcccacataggaaattttccagactaatgcctttaaaactgtaatatttcattccatttattgcaacattcttgtcctaagtctcatcgtgttaatgagcaggtttatattattagaaggcattctgtaaacatttttgcaataagtcttttcaagccttcaggattcataaaagagaaaaatgctcacttccggacacttattttataaaggaaagtataagtgtatgaaaaataaaaatctcttctgttttattaatctattttctctctagaaaccactgcagtttcacgtcctccttaaaaaataagaataatttgctaaataacaatgaccctctaactccaaaaccagttaaactaaaggcaagaagagtctttaacatttagaaaaaaaaatccagtagaaagaaagaaggttcattagcatgagatgagttatatctttattcttttttttctttttgagacggagtcttgctctatggtccaggctggagttcagaggcgtgatctcagctcattgcaacctccgcctcgcaggttcaagccattctcccgcctcagcctccggagtagctgggattacaggcgt

SEQ ID NO: 113885 - DNA, 1141 bp, Homo sapiens
cccatctacccagcgattttgaggatagttacttttataattgttttgagtttcctttgaattcttggcaaaatctctgtttttagtcactatttcttgaattgattttgtagaataatttagttttccttccgtctactattcctacctatattgtaactatagggtttttaagtgtttttgacagattcagtggaaactgttttttaaaaaaacctgggattccaggcaattttattgtatattcagacactcattatgttcttcattcattttttacatttgcaggtaggtgaaattcagccttcatttgaagacaacaaattccggttatgtttggtgggaatggaaatggatctgagtagctttttgtaaaggcagcagtaagagtgtaaactgtgattttgttgagtgaaaccaaaaaggtttcttttagtgtaaactatgcctccttttggaaaccttagtgctgtggcaatgtagataacacagatgtgagtagatcacaccctagtttatttcaagatgtgatctagattcaggcttaatggactgctaatatacactcaaagtgtctagaggcaagcattctccagagacctctagagatctgaggaaacttgtcctcctggtcaatgaatggggggaagaccaatacctttgtttagaatacagttttagccatttttacatgtcaccctatcagttagcaattgaatttagagacagatgttgaaagtggctttatggttctcaagggtagtggctttgaaaatacacttcaaatacaatcataatttgcacatctgtaacctaatgctacagagtggaacagtaaacatgcctctgaatcaacagtggtttcctaaactttgtggagattttattctttcattggctaccatttaaaaagtactttgaaggtgaatgatgccattcaagtattttatatggcccaactaatattttacaggaaagcaaaataggcaatgctctccagcattcacaattacttggaaacaggctgggcatggtggctcacgcctgtaatcccaacattttgggaggttgaggtgggcgggtcacttgaagtaaggagttcgagacgggcctggccaatatggtgaaacaccatctctag

SEQ ID NO: 113886 - DNA, 1026 bp, Homo sapiens
ttgctagcattggctgtaaagctaaattcctaaagttgcttttaaacctaggatggagtttattaatggagaaaaaaaagatattacatcaaattcttactgcttttcctatccaggttacagtattctccaaaatgccaagttcacctgccattcagcttaaggtcacacatttatagtatgtcctatttccaagtgtctaccacagacttgacaaaaaaaaaaaaaattgcatgagtaatggcaaccctaaaacaaaacttatgaaatcacaagcataaatattctatatgatgattctacatacattgtgtattctacataaaatctcaaccgtgaaaggagcgcctgaagagcttgagtgtcaccagattgtttctcaagcagcctcacagagacacgttatcttgatgaattttccacaatccaaaatttggtccatggccttgcaggctcagaaatctgtcagcaaagctggagtaaatttacatctcagaagtggacttacaactcaatgaacacaaaatactgttgattgatatcaagatgcaaatatattaatttgcaataagacctataaatgccagatggactaaaacagtcctgagggcaagctggcacattttctttctgtggtcagatcaagatgggagccaagtcacaatcagaagccttggtgtttaaaaatataaattggaatgaaaagaatacattaaataaatcaaatgcaagactagaattcagattctaactccattacttcctgatttactttgatatttcccagtagggataggtatgtaacctaccagactcaccaagctctaagggtccactttcaaggggtggccttggctggaggctgcctgcagacttgacctgtgtggctaatcagtcttctgattgacatgttaatatctaactctgggagaaaaagctatgttaaaatgaaaaaagtaatatgtgaaaatgttactctaaggtaacattttctctttctgccaatttaaaggctatttgaatgct

SEQ ID NO: 113887 - DNA, 1037 bp, Homo sapiens
tttgccctgtttgacattccctttacagttgttgcctttgcaccttcagaaggcagtaaacagttggagctgctttgaagttggccagagatgttgggcactgagagaattaagcatcttagccttctgatacagcgagatttttgttttgttgggtttctttatttctttttcttttgccaaccacttgaagaagtctgcgaaaacgccaaaaaatgcagttcgaaatgacagtgccatttcgctattgcctattttgtccttgattttattctctggcacttttgtctttaatcgtcgtatttttccatctcttgttctcatacccttctactctatttccgtcttacacaagttctttaaccttagtttatttctttgtcagaatcgccaagaagccagttatcaaatagcgagccttctccccccaccttttttttttttttttaaattactgtactgatgtttgttagatattgttcgaatagacctggggtggacatcagcactgccattgtcagccctgtgagggttagaagagcttggtgcatattaaacactgaacagatgttagctgttgttgtcttgagcaagttttcttaccattctgggccttaatttctttttgtttaagatggaagtaatacctaatttttaggttgtgagaattatttgaaatgtgaaaaatattgtcagtgggtctgagccgtagtaaacagtaaatagcagctggttacagtagtatccccttaatggggtaggtatacgttccaagacccccagtggatggctgaaaccacggatagcaccaaaccctatatatacttggttttttcctataccgtacatacatacctacctatgataaaacttacaagttaagcacaataagagattaacaataacataatagaactgtaacaatatactataataaaagttatgtgaatatgatctctttccccttctctcaaaataacttattttactggactcacctattttcacaccagattgaccgcggataattgaaaccg

SEQ ID NO: 113888 - DNA, 1001 bp, Homo sapiens
tagcctgatttcatctgcctttttaataccccgtgatttaaatggttgtggagattgaacgatctgaacttgtgtgaaagtacctgtctgaacagttaaagctgatcatatacttggggaatttatctaatttgcctttctatgaccatgaaatttacttttagcttaagttttggtaattattggatttagaaataggctaagaattagttctgtaggtacctttttaggaaatagagtgtaccatcggaagagtcttatgctgaatttcatgtgtatttttaagtctttgtgtaatttttaaaaatctgcttaagggaatttaggtctactgtgagggtagtaattttgtgtatccagagaattatagtgaaatttcctggtatctatggtatttatatattaccaatctcattatttgtagtttcttcagattttcttaatgctgctgctactactacttgaaattgttgctgttcttgtaaacagcagtcctagacttagttctaaaggagtgattcttagtggttacacataattaataatggaatgtaacaaatgtgttactaccagtgtggaaactcatatagtaaaatgagttaacttaacaattaacataatacttaaaaatccaaatattaactccgcttatttcttggtattggcaccagtcttgttaattctggtgaagttcttgtcctctttgggagactgaattgagccacattggtgtcatttgcatctttgagagacattttaatgtctacttgcatgtgaccaaaagtgacatgtacaatttattatacttggttaattattgagccttgtttatgtttgcatattgttaaatttaaatggtggtgattgtttatactttagagctccagtggaattgtatttgcttgaaatatcgagtcctcttttttttttttttaacttagttgatgttacagaaaaccaaattttggatttgttcttttcttactagtcaaagtatctca

SEQ ID NO: 113889 - DNA, 2927 bp, Homo sapiens
atggaacagggattggctcttgtctgttttcctggcaccatttaggatccatgctgagctggagggtcttagaaattttatagggaaaagtgatttaaaagaatacttcccttctagggatttaattcatctgttcctccaaaggcctcactttttggagatcttatagatcaaaaaccttgcattaagttatgaaggcactaagtaatacagttgagttagcagaaggaatgaactccttcagggaattgtcattcttctctctgagaaaagtttgccccttttttgtatctctctctttgctatcatttgtatgcattaagatttcagcaagctcctcaagttgaattcattaacatgtcaaactatttgcttactaatacttttaatttgaagtgataagatggtatttctgatgagttatctaattaattttcattttaatataggctctgaaccaagttgtcctatgggacaagattgttttgagaggtgataatccgaagctgctgctgaaagatatgaaaacaaaatattttttctttgacgatggaaatggtctcaagtgagcaattcttggtcatttttttacatttaataagaggtgaaaaagagagaaagatgtatttttattttaaagaaaaatacttgagagtaaaaggagaaaaattgggaaagaagtatttatgcatatctgaactgaaagattgggtggaaatgcaaagtgagatctaagataagcaattctcttgcagtttctgaaatgtcatagtcaaactaataaagcttctatcctaagcgtgtacaaggaatacgggcttgttcagatgcggtagggctgtggtggtcaaatcaaagggctcctttctgagcgtgagtcgggaaaccttagaagcagcatgttgggtctaggagttgataatagttaaaagaagtagtattggttctccaaacgtgacttctctaaagctcattttagtcagtgtgattgatctctcaggttatttttacctcttagactctagtggtaaacattggaaataattttagaagaaagctatttcgaccaagccaaacgtctgtatttgcaatgaaaatttcagaacatgagaattttgttaaggtttgtccatctagataattgacagagttaggcttcaaatcattgctctgattcttagctcgtctctttttacatttactgttttaatcatttaaacttttcggttgatggttctaactgcagctgtgagtttagatgggtcatcctgggatatcagtaaatgtagtgcccctgtcttctagcattgtccttggattttaagtgacatgagaaaatagttctttttgcagattaacatattaggatttctgttaggaatagatggttataaataaagtatttgacatctcagtgtttgtcttaaaattttttttgaactactagtgtctctgatgacttgtgtttattatatctttttataggggaaacaggaatgtcactttgaccctgtcttggaacgtcgtaccaaatgctggaattctacctcttgtgacaggatcaggacacgtatctgtcccatttccagatacatatgaaataacgaagagttattaaattattctgaatttgaaacaacatatttttatacttaatgaattgtatctcattaatctcttcccttacatcttcatgtattgttggtttgttttttggttttgggtttttttttttttttttttggtataagaactaacatcaaaaggcctgtttaaagggaaaggttaatgggctacttaatattatgaacaaaacaaaaaaacaaggctgccacagtggaatattatcttacaagaataagaactacataaaacagatttgtaaaaaatacatatttgaagtattccctgtatttccattattctttatggaatataaagtaagcatgaaaggtagttaaaactttcaggtgcctgtagagtcataataactgtattttatgccttgcattcacgcaaattcacattggatgtgatttaaaagtagacattctctttttcctcttttaggatatgtttgattactggaaaattaatatggttatttgttagaagtctggtttataaaaaagccaaaagtgatggaatttattccatttgtcttaggaaggcccataatacttgtttttcttacatgtgactagcaactttctccacttaaagactaaatacctctttatatgatgtaaattattctaattcattttaaaatcttttaggtcagcaaaatgtgtgtcttcagtgctttctctaaaaacgttcctttatagctttgtacttttttttttagcgttgccattgaaagttaaaatgtttgcatggtttaccctctgagttatgtttcttctagtgagcatgcctgctgtcactaagtgaattatttactactttttgtaggtctatattttaataattattgggataataataattgtggtatgctttccatttacaaaccactcatatactttagtgtatgtcatcctcaataatctaatgaggtaagtagtataagtgttagctctttgcagataagaaactgaaacccagaagtttattgaattgcttcattgttacctagccagcaaggagtggaattaaaacttgaactcagatcttctaattttctgagctcatcctttctcttatacctcagattgcagactaatcaaattttacttaaaaccttcctgatatttttgttaccctggacaccctttctattctagaaaaggtttcccattttatatggaagtgactaattttcaagctgccaacaacttatatcgaggtaatattttattctctgaataaattcatttcacttatattaaaagcataaggaaatctacatgtatgtaaaaata

SEQ ID NO: 113890 - DNA, 2066 bp, Homo sapiens
ttttaacatctgttgtgtggagttgtatagttcatgcaaaagcctgtgggtatgggtttttcaaaccagcagaaaggtcaaaggtacctgaatgctaaactgcctggctcccagctttttcattaaacttttcagggtcttggtttctttatctgtaaaatgacagagttggaccagttaactttaatggccatccttttacaccacacaagttgataaaatttatctgttcagcaaagagattgaacaaaaaagcacgttagtaatatgaagacaggaaaacgaatgaaagtctaacacataactcatattgatttactttatttctgttagattttacactctgaaaatttcacctcatttagtttgtacaaatactagacatggaaacttaaaatgtgcaggtgtcaaagcttaaaaatcaggtgtgtcctctttaaaggcatgtgcgataagcctgcagtcttaaccagacctggtaccagtttaacagttcatgatacttctgtgatgagtggatctgttagtctggtagagattaatgttgaaatttacttgaattacagttatttgacaagcccactttttttggagtttggtgaggaagataagtaaaaatgcccaactagtacaatgtggagaaagttttctgtttgcttgactaagggaaattgctcagaaaaagaatgctccaacatgggaataaggaccttcagtctcaggaactcatttttgggtgcagtttctacatttaaaaaattgacttgtgttcagtttgataaccagttcatttgctttagtctcagtgttttaaagaagtctcataatgttctacaaagacacaaagcttcaggcttatacaaaactgagtatgattagaaatacctgagcccagaaatgattctgagaaaagagaataatttgaagacacttatttaaaagtaattatggttagaaatgaattaatttaaaaatgtgttcacatatccctttctctaacagtttaacctagacaaacatctgtatcagtatttttttattcccctgattgattacatttggtttctttattctgaaaggaaaataacaaaaacttcagaaattcctaagggtgtaataagaaagtgggttttgagtttcctttcctggaattattttacagttctttggtgggtctcgtcagccaattcatagctgggctttaagattatcatcttagagatgatagatgggctttttaaagatttcatcttagagatgaaaagctgggctttttctctaagatgataatcttaaagcccagctattaattgataatgaacatttttcactatttttttttctatctgaagcttagagatctagagctttggatctttcgggtatatgtcaatggaggtattattttataatactttgcattgacatgaagtgggttcatgggggaaaaccatgagctgtgaacattggtagcaaacaagcatatattcatttcaaaactttccttgcttttagcagagagaagcctgtatatgttacatgtgtgactttcagtagtttaaagagatgtttcaaaaaattgttgcatgtttttgatgcaatttgggaaattgtttacttcacaatgtagtcattcataaaaaaattcatgaaaatactgaacatatgtttgaggatttttcttttcctttttaaatttttttattttttctgagacggagatctgctcttacgcccaggctagagtgaagtggcgcgatcttggcttactgcaacctccaccccccaggttcaagcgattctcctgcctcagcctccggagtagctgggattacaggcgcccgccaccacgtccggctaatttttgtattttcagtagagacggggttttgctatgttggccaggctggtctcaaactcctgacctcaagtgatccacctgcctcggcctcccaaagtgttaggataacaggtgtgagccaccgtgcccggctgaagatttttcttaattgcaataaatattcagcattttttctaatgaaaatgaattttgtttaccagtaaaa

SEQ ID NO: 113891 - DNA, 1110 bp, Homo sapiens
agaatgcagtgttcctacatttttactaatattccaagttctgaaaacgtgtacttaagtagcagcttttcctgagtttattcaatttattgcattatcagtgtagtatgaatgggagtgtgtgatgatttccttcaaatataaaaggaaatttcttaatgctgtgttttcttaaggtaaaaaaaaacaaaaaaaagacttttcgttttgttaaaagagttccaggcacattttgtagcaaagccaccaattggcatgatgtaaattgtaaggacaatgtaccttaggtaatgttaaactcaagttttttatagatacttcatagaaatgcttttttaaaatgggactcaatgaaggggaggttatcagggcgtgtgaggaagccagctgttcattgaaaagtaaaagcatatgcactgtgcattccaaagtatactaatggataaaaactgcttcaaagttctccacacaagtatctaagtggctttgaaaagttaagtagattggatgtcttttcaacctctttcataaacatacactttgagtatattttcttatgagaagttgtatgtttaagagatataaccaaaaagtagaaaatgaattttgcagggggtaaattatttggtgatgaaagcagaagcagaagaaagtcatctgcttttgaggcacacatttggattaaaagttacttgaatgttagtatttaccttatatattttactaaatctaggaaagaataaagaaaaacagctcaatctctagagtcttcctgaaaatggtggggttaaatcaagctcaaggaactagaagttctttgctgtgttcattagtgccagactaaagaagccagtttagttaagaagctagcttgctatgagctaattctgatacatagaagcagcattattttaaattctacattgccatcttaaaaacaagcagctacttctttttcattattttataaagcaataatatgagcaatcaataatatgagcatgtatattaacaaagacatgctcgattatatttaagttggatgtttcataaaattttacaacaaaaaatatttaaacctaagtaaaatatgcaactatataatgaaat

SEQ ID NO: 113892 - DNA, 1051 bp, Homo sapiens
tccatctttctattgaagcaccagtattcatgcagtgttttaagaatattagtccatttttatccattatgtatattgcaaataatttcgtactttattgtcttttaatttgtttgcagtgttttctgccatacaaaaattttcattttattttatattcactttaaaaaggcctttttcagcctaagagtataaatataatagcttttctacttttttcattttttaatattgcattttctctattgtgaatgttatgcttatgtttttctccagctgatctattgaggaacagtgtttttttaataaatataaatattgttatagttatttctcatttcgaagttttacggtactaatttgtctgtcttaaaacttcaaataatacttaattgaaagtctctgtctaccatcatccctttcttaacagttcggtgaatatcttttattatattgtgtaaggatgttgtattgcagctcctcttgctaggctgaacatgcagacctgttctggaaatagatgtgatcagtttaggtcacaacctgtcttgaatcacagctgacttgtagtggagagttccaggaaccttccaatcacacacaggtccctattgctccttttcttctagggctattcaacaagcagagacaaacaaaaactgatctgtcacattttactgcaggtaacagtgaccacaaatacacctgtacactgttttttttccaacattattgaggtgtgactgacaaataaaaatggtatatatttaaggtatgtgatgcgatgttttgctgtacatgtacattgtgaaatgattatcataatcatgttaacatatccatcacctcacatattgttatttttataatcacttttataaattttcccttcagtagtaaccttttgagattctgaaacacttttgagttttgaatgttgtgtcataagtgagtttttttggcaaatattttataaacatctaattgggaaactgtgagaggatgttttgtaactttcatttaaactaagatctcctctccacctccaccc

SEQ ID NO: 113893 - DNA, 1051 bp, Homo sapiens
taaaaatattgggatggagatgccaaaatctcctctgctaaatgccatctttcatcctaaggctatacaggaacaggccttgcctactgaactttgtagctataggcctactacattgcctcccacttgaaccctcggttataaacggaatggagagttacttttccattcagaaaagaaccttgatatttcagaaggaaaagttagccctggacacttgagcatttctaagaaaataggttttttttttctttttaaattgtgtacctgctgccctgaattctctagatgttctgagcactctgtatattcttactcatagcttagtaataaattatgtttataaattggagactggtattgtataatttagttcattgaaataatttgatctggtgacttcatagccagacagagtcaatggattcatataaatgagaatccagggttaatcaccatcaaacattttcaacataaagtgacatttttttccttagaatgggatttttactacattcaaattttactaatgctgtaaacatgaaaattttgagtcaggtaatgaatttgagaatggatagctaatctttaaaaatctagtaacaaatgtttctgggaattgtggctattgttcccttttggaatgatgaccaacatttttggaaatgaaaatattgataaatttgtgtggacttaaatatggagtccacacaagattggggtcataggacagaaacaatatttgtttcacatttacattgctgaggtattatgaagaggttagaaaggtgatttttatttagcttgcagaataaatattttaaaatcacagaataacatatactattaaatgcctacatacatttatatccatatgaataaaacagtagaagctgaaatataaaataacatgccactgctgctggagagatttaagccaattatctgctatcctggagcatcagacatatatatctatatctatctataatattatatatttcataatttatatatttatatatcggtataatatattgttttatacaga

SEQ ID NO: 113894 - DNA, 1011 bp, Homo sapiens
actaatgttttcttcactgtccctggcctggtatctttcttggcatacctcacaaattacttgacttctgttttatgttgacttcactcctttacattacattattgggaagccctaggtcttagaaaactatttcttaaactgaattaaaattttgcccttgtacactggtactggctctgtcctctcagtaatagaaaagaagtcttccatatgtccacagccattatttgcaaaaagatatctctttcttcaggcttatgtttcccatgctacatctctcttgttctctgaaccacactttatacagcctgactttccatattctcactgttgctgtcatccccatctgatcattcccctctgtcttaaaatgtgacaattacaactggacataatactccatctgtgatcttctcaggacagacccaagcaggtcccagtatagtgttagcaggacatcacatttttggcttcagatgaacctgtaaatacctaaagtacctggacttttcccatgaattgttggtaggccaggatgtgtgccccattagttggggacactttctagtgacagttcctggaactctatctggctatttctctagtcaggcagtgaaggcagataaatcctcggttcctggcaggttcaggtggaacacgcagcacagtgtgcgctgttgaatgagtgttcccgagatctaatcacatggaatgcctgattgtcaaatgatgaacaaataattcaggagatggacctgggagttgaaaatttttttaacaaaaaagaaattacatatatgcatttttaacaaaagttttataatcattgatatagtgatggtagcaccagtagatattcaggcaagtaattatcaactggatgacttataaaggaattgataaagcctcccaagggattcaagaaaagggtaaagcttggaagtccctaaggataagtggctgagatgtttgattcaggacttcctgtccttgaaaccttggtcagtt

SEQ ID NO: 113895 - DNA, 1059 bp, Homo sapiens
acatttcacctgcaaagctgtaaaaaaaaatgcatttctaatgttttaagcaactaaacttgtagtactttacaccagcagcaatgagaaactaatgagctacctaataaacacagaggtaaagtcacctcaagtaaaaaaaaaaaaaacaagttaagacctatgttttaaaggtcatagcagtatttccactgtccgtatgtcactgcagtgataaatgctgtgttttgaccattgaaagaattcgaaattcgagtaagcaaaactaagttggaattctgcctaattactctctatttaacctcagataacttttaatttctctttgctttatgttcatcatctggaatatggttacagtaataatattctgacttccctcatgagttcattgtaagtattaatttgaataacctaggcgaaaggacgttgtagtctgcaacatagtacatgcaattttatttggctttgttagcaaataatagtgctaaaagaaatcagatatccaaaagacataaattaaaccacataatcctagtcaatttgtagatttctgagtatttctgtatcaaactggcaagtatatgctatatttatgatgagtaagtcataacagttaaaagattgactattaattgagagtaaaaattgtccttgttattgtcttatgcattttaatttgcattttctgtgccttaaatagaaatattttaaaacaattcatgtatgcaggaataaaagcactttagtggactattaaatggtaaacttctccacatcattcatgagggaggagttataaaactgttctaactctcaatttcctaaaactttggtaaaataatattctatctcatattctcccttctgtatgtctttatgtttgcaaagattctttggggcacagaaataaacaaatcatccctatgaaagggtcatcgtagctgccagtgaccaaaagagctgcctgctgagcagtttcatactgttactccagctgccatggactcatgcgtgaggaattcacacagctaatcaattccataaggtgcagttgct

SEQ ID NO: 113896 - DNA, 1013 bp, Homo sapiens
ctgtgcctctcttaagtgtcttacacgttactcacagagaaagaaatacaaaaatggaaaacataagctcacaaaaatgcatttagtgcatttatgatgttaatggaaaccttggatacagtcctctgttatttccttactactcttgatattttacaatattgctttattattcaaattcataatcatatatgtgttaaacaattttttttggtaagtagactgtgtatcaaacttaagagggatttgacatggaaagacatttaaaagatggcagaaaacagctattataagggcatttgaactttagatattttccgttggtcagtttccatagatcatcatctgattcactagggtttggccagtttatattatttaaattgtttcccctgcaactgtagtattttctttaatgttttgaattattcttaatgtgacttgaataagggtaattgtcacatatgctgatgttttcccattaggatgaaaatatttagaaaagctgtactagcaaaaaccaggttaacttgttttcaaagtagaatttaattattttatttcaagctttgattccttttttaaaaattaagtaaatgtccttgagagcaatacctttgtgtgtgtgtgtgtgtgtgtgtgtgtgtatcagttacttgcaccttcaattgaatgaaagacagtagtaggttgtattatggcagaggggtagaagaatggacattctcatgggtatctcaaaggtcaagtcagaattggattccctgtggatggaagagaggagtggagaaggtgcttctcatgtggaaaaacaagaaaagtctatgacaggcctcagtgtttgccagctgcagtggaattctcatagcttgtattgaactctgtgtcctaatcttctgaaaccacctcaagagagtatatattgctaaaataggagctcagctatttttcaggggcagtgatccagaggacactataacagaaatagataatttcaaagtcgaaaatatatt

SEQ ID NO: 113897 - DNA, 1033 bp, Homo sapiens
agcctgggaaacagagcaagaccctgtctcttaaaaaacaacaacaaacctacacatgaaaattattgctgcttcccatcaattttcagtgctatctttatttaacctctctactatttgccttcactttttaaaattttgcttttattcttctttctttggtctccttctctaaaatttttcccctgcttctgtttttttgtatactaggaagacatttattatttttataggtatgatcaaattgtaaaataagtttatttcattctctggtgatttcactaactattttgagagtatcagttaaaatgggatttgtttgtgtgtaacaaaatctaactgtagtggctaaagcaaattggagtttatttttctctagtaactaaaaggccccagtgggcgtttaagggctggtaccacatggagcaacatcatatcatcaatgtccagactcctgtgcttttttcacttgatcatttttagagtttggccttctgtgcttcattcctcgtggtcacaacatggctgattgttgtgcagctttatgtctgatttcaaggaagaaagaatagtgagagaggaggttgttgccttaacacattcaaaccaaagcaaaagttttctctgaaatccccagtagatttgcccttacatcttctcaggtagaagtgcatttttgccattcctggctgtaagagaagccgataaagaaaatacatgcactttctaacaatattgaaattcttttcacaaagaaggaaaggagaatgaatgtactttgggtaggtatcgtggtctgttttatgttgctgtaaatcacaaactggatgatttataataaaaagaaattagttttcctcacaattctgaagactggaaagtccagggttgcagggctgtgtctggtgagggccttcttactgtgtcttctcatggtggaaggcatcacatcaggagagatttctccagagtgcaagaacaggtggaactttatataacaaactcattcctgtgataaggagcccactcccaa

SEQ ID NO: 113898 - DNA, 1034 bp, Homo sapiens
atagagttatcctaagaaacaggctgtccaacacaattttaaatatactcaagctcttttatactgattaagagtttcaagttaaggttttgggttaaaaaatcaacatcaaatgataaataagaaatataatcttgtttaaattatttattctaatagtttatttatgaacacaacatatttctctttcattactttttttttctcagttgtaaaattctagagctggagcccataggccaatccgtagtatatctgaaatgattaaaggttttatacttgacaagccctctgtctgcaggttacttgcttctacttggagcagtggatttatcatcctccactccagggtaaatatctaaaagtcacttctgccacgttatttcccatctggtagattgttataatacctgtgagtcagtattatctgcacagtgtatttcctctgctcaaggcactttgaccatatgaggtgttcacatctgatcaatcgggctgaagcttgccctagtctgaggctggaccaattgatctctaacgatattcttacctgacaatctagaggatacaaatcaagatgtttcaagtgcagaaagcaacagtaaagcataagttctttttttttttttgcattctttttttttttattattatactttaagttttagggtacatgtgcacaatgtgcaggttagttacatatgtatacaagtgccatgctggtgcgctgcacccactaacaagcatatgttctaatgtgtaatatatcttcaagacagtctggaccatgaagtgtatttttacttattgagtgtatatgggaggatcattttataggattggttatatttttccatttcttgattctttgatacttaaatttttggtttcatattctcctctttcacatgttgtccccattttacatatgcaaagatagttgtttgccacaaaaataaacatttaacagactccaaacacatagactgtgtaattagcataacgaaataatagtggctgagtgacgagcagaa

SEQ ID NO: 113899 - DNA, 1042 bp, Homo sapiens
gcttagtgcttagtgaatgggttagaaggagttttttttttttttttttgagatggagtctcgctctgtcgcccaggctggagtgcagtggggtaatctcggctcactgcaacctccgcctcccgggttcaagcaattctccctgcttcagccttctgagtagctgggattacaggcacgcaccaccatgccaggctaatttttgtattatttagtagagactgggtttcaccctgttggccaggctggtcttgaacacctgacctcaggtgacctgcccgcctctgcctcccaaagtgttgggattacaggcgtgagccaccacacctggcctagaaaagagttttaatagatacccctgtaaaatgccaagcaatcagttgccattactaagaactgcaacaagttccagttaaagatgtacatgtttaagagctgtcgttctttaataaaatatgaccaagatgtcttaaacatgggctttaatacatgttactgtgggtttcactccaacttaatagcacacaaagttctgaagacacatgatttcactggtggtacattcgcacattgttttctgtccatgtttaagttcattcttgtccagaacagtttctggttttctaagcctaacgtattaacatttgagttaattaaatcgatagggagccttttatctttttttttttcctatctgggggctttgctttcgcactgacattagcagttcccttcctatgtgcaataggaaaatgtgcagtcattccaggagcatggtctcctcaggaggttaaaagtgattgtaacttagaggttaatgtttcactccagaggaaagtgtttcaccccacttgatgatgtgcccctgggtgctcacagaaagagtagtactcttttttaaaccaaaattttagacacgtgttatgcaaatcttctttataaattacacattcttttctttccttttattcttttactccagtatactattttgcaattaaaacattttaaacttcttccagaaaaaaacttcttccaataa

SEQ ID NO: 113900 - DNA, 1084 bp, Homo sapiens
ccaccacgcccagcctagttactttatccttttaaaagtcctcttccaaaatgtagaatataattaatgcctgcttaatcaggttgttttgaggataagaatgtgtatataggccaggtgtggtggctcacgtctgtaatcccagcactttgggagtctgagtcaggtagatcacttgaacccaggagtttgagaccagcctgagcaacatggggaaaaccctatctctacaaaaaatagaaaaattaactgggcatggtgacacgtgcctgtattcacagctactctggaggctgaggtgagaagatggcttgagcccaggaggcggaggttgcagtgagtgagctgagatcaccccactgcactccagcctgggcaacagagtgagactctgtttcaaaaaaaaaaaaaaaaaaacagcatgtgcatacatataaagcccttggaaccatgattggcatatagtaagctttctgtaaatttgtgttaaatagatagtcttcatgatcagaaaacaaacaaagaatatagcatgtaagtactatgtcctagacatatgacataactgtgattcttcagcaccttgcaactaatttattaaatttttaaaattataaattactgacaattttcccaatttctaaaatatagcaagaggatataatactgatgtttgattttgaaacaggtgaaggaaatgcagggtgtttaatcattcagtgtctggaggctacatactgtagttctgcctataatatgttcccacttcccctgggtgccggggtttgttcctctcctggagggcagcacaggtgtccatagaccacaccaaaccaaagaatctgggatgatgctgtctccttatgtgcttcattcatacttaggtcatttggctgtaaaggattttggtacacataagctttttataatgccatataatttaatatgaactcatcttgaatatattcagagcatatacattttcaagtttaaatgtttattaatgaaacatgctaatgttgctactttgatgtgtaaatatctcatctatattattgccacaaaaaataaatatgcattctaa

SEQ ID NO: 113901 - DNA, 1048 bp, Homo sapiens
tttgtcaggatgtagccccatcgtaaatcgagaagcatgtatgttttagagaaatgtggtaatgggtttgggcctttgggcctgtgattcagactcctttcagcccctctgctggtctcctttggcacactatagcagcgtgcaggaaggcagagaaaagcactgcgtgtgactttgcagttaggggcaccttgttgcatttatttaggtcctaattccccacaacgggacaaacggaaataaacccagactttcttccaggctttaccacatggtgttcgtttgactaaagataaattataaatgacctaatccatggtaatattataagaacgactgcttaactggaggcttaacaagattttctgacaaacggtttttcaaagttgtgctcaagtaacttcagtgaaagattgtgattttacctctgccaaatgacctttcacaaataagtggatttggaaagaacaaatttaagttggcagaagcgttatacttcctctgacttctgagcatatattgtttcacctttcaccagttacattattccttgtagatgtgcattttataaatactatatgggtctaccttttgttacaaacacatatttgtatgtacagatttgtataaattgtggattaagttatcattgatttttctcattagaaaaaacagatatagcagagaactttaaacaaggagagatgctgatgagtttgagttatagtgtaattataaaatttactataaatattttaggtttgtgtaattgtttttctgaaacttactagtgtaaatttttggggtggcttctttcctcggttgattaattttttttttcagagtttatgtttaaccatgagaaagcagagactgtttttatttaatttgctttattgggcatccatcatggaattaatcaaattgtacattaaatgctttgtcagtggattagtactgtttccttatactgctcgcgccctagtggctttcaggtgttaggagttatccacgatagttttttttccaattttgaaatccaaaaact

SEQ ID NO: 113902 - DNA, 1127 bp, Homo sapiens
ccatgcacttgctgggcttcttctctgtggcgtgttctctgctcgccgctgcgctgctcccgggtcctcgcgaggcgcccgccgccgccgccgccttcgagtccggactcgacctctcggacgcggagcccgacgcgggcgaggccacggtaggtctgcgttagggtttgcggagaacccgagagtttgcgttagggtctgcggcggacccgagaacctgcgcgggggaaagtgtgtgtgctttaagcttgtgtacgtgggatccaaagttactgagctcagtgcacgctgctttggagaaaaatcttcttctttttaaatagaaagttgttactagagaggcaagcaagttacacgagtgaagggcccggagaggtgcccagtgagagatcccgaaatctatttcagactggtttcctctggggcaaccaaggggtcttgaaccctgcccagtcagcggggctctggagagtatgagttcattttggtcgggaaatgctcgtttctttccccagctgattcatgggactccaaacagattctgggacactggtgatcagtcaacccagccttactttcctggagtgttcatagtctgcagagcaccaggcgctgtgagcgactttagaaaaaaagtgtcagggactttagtaaccaggctccagagctttcagagttcacttgaagttggtcagacttgagatgtaacgggagattagagtcagttagatcacaatcaagcaatgcaaggcttgtttcaactttataagctcttcattcctaaaatctggtcatgagatactgcaaactaagtttttttttttcttgtttgggttttttgtttgttttgttttcttttaaataagaggtgtttaatcctttgcctgaaaatgttgccaaaatacttttgaggcatcctgattttgaaaaaggatttgtgtgtgttcctacttcttactggctcttccaaaagagtatatctttatctaaaaagttcatacctgccataaccatatagagtatgcttaagagagttcctaaagaagttatattcgacatttcagttcaaacacttgcagtaccccttgctggaactatactgcggtagtttatttcaactggtggca

SEQ ID NO: 113903 - DNA, 1025 bp, Homo sapiens
ttttcaatctcacaaaacaggatatgaaacagtttataagcattcattttatttgaaacatggtctgattatttccatcactccttaaaatttgatacatgtatttaatatgccagctatttatcgttatatatgcttcacagtgtcaggaactgaggagacatttaataaaagttgaatggatggagaagaacaaggttttgaatagtgcaaagtgattaaagatttagaaataaattccatttggactctttcattatgagaatgtgtatattttgttgtgcatgttatatggaaattcctactaccagaatataaaccaggtagtaaattttccttcttcaaagtgggggaaaaaaatcgtggctcattttattgccattatttaaagaaatgagctaatctacagagattcattttccagcaaaatgaggctcatttctttaagcatctgaaggggatttctaaataatttagagaacatgcattatatacttccttaccttcttaaatggatactaataatgatttatccttaatgactcaagatcatcattattggtatccagaatcctatggaatcatgaaacaagggataacaaagaacagaaacattcttacaaaggaggaaaaaggggaggtgattttccatggccattgtagctttttatccaagatgaacatattcggcatgctgcagagaagagagcatctgatcatcttgattttgaattcccatttttttgttacttcctcgtctggagatgcttattgttgcatcttagcttatttggtcaggattaaattaagcagcatgtaaaattcttagcttagtacctagcaaaataaacatcctgggaattgttcctttttcttctggatcagagctttctcaccagacccatttatctgaggaacaccctatttttatgaagggtttgtaatcatttggtgccttcagataaggtacaaagtctttagtctgagtaagtgcttgaaggtcctgcacttagaaaattgtagaa

SEQ ID NO: 113904 - DNA, 1064 bp, Homo sapiens
tttgtgtttttagtagagttttcatcatgttggtcagtctggtctcaaactcctgacctcaggtgatccgcctgcctcggcctcccaaagtgctggaattacaggcaccgtgcctggccaccatggttagaacttgctaaaatctctgatagatgacagtaggtttgcagatatagatgtctgctccaggataacctttgatgccttgaggcataaatcctggaaataataaaaacttctttcaaaaaaacctatccctcagcattggttatgagggacgtttcagccgttcttttcataaactgtacatggaactatattccccacagtgtaggttctatagaatcttgaggcaggatcttataggctcatttaccacataggaattccctgggggaaaatctctggtagaaatcaggatggctagttttgagtctcttcctaatgaatattattaggagtcctaagcattttaatattggggtaaaaagaagttgaggtttccattaagaacccttacttttgtcagttttttcctgtttgttttttcaattgatctcacctgaaatgtatgtcatatggtggtttgaggttaaatgatacaaaaaattttacacattatttctgtaagtattttggtttgccagttacaacaaaactcaatggggcagtgctgctgaattagatttgggcgttttgataatggggcagttgtcttcatggagtagaaaacttccccaggaaattggcaaagttttcagaactgatagagtaaaatcagaaaatctatctactactcttcctcttgttctctgggccatggcatacaagggcctttgctctgtcattccttttgcctggatcatggctcacttatttaaaacttgcccaaatttcaattccttgatgaaattatgactgctcctttaaaattgcaacccgttgcaccctcccccaatcttgctctctccttttcatctccatttcttttccgaatgttctaacatactgtgttattgtgtttattgcctactctttttctactctttttccttactagaaca

SEQ ID NO: 113905 - DNA, 1005 bp, Homo sapiens
ggagctctttatgtactttggaccaaaagctttacggtaagataagcctgtacgatacatcttatctctctatatttaaagatgcgtagaaggctagatggagtttgccgggtgtcacatttaatcatataggaagtactgtgtttttaagagagctccaatatgagaggttgtgattctatcatggaaatcaataaacagcagaagaataaattctgatgtcatcatcacttggaagacagtcattttacagggcttcccaagatgtattagagcaacacatctgttttgctagtccccaagcttcctataccacaagtctctccttgtttttaccgaatgcttattgtattcagtgacatcggttactttatatttgtgacaggccctagtttggtttaaatgtatcacttgatctttaaatatttttctggcttcctgctttctctgaagccttgaatggaatttggaaatttacttagagagtgtaaaaactttccagagaaataacaggttctccattgtttcacagttcccatggaaattcatggctaatatactggcagagaaggactagcaacctatttcctttgttgacttaatgataaaaaagtcaaaatatatgtaattgtgatgcatgatcacatgtttaatttttgcaggaaaatgaaagcggcctttgagttaatatgtctacccaatctcattctgtcttttctgagtttagcctaagcttttgccaactgtaaaaattgatactgcttcctcaaatcgtttttagtgctgtttaaagatactgaccacagttatcacctttttcttaaaagaaaagacctgttcctggaccccatgctaaccaaaggtgaataattgtcacaaagagatgatactatatgattgttctttattgcatctcatctaccacatatttagagtaatccagggtttatgtaattgcttttcctttgaggtgttctcttttcattgtcagcagctgctgtcctt

SEQ ID NO: 113906 - DNA, 1030 bp, Homo sapiens
actataacatggtgctccgcaattagaagcacagagcagtagcattcgctgccaaaagagccatatttatgaactcaacaaagctatgaggagaaggatttgaaaggcggatcacagtatttcatcttgagaatcatttttgatcttcatcatcagaggtcttacagaactactttttttaaaaactggacatgctaatcaatcctataaaatctgaaaggttacgaatttttcatcgctgccttgtggctttcaagttaaccgtaaatatttataaatctcctcttcccaatacatatagaggtaaaagaaaacgaaaagaattgaggacaatagcattttgacttgttctctctttttttttgatacgtaagattttgcaaaaataaaaaaaattgtttcattgcctagtgcaaaacaaggggggaaaagagcatcttaaaccatagatattattttgcaataggtaattatttccaatccattgtggttagaaataaggaatttgaatattagtggctttgtagaatttatgaaaacacaaactataggcaacttaaacttagccttatctcatcccaagcctttgaatctgagaaaatgccaagagatgctagactgttccatgaataaaagatacttcatctgacaagaaaagaggagcaggggtgtatttttttgggcttattgttggtaccatattatttctttgagaagttattttacttttgagttgaaaaactgattgtcatgtcttctatctttataaggatacaaagtcatgagagaaaaatatataataatcttaccactggtttctgccctttaaaagtgtctatcctgactaacatttgtttgcttataatccaaaaaaaaaatgatagtacaggaaaaaagcttgataaatgatatactttctgccactcaaaaatggtttgattttgtttcaggattcatttcggaatgaaaggcttcatcatgattaatccacttgagtataaatataaaaatggagcttctcctgttttgg

SEQ ID NO: 113907 - DNA, 1005 bp, Homo sapiens
agtttagtttcttcatctgtaaaatgggataataatgtttctctgtctaccacagttttgagaaggaaggacttgctgacttgtaaatgtggaaagttatatactatatgcatatatagaattcaataaacacatcttttaaacaaagtaatgcaaatatgtattttctttcttcacagtccattttctgtatccaaaattttcatttttactatgttcagaaagtcaggtattgtagtattctttattaattggcctaaaatgtgaatgaacctcttgctctgcagatcggtcttgagtaactatggctatttttaaattgcatttgcttacttcttcctccagaaaaagatgaccatagaaaactgcccatttccacccagattaaattgggtctttcaatactttccttaaattaatataaattgtgtaattttcagctcatacgtggtgagccatatttctgggcttttaaattttcacagtgctgatggaaactcaagatattttctttgtaggagccttaaatatttgtgagtggaataaaactgaccaaatatatcaaaatatcttttgaagtagaatttataccaaaatggaatatattctctgctaggatggtatttgaatgtttattttctttctttctttttttattaatgaatctctaaggttaaaaaggaaaaaaaaatcctttttcaggtcaacaaagaaaatgctcttattaaattttgtcccctagaattaagttttttggttgttgaaactgagtgagcagtttcagtcttctaaaaataatcagatttcaagctaatctagcctttttcttttaactatataattatggttaatttaaaaagccttaaaagtgtaaaagacatttttaaatatagaacttttacatgtcatttagataagaggataaagctatgcaaagagcaattttgaatactaatgtcattaaataatgacttatttcacacaaattttatttgacaaatatta

SEQ ID NO: 113908 - DNA, 1009 bp, Homo sapiens
aagccagtagtaccagtatgacatgaagcacaaaaaatgctgcatgggttcagggatattagaggtttctatgtgcaggaaggttgggaagatctcaaagaaagcgtcatttgagtggagctccttgttccactctttccccccttctccctactgtacttgactagacttaaaaaaagtatcatttgaaatttaccttaaaaaatagaattttgattaaacgataaagcaaacagtatttaattggaaaaaaggagcatggccacaaaccttgactcattaataaacatggcatggtggagggatgatgagaatactggccaaccccaacagaggctccacgttgtggaataataaaagctagttttacagggagagtgggatcaaatggtgggggtcattagtagtttggagaatggttaaggtctttcctaaattagcacattaaggacttttagttgattgtagcatagttaacatggaaaacgaagagactgaaaatgcatgtaaagaagctggtgcagagtaatgggcaagcgatggttaccagcctggggtcaagacactggacgtggtaccctagtaaaactttttaaaagtcaacaaggactgtggcagatttgataggtaggatgatgcaaaaggtttcaggaccaaataataaaaattttcacattgtgggtctgggaaaattgggatgcagcagtgaagatgcagtatgtgttagatatgtgaaagaaccctggaatatccaggaagacatgtcttaggggctgcgatccaggatgagagaggctgtcggcacagtgctgttgattgaagcattccaacttctcagttcagtaagaatgagaaaggaaatgagccaaggtctgagcttcagcaaatacctataactacaaagtgggcaggaaagaaaaagcaaaggaaacaaaaccataggattggacataggaagagactcagggcaccactcggctgtgggaaacccgggaggtgggaagtgcgg

SEQ ID NO: 113909 - DNA, 3807 bp, Homo sapiens
cagtggctcatgccttaatcccagcgctttgggaggctgaggcaggaagattacttgaggccaggagttcaagacagcctaggcaacacagcattccatctctactaaaaatttaaaaattagccaagcagaccaatgtgcacctgtagtcctagctactcaggagattcaggtgggaggattgtttgagtccaggagttcgaggctgcagtgaactataatggtgccactacgctgcaacctggatgacagagcaagaccccatctctacaaaaaaaaaaaaaaaaaaaaaaaaaaaaaaaagactctaagatacagtactaacttccaagcaataataaagagatagcattggggtattaatggttctataatcatttctaaaatatccagacaagaacaaggcaataataacaatgattaattttaaaaattatcttatagcaagctaccgactagaaatactataatcagttggacatctagcagggtggatcatgttatggactccgtggctcggaagtcggaagagcactggacctgtgtggtgtgtactttaatcaataagccctcttctaaggcatgtgatgcttgcttgacctcaaggcctattggtaagactgaattttgattttgagtttgttacatttctaagagggttaattatacaaagtcaggaatatatcttgctccatcttgatattccataactaaataaaatttctttctcaaaggtttaaaggaattgccagttttcacatgtaaaccatgctaatattctgttgagtattttttttgaacagggagggaaagcatgtttgtgctataacagtatgtgcctttgtatctcaaaaaaatggagatgatcacatctgttctctactgtttctaatgaattattcaataaagctttgttttatgcagatttcagcaactttcgagtttgttattcagtccaagtgttgcataaattgaaagggaggatttctgtaagaatctctttgcaggtggaatagaaaaatgctgaattttttctcttctttatcccttctaccccgtgctattaaaatctgtatccagacaattgtactgatttcattgaaacccttcaaaataactctttatagctcacgatttcatgcatttagggcatgtaaaacctcagaggaaacctgtgattaagagccatctcattgcagcggcttctattgtgttctcaaagtgttatttctttcttcaattagagatgagaaagttcattcctgacttacgcacccctgcattgtgtcaactgtcatattgtgttttgtttcctgggccagaaaggcagacatcaccccttgcacagctttgctgtgctgcatctcctgtttccatccctccctcttcagtgtccttcagcagaggcggagcccatggaaaaacacaatcttaggttgccacattgatttcaacattctgaaatgcatttatatgtctcattaactattttcttgttaatgtttctgagtcagaaagacatcttaatgataatatagaatgtattatagtacagattccaaaatcctaggatactctgttgtgaaacattgtatttaatagatgttaagtctggccagtcgcggtggctcacacttgtaatcccagcactgtgggaggctgaggcaggtggatcatgaggtcaggagatcgagaccatcctggctaacatggtgaaaccccatctctactaaaaatacaaaaaattagccaggcgtgctggcgggtgcccgtaatcccagctactcgggagtttgaggcaggagaatggcgtgaacccgggaggcggaggttgcagtgagccgagatcgcgccactgcactccagcctgggcaacagaacaagactccgtttcaaaaaaaaaaaaagaagatgttaagtctttgtaattcatctttacttattttaaataagcctttcactttgtcttgtcattcctagtagtctagaaacaggtctctaactgctgacctaaagctttatgggatatcatctctcaactaccactttttaatgctttgcctaatattagcaaaactgataactgagtgacctttaaatgcttaaacatcataaaaagcaaatataaatctttgttaaacccatgtctgggtttctgtaagtcgaaattttgcattttacataatatttcatttcctagccagaagatgattaattctgacttgtctgagctaactttgtgttattagttctatatattagttcactgtaataaagtgaagtaaattttttaatcaaataaaaagatgtttcacataatcagtatgttatatttatgggactattgcagaattacttctctctccttccagattcagtgctcaagagtgaagaaaattctactgtctttagccacttaatgaagtacccgtgtaatacttttggaaaacctcatacagaagtcaagatcaacagaaaaactgcatttggaactacaactcttgtcttgactgattttagcaataaatccagtactttggaaagaaaaacaaagcaaaaccagatactagatgaggagtttcaaaactctcctcctgctagtgtttgtttgaatgatatacagcacccctccaagaagacaacaaacgatataactcaaccatccagcaaagtaaacatatcacctacaatcagttcagaatctaaattatttagtccagcacataaaaaaccgaaaacagcccaatactcatcaccagagcttaaaagctgcaaccctggatattctaacaggtatgatgcttttaaccttggtctttaagataattgcttttttttttttttttttaagacgaggtctcactctgtcacctaggctacagtgcagtggtgtgatctcagctcactgcaacctctgcctcccgcgttcaagcgattctcctgcctcagcctcccaagtagctgagattacaggcacatgccatcaggcccgactaatttttgtattttcagtagagacggggtttcaccatgttggccaggctggtctcaatctcctgatctcaagttatctgcccacctccgcctctcaaggtgctgggatttacaggcttgagccaccatgcccggctggttgcattaagttttaagaagacagaaattgtcccttggtaaggaagttgaattacttttggtaacatgaatcaaaccctaaaagactattatagtagtctgtctcccttcccttctctagattataatgttagagaagggaaggaaatgaaaaacgtaatttcctacatgtatgaaaagttgggttttttttttttctgacaataaccatacacatgatcaatacagaatatttggaaaatattgtaaagtataaagaaaaatatttgtcacccataatcatactgcttatcaataaccagttagcattttttaatatttccttccaatgaaagatagtcttccaaaaggggaactattttttataaaagtttagtaagtatactgtgttctaaaaggaggggtctgaggtgcctgtagtgacctttctgttaaagaacgtggatggatctcaaacagtcatgcgagatggtgtttatttttatttttatttttttctttgaggtggcgttttgctcttgtcgcccagctggagtgcaatggcacaatcttgcctcactgcaacaacattcggctaattttttttgtatttttagtagagatggggtttcgccatgttggccaggctggtctcgaactcctgacctcaggtgatctgcccacctcagccttcca

SEQ ID NO: 113910 - DNA, 1031 bp, Homo sapiens
tcatatatttaactcatctctgcattacttcttataatactgaattcaatataaaggctgtgtaaataattgttatactgtatattttgtgtaatttttttattgtttcattattttttgtttccaaatattttcgatccaaggttggttgaattcatggattgggaacctacggctatggagggatgtactttggttgggacctagagtaatctcaggtggaattctgagattcactggcttttcctcttattagctgtgcctttactgatgggtagatgccttctctcagcggtggggtgagggaccatttggtgtaaactcctagagcaacctgtaggaatccttaagcttatttcataacaaattctgagacagtctctgctcaatagatgtgtttactccaagtttcctattccagctctaaatttaccatcagttaatcctgatgatttatccttgactggtttttttaatgtcttgttcataatcatttatgataactggtttaacttttgttcatatactcacatttgaagtaagctaagggggctaaacttttaactgactggataaatccaccacgttttcactttaaccctaattagtgcctcatgatagaagttcattaaggagttaattaagaatgtttgagttgggaggctgtcctggaacagaaaatcatttccaaacagtcttttctgttccgtggcttaagtggaaagtagaagtgatcatcttaaaatattgtggcatttgttgtacctagatgaaatatcttggcatatttttatttccttaatgctttgtagaaaatctcagacattttaactaatgaattagggatttaaaaaaacattaatgtaaccttaaatttaaatgatttcttcataagccattagtaataggatcatatgattaatcacagtgcacagcattacttaggaatgctgcagcctgtgtatgtattgaatataagaacaccaggactgagactccacaatcaatcaagatcaactagcagaataaat

SEQ ID NO: 113911 - DNA, 1014 bp, Homo sapiens
ttttgttttttgttttttttgagaaggagtcttgttctgttgccaggctggagtgcaatggcgcgatctcagctcactgcaacatctgcctcccgggttcaagggattcttctgactcagcctcccgagtacctgggattagaggcacccgccaccacgcccagctaattttctatttttagtcgagacggggtttcaccatgttggccaggctggtcttgaactctcgacctcaggtgatccgcccggctcagcctcccaaagtgctgggattacaggcgtgagccaccatgcccagcctgtggctatgtttttaatttaatttttaagggaagaaatggagtggaaggcagaagtgaaggcagagagatgacatttgggcctctcctttctactttaatcctaccttctaccttggcccttctccccagaaaaattttaatacagaatctaaacctctccctggatatgtggaaccctggagctctctaggttgaaacaagtaggttagaaaatgttcaaccgttatccaaaacagccgcctctaaaataatatataaaactgtttttgtgtccacacaatttttaataagaatgcatcatttcattaattttgttaatattcttaatcttttctcctttaattttaagagagcattgtttatgaaccacttgctttaattgtgaaatctcttgacttctctacaactgtccagatatctggcttcccttgaagttaaagttttggaggagattggtgaaatggagttttggagggggttggtgaactgaaaggttgtggaaaagaaaagtcctctgcctctcagctttcctatttctgatctggtattacccatgacttgaaaatacagccaccacccctctaccctggaaaagttaccatcaaaatagttgctggtgaagtatttaatggtgacgattgatttagcaatgcctgcagctgctcttattttacaaatggctattgaagaaaccttcaaaaactgccctcag

SEQ ID NO: 113912 - DNA, 1039 bp, Homo sapiens
agagagagtgatttctatggccttgtcagagccattgatgagagtttgctaccgatgagaaaataattagagaagattgtgactagctactttggggccagtgggaatggagaacctggacttgagaatattttagaggaaaaagaagtggctacagtgtgatattgggtaagaaaagaactgaatatcacaaatgaaaaataaaatttgatttactggatacacagtccagctgcttttgttctttagaaagttaaattacgtgttttaggtacataggtaactttggaaataaattagaattacctgggaaaacaaagaataaagacagccttttgcataatgacctaatgttaacgaggtccactttttgatagaatttcttggtacaagtgaaattctgacatgtgggggtaaagtggtgtgaatggtcccttagcactcctatgctgtacttattttgtaacctgtcattacagtgaacttcaaattaatatgacagatggccctcgtaccttaaatcctgacagccctcgctgcagtaaacacaaccgcctctgcattctccgagttgtggggaaggatggggaaaacaagggcaggcagttttatgcctgtcctctacctagagaagcacaatgtggattttttgaagtatgtgtaagatttatctagcttactaaaatgtaattaaatgctttggttattaatgtataacaaatagcaatactttcctagttttaccttttacctttaaatttgaaatagccatattggcattcagtctaaagcttgaatgttgactaacttaaaattcagatgttcagccacaagaaatttaataaaataatagctattacattgttagagtatatcatatttataatcataagtctagaagtgttgcacttagcttgtaaagttagaaagacactgagtgactagtaggtactagtagtacatatgtggctaataatccaaggtaagaatttgttcttcctaacttcagcgctacatcaaaacctttggtttatgcatt

SEQ ID NO: 113913 - DNA, 1379 bp, Homo sapiens
gtcagcatgatccgcagtaggcctctggaacttaccctcctgcctaactggaattgtgtgtcctttgacccgcatctcgccaggtccccctccccccagcctccagtaaccaccattttagtctctgtttctgtgagttcagctgttgtacactccacgtctgataacaaattcttacataattaatgcaggtttgtgaaaaccttagttaaaaaactaatgaagacctgttctgtctttgttccgatgaagaatttacttaaaacggtatcagaggctaagtggaactatcccttatttggaacagcttatgacttaatgtgttttacactcgatttcctgccgtaaattgttaataccctctcaaagccgtgtaggagactcaccaatacctggagctggagcctatgctgacgatactgcaggggcagccgcagccactgggaatggtgatatattgatgcgcttcctgccaaggtatgacttcttagtttgtgaattttagagacctttggagaagatatttttttcttttaagatagaaaataatttttgaggctgggtgcagtggctcacgactgtaatcctagcattttgggagactgaggcaggtggatcacctgaggtcaggagtttgagaccagcctggccaacatggtctcgaactcctgaccgtttctactaaaaatacaaaaaatttagctgggcatggtggcacaagtctatagtcccagctactcgggaggctgtggtaggagaatcgcttgaacctgggagacagaggttgcagtgaaccaagatcgcgccactgcactccagtgtgggcaacaagaatgagactgtgtctcaagaaaataaaagaaagaaaacataatttttgtattgtgtaacctgaatttctgtgcacaagagcttcttagaaactgcatacaaacttgttgcctatcattttgataatgataatcattcaagttaagtaatcatagtcctgtgaaataaagtagtatttctcaccctgcttcccagatgagaatacttatgatctatttagtaattgatgtaaagctactgagtaaaggagctgtgataattgatggtaaaagtaggaagtgcagtcatcgtgtacctttaaccaccctagctagatgttgtgcccatgcacactactttcccctttgattgtagctgtttttctcattgaaaatctgtattctttttgagttctggccattacatttgactgtcggtatcattactgacagttattcagccaaagccaaaaataatattccacatctgaaattcatgggtggattagttgaaaagatagactctgtatcaaagtggacttgctttgtggatgctttaacagaagtaac

SEQ ID NO: 113914 - DNA, 1276 bp, Homo sapiens
gccccaaaggttttaagtggatctgttttaggaaaggcataaggaaatcgaaggtctaaaaattgagtctcttaaaactgttcatgtgtgaatattcctttgaaagtctttgtgtagctcacttaagatgctgctgacccagaatgtctctagtacatatatttttgttgaaaagacaatacttgaataatttatactttccttttttccaatctccagccaccacatttgctcaaagtatggggtttatcaatgaagacttatctaccactgcttctcaagctcttcattcagattggcttgctcggaattgccagccaaattattggagggtatgcacacatttaatttaaaaaaataagttaattgaaaatattcagtgacatcctttctgctcagtgttgcctgcctgttgtccagggtactggttagcatcctggctgtacattagaactagtggttttagttgactctccaggtatggatgttcctgaaacacctctagctgcattgggtgcatatccagcatggagagctactggtctctcacaatagttttcaaactgaagtttctgccatgtggaggtggctgcctcaatcagggctgctctgcttgtatttctttctaactaagtctaaaaaatcagtttggaaactatgagtctaaaatatttcttagattttacgtgcagtgtatccagtatcttgttcttgacttgaggacatgtaatattacatgtctagtatgttaccagtggaataatttttctttaatgagacttttggcataaatcagtttgcctttgccgtacagggtccttctgtgggatatcttagtctctcatctatttcttccctaagtcctaattactttcgagtagccatcaagtcagaagtcccttgggttagcacttgaaagaggctaatcataaaacgaagttaggggaggcacctagcgcactgatgtgtaagacatgaggaataggaataggtttcttgctttaataccagtctacatacacaacctaaatttatgagtttgcattatattcttgagccctttagatttataaaggaatcttaaagcacaacttagaatatattcacataaacctagctttgaagaaacaataaaagcttttaaaacatattttactttaagtctcagaattctttggccaaggaacaaatttctgaaatttaaaggtccagtgtgtatctaatttctttaaggattaatatctaattttaaaaaattttactattgtgttgagaa

SEQ ID NO: 113915 - DNA, 1099 bp, Homo sapiens
tattacaatccaacataaagtgaaggtgacttacatggactgtatctaaaggtcaaaatcttcaacatagttgccatgccatcatgatgatgggtttgtctttccattttgttttactatctctaatcctttcatcattgtttttgttgcttgctgtatgtgtgatcaccagttgtcctcaaactattctttagttgcaatacttactttgcaaacttaaatgaaaaacagtaaattttttttaaaacttcacaactacttgtagaaataaatgcattccaaatgttttatttatttttcaagcttcctaatttctcccattcttatcaataaatatctaggtttccaacttatccatcggcttcttttataaatctatttggatatttatttgaaagctacacaacacttctaaagatgtataaaaatagaattacaaaatgataagcttgctagaaatgaaatacataaaacaactcaaagtagaagtaaatcctgagcaactcaaattatcagctatctgttcatgtgaacagccagtaatcaaaagttttcttcctcacatctaccaaaagacgagtagagaaaaacctcttagacaaataccatcctatttcaaaccattgtattggttgtcttggtcttccagaacaaattaacacaaactcagtggccaaaaactatagaaacttattctctcagacttctggagcccagacatttgaaacgaaggtggtggcatagccatgttccttccaaaggctctaggggagaatcctggcctcttccagctgctggtagcttccagcatttcttggtttatggcagcgttaactccagtctctgcctccagcttcacacggccttctgtcttgtgcctataatctccctctcttctcttttttatataccagccattggaccaaggctaactcgaaatgcagaatcatcttaacctggggtccttaacttaattacaactgcatagaccctatttccaaacaaggcatacaccagtaccagagtttaggatttgaatgtatatttttggagtatacaatgtaacttgttatacccgtgagggattcaatttgaacta

SEQ ID NO: 113916 - DNA, 1032 bp, Homo sapiens
tcaatgccctcaatacctttagattcattgaattgaagtaagtccatttcacaacacctctggggacagccaacatcaattgtgcatgagaaaatatggattttaaaatagcgaggggttaaaaccaaaaacagattgtttcctaaaaccaaagaaaataatctatataacattataaatataattactatctataatattatatataatgatttaattttaggatgggtctcctatttcttcacatgtgtttctttcattgtggggtactcgggaccaaccatgaataattctcatgtcttcctccgaggcatgtgcccagatccaggcctcacctaactaattgcatcctcaactaactgcatcctgacctgactaactgcttgattaggctaaactagtcattctatctgaattctgctaggtgtctgtcttagtctgctcaggctgctataaaaaatatcatagactatgagacttaagcaaaagacatttatttcttaccattctggaggctgggaagtctaagatcaaggtgctagctggtttggttcctgatgagggccctcttcctgacttgcagatggcagttttattgctatgtcctcttatggcagagagagagagagaaatagagagagagagaaagatctcctctctcttcttgtaagggccctaatcctgtcataagggattcaccttcatgacctaattacctctcaatggctgtatctccaaacaccatcacactggggattagggcttcaacatataaaatctggatggggtgggggcagtacaatgtattccatagtagtatcaatttatctagaattcgtataagccatgtaagtaattacttaatgatacagtgctgccgggaacattctttcatgatcacttgtccattctaacattcatccatttaactaataggattaaaattctaacagtaaatgatttggttgttatcaccatccggtctcattttccatcagatctcattgaatatttgccttcaatgtcttttca

SEQ ID NO: 113917 - DNA, 1038 bp, Homo sapiens
ccttgctgcttgtggtgtaatgtctcaaaaagattagcagtcacacaatttgtgtgcatttcatgacagcttctagcagcatgccactattaatatttgctcagatgcaaacttcaaaactgcaaaatctccattttaatatcacacaaaatagtaagatatttgctacagcaaagataaagtagagcacagtgatagccttctttaataatatgcacctgcaagatattagatcaggtaattaatatttcctttaaggttagccaaataggtggtcattggagaggtaattaacgaggcaagctaacatttctaaattcaacacaaagttacagtcaggaatacaggacttaactctgggaaaaggaagtgcatttcttgtgttattttacttgagtaattttaaatctttaatgctttaaaaattaattacaccaataggatcattgctttattatgctgtcaacatgaaaagaacctttagagaagtaattcaggtttcttagcccctagactctaatattaaaacagtacatttactatattaaatgaccagatttgggcaaaataagatgtgcatgtaaaacaacagaaaaaatttagtgtgagtctaattaatttttatattttcttgcttggggttttccaaatgaacgaagtcatttctatgtaaatgattatgtcatctggtggttgtactttaacatgtttaagttttctgacaataaatatatttgttaaattcttggtgggatgtttctcttaaatggcatatttttaaaatatcaatttttattcgtctaaaaatctctttattatggcagatttttacaggtgataccatttgtgcagggatacttccaattatttaatattttgttttaagagtaaaagaagagacaaagaaggtatatgattataatagcaagaaaataagcatcacagtgaacataaggtatggaaaggaatttttaacccagatatttaatgcaaatatgaaaaacactgttttactgttagagaaatccagtaatggac

SEQ ID NO: 113918 - DNA, 1042 bp, Homo sapiens
cgccgccgccggcgcgccctccttcctttatggggtcctagtgccgggccgcggcgccgggagctggcgggcgcgagctgggacggcgcgtggccccgggaggcggcggacgcggggacatcttctcagcgcgcggattctctccacggtccggcctccccgtccccgccccgccctcgcgccagccacctccggccgccggctcaggtgggaacttcgccggcgcctctcgcccggggagccaggcgccgcgcccccgtactggggagccccggggtccctgaggaaggcagtccggaggctgggcgcccagtgggggcggggaggggagcccgccaggtcctcttcggcccccgatgtgtggcgaggccccgcgtcttctgcgggggcgtcttaacaggatcctggggggcttccagcgagcggaaagccccgggatgtcaccgctttccggggcaggcaggggacagaaggcttctgcagcgatcagggagccaagttgaaaaggagtgaaggagggagagtgcggggcgaggggtagcgtggggagtggtggatcacggctgaaacttgatcgggaaactctggatggggttggaaacacacacaaaatatcctgagctgggcgtttcaaaaattacgaatttatgagcctgcaactgagattctaagtccctctcgtgttttacaaccgattacaaagagcttcacgtattttaggttgaggcgggttgtgtctgattgatctttgctgagcatcttactatgcagcttggattccattcttactgcctcacctttaaggtagctggagtggtaacttgttaatttttattgtagagagagggtaacaagtacttgtaccgtgtaatacatcacacacgtgtgtttccccaagtcactgtaatttggaggtagagaaaagtttccaggtacgtgtgaggaggtgcaatggaaatgaaaggctgagagctgtcctagactttttacagggccccagacggctgggatgcccgagaacaggactgtctcttcatcatgc

SEQ ID NO: 113919 - DNA, 1044 bp, Homo sapiens
aaagcttggaagagtatcccaaaagatggtattgtaactgaacagaacttggtgatttgatcccttagtgaatttctttaaaataatgacgcatatccctttttccccactgcctacttggagaagtatttgtagtctttatgtattaatatattgagaacagactgactttagaattaagagcaactgtgtaataataattatctattttaatatttcaattaaaacaagattttataaattcaacaatcttgctttgtgcattccttaatacacttttaattatctaaaacttcgagcatgtatatcttaatatataaaattcttgtatgagccctgaaagtttggatttgtaattctaaatgcagagtaaatatttaattcttgatctaagagtgagaggttagttcagtaataagacttgctaatcccactttaaaatgtcatggcattcacaaattattcctaaattcttcaaagataggagtttataatgagtttagttattctattgtgtatttcaggattgtctgtatctcttcctgttgcatttcccttaacaatcttgttctttttttcttacacgaattttattattcctcttaatcaaagatttttttctaatagtaaacaaatatatcttatgttaaataacttagaaaagaatagttagaaaaagtagttcaaatcaaacacacattttacatgcactgcacagtttttataaaaaatgtagttgtactaatcaccatgctaacgtttatatatttggaaaactctgtgaaccccctgtgccaatagctttatgttagcaacctatgcaccctaatgaggattacttgattattgggaataaagcagatagatttatggaattgtgactagttattcctccaaacgggattattttgcatggctgtgtttattttctagaaagatgttttaggtaaattattgaggcttttcttactatgattctgtaggcgtgtcatcagtcttttggttagaaaagggaacctgccttattagggtgaagacaaagaa

SEQ ID NO: 113920 - DNA, 1052 bp, Homo sapiens
tatattttgagattcaaatattgatttactaaagatgcatataaagaaaccttaataatttaaattatctacacttgggcttttatcttttatatgtttcaggggacttcagatctttctttatactggtaatatgatttagaacccataaataaagaattaaaaaatattagtaatcaaaacatacactaactgaagtctgtttaaaggcagcctgaaaaagaaattagatgatccgataattctggtgttctaaaaattataaaaataccttaatttaatgaatattacagtttatgtaatttagatactgggagaatatcatgaatatacaatatgtaaaatccatacagataacaaaaaagttactacaaatgtgaaagatgaatgatacatctttagtcatacagtgtgcatgaatgcatttgcaaaacaagtgtcaggttttaagatacatcaattcttggttttctggtttaaggtaatttcaataaaactaatacagtcttgcatttcattcaagtatgatgttaggaacttcggtcaaccatcagtatagccatgaccgaagtccattttctcattctgaaagttttctataaaatctgagccttcaaatctagttctagttcagctccactatgcagttgtttgatgtcttgtgacaaatgagagatctgaaggagaggactgagtgcttgttctatgagatgccatcagttaattcttctcacattatctgatgaaagtagcttttagacactgtattgtacttcagatgggaatcttaacatatcaagtttggtaaattttatattgagctatcagcaaaggacaatgtgagttactgaaacaaatcatgaatgtatcacgtatttcatgtaaatgtgatgtaagacgtgtggattggttgtgtaattaccacttcaactttaaaaagcctctataattcacttttaaaattttaaatgttgaggaaagtgaagtataaatagttcatactcttggaaaaatgttactaatgtaagcctcgtagggattattttttatta

SEQ ID NO: 113921 - DNA, 1876 bp, Homo sapiens
aaatatatgttaggtattaatagattccgtgaaatgcagaggttactattttgatgcaagataatgaagccagattatctattgaagaatgcttttccatttatgccagatgaccagggcattgattcttgcggggtactcagtcatttaagtggggtacctcctcagtacagtctgcaaagtccatggcctgatgcaagttctctgtaagcttttcccctggttaataatattgaaagcaacttgagaagaaaatagtgacatataaaaatgaagccatcatatatatgagggttagttaattttctctgaacgtgtatgtaatacacgtgtatgtaatagtgagcatattatagcttgctttggtcatggattttaaaaaagaaaatgaaaggacattatattatgtgagtatattcccaacttgtaatgaacaattgtttgcacagcataagagtctgataaaaatgtgtcattctaaggagacctctgtttttttggtccaataaatacattgaaaattgaaaattaagtggtcagattacataattgtgtttatatcagttctcatttagtcagcgtcaatcaaatacaagacaattggttctattcaaaattggaaaataccaagtattggctaattgagtcattttacttgtaaaacacaagtaatgccacctaaaaaagcataatttattatggggaattaattttccttaataaatgggctcttatttctgaggctacaagcttctaaaagttttaaaagagtagtaaagttcactataaaaattgcaaagtgagggaatacagttaagtttttctacagtataagtaattctggtgtctgtgtacttactcattgaaacatacaatcagcttcaaaagatggctctttataattgtcacatttctgttctgcgtcatcttctcaaatattttatatctataataaagatatatgatactaaaattattttctgttcttcagtatttataataaggaaactatttaaaagattatttttgtgatcaattcactgtgccagttgattattgaaggcttcatcaaggactctagactttcataatctttcataattggtgtaaatgtaatgttaagaaataaataatactgcctagaaatgagccagatgtaaccaaatttcaattattttatgagatttttagaagaataataatttaaataagaccttcaaacattttaggtaaataatatacaaattttgaatttattgctagtaaaacacaaggtttaatacatatcttaaatcattgtctgatcgagaaacattactcatcatttattatttcagattcttggaatatatgtgtttcaatttagagtttagaagtaatacagattaaggattttgaagagcaggttttccttccatctttcatcagctctgtagctgaaccctcacaatccctttctttattattctaagccactatcagattctaatctttgctgtctccacagctgtttgaggattttttttttttttttttttgcaaatgtaattacaagtacatgtgttttgtgcaactcacttcctatgaatgttggtgatagaggaagattaaaggagagcaggactatgttgtgtatagatccatggatgaatctattagttttcgagtcattatgacagtggttatcaggaagaactgcaaatgttaaaacacaacaattttggcttaactaatatgcagaaaaaaagtcactgaaagtttaacaatttctccagaacaagtgcatttttatgaggtacgcgccactgaagcaagtgattgctacacttctgtgaatcgtttttttcttttctttttttgaataatttcgactttc

SEQ ID NO: 113922 - DNA, 1099 bp, Homo sapiens
gctgcctttataaaaaatccacatgtttactcttgtgaaattatttgttataattgttaaactcttgggttttttttttaaagacttagaatatcataaaggtataaagagaagaagcaagttatgtttagaattttagctaagttgttttgtggatgacattctgtgttgggtttaaaatgagattattgaagtgggctacctataagatagagttaatctaatgtgggttttggtgtgctctatggttaactgtgggtctcaaaaagttaagtgtacttcaagtgcagtatttatgtaaaaccactaagataagatcttgctgtgtaatctttgctggtgctcaagctaactgattacaatggctggcattttcactgttctcacacttacaaaaataaaatcagaaagcttgagaggatagggaaagacatctggtgtacaaaatgaagacatttatcaaaagggatgccttttttccttttaaaaactgcaaaaggtttgtttcatctcattaggcttagaagtataaattttacataattagtagaaagttgaatgaataacagaaagttggaataaatatttgctcttgtattaaatacatatgaaatgccttgctttagtatattgattatgctaatttatagtctaaatgtacaattagattcaggaggcataacaggatgtagaatttgataaagaatacattaaagaaaaagaattcttgtgtagacctgagtcttaaaaaaattaaaaaataacatttaaattttcttgtaggcctggtgtggtggctcacacctataatctcagcactttgggaggcctaggctggtggattgctagagcccagaaatttgagaccagcctgggcaacatggtgaaaccccgtctctacaaaatacaaaaaaaacattagccgggtgcaggggtgcatgcctgtagtcccagctacttgggaggctgaggagtctgaggtgggagaatcacttgagcccaggaggtggaggtgcagtgagctgagatcatgccactgtgctccagcctgggtgacggagtcagaccttgtcttaaataaataaataaataagtaaat

SEQ ID NO: 113923 - DNA, 2155 bp, Homo sapiens
ttttttttttgctttaagagttagctcctgttaaagcactcttccaaagtgttgtatgtatgcaggatgtatgcatcttcctaatagattatcagcaaccccctagcccctgcaggattggtattttgtaattatgtttcatcctacaaaatagagcaccctatttaatacatatcagctattaaatacgtgatcgaattgcccatctataactcaaacttctatgcctttaataacaccaaatgtcttcaggatttgtggtggctgagaacattcagataactaaatggcccactttattcttttagatagatggcgtcaatttctactgcctcaccaaaaaattatgtagcccagggatagaactttcctaataaattttacaaccagttcctgagaggccagtgaaagatcattaccttcacaacactgttgctcttctctgtggcttttgtagtgattcaaacaatgtgacagtagctaacccccatggacaagtttaatagaattaaagaaatatgaacctacaaacacacgtactaacactgcgtagaatctgtgtcttgcatgttcagggattctcttgttttaggtcgtgtaatttctcataatatgtgtattgtttcccttctaaatttaataacagtaattttgttagctgtggaatatttaagctaaatggtttgaaaaaattaagtcaaactccttacataattgtttcttaaaaaaataaaacaactccatcatcattttcctacagtgtgtttgaagcttctaactttctccagacatttaaaatgactctgtattttaccctgggacaatgtaagcattctaaagtgttttctagttaatgtttgtatatcagcttcttaaacaggtgatgcagttatgaaacttcacctgtatacatctgtaaattttctgttccagatatttaaaagcagaagtcaatattggaatgaaggaaatgtaccagagtgtatattttagagtaataagtgaaatctgctgttttcaacgaattccttttttaaattttaattcctaagtatttgctgactgaagaacagtatagtgcctttaaggtgagaatttttgtattaaataactaaaataaaccgtaaaaattgctgagcaaaacatatctaaatcttgtatttaaattagatttcatttcaaaatgcttttaaggaccccttttatttattcccctggtggtctttcaaaagccaggtgtctgggattgtctccagcctgctctaaaagcaccccaggctttggattagtacaagagagcagctgccttttattcagcagtgcccatttacataatgcctgttcatttaaactcacttggaacctatggccaggatgaacccacaccagagtgagtcagcagtgcatggtcttgtttttgcattgaattaattttaaaacatccctctcttccacagctggaatgaaagacagtactgtagaggcatttctcgattcaactgctatatccttaaaggcaatttaagaatcactgttgcatactttatcacaatatataatagaactaaaatttttaaaaagcagtgtatctattattaaacatttcattcttacaaaatagactatggtagtttatagaagagaacaacaaaatgtactgaaaacctcaaagtaatctctgctctgaaactgtcatttccctctcacggaacacatttacttaatcctttgattcaactttcaagttcaaaaagcatttttgtgtgtgtatttgtgaaacaggaagtttttcagtgttgtttttgtcttctaaatattgtttatgtttgaaatataagtcaaatttaatattatggtataagatgcttctttaattttaaacttttatattagtttagaatatgtatgtggcttagtcagaaaaccctcacctttgtcattttttcagacctcatattcagatccatttttgtgttcttctcccaggagattaggtagtctctatgggctttgtactaagggcaggaatccacttccctaagttacagcctgctttatgtacttacttaagtatttgtggggcagaagtctttaatagttggaattgcacatgcactagaaatttaaataaaacctactttcagggtaaaaaaaa

SEQ ID NO: 113924 - DNA, 1048 bp, Homo sapiens
ttgtttttaataggagaagatcacttactttgctggaacttcttacatttattacatgttatttaccggaaagtaatgttaaaccatgtctatatgcacagaaggagtagatttcacacagccaatgtattgacttctggatcagtactgatcactgcatttgtcttaattaagtgctaattcatgtcagtgagatagatggatttttaaaaacttctgtttatctgagcttagatactttgggtaagaaatatactaatgcatcatatatatatatatatatatatatatatatatatatatatatatatatatatggtcctaccctgttgaataatttgtgttagacacctcatttctccagattttctaaaattcaggcagttggtgtgagggtggaggtaggaggtattggcagagatagcaccgcttcttcagatctctaataaatgtaattagttcagttttatgctttgcctttttttaatagtgaagtgattgtagtgtaaaaagagcagttgtttgactatattatttaattcaacagacttttcttccctattctttaaaaagaaaagcagttattcaaagcataaaaagaaaaaagagattaaaaataatggtctgtaaactttgcaaagtacataagaaaacctcattaattctgggtatttaaagtataaacaaaatctaaaataaatatgagaaaatacaagaacagaaatcttttgaagaaaaacaacattctaaattcattctagttcttttcttaaatgtatttggcaaataattataaacaaaagcaagactattatcagaactcatgtagtaaatttattaagaccagatgctttcctatatgaccatgttggtggagctgttagtagctttaaaagattatgttcctctgggtaccagcactgtccttctttgagtcaaaggaggttaaaatttttgaaggggatagtaaattcgccaactctccccaaatgaggacagacatccaaatgggaaagcctccttcttagaaacctttgtgcccccctcc

SEQ ID NO: 113925 - DNA, 1084 bp, Homo sapiens
tcactctacatactacatccgtaatattgcagccaaccagaaacaccaaagcttatacttatttagatgtatgcacataagaaagtcaaaagttagggggaaagatccactgggaaactagatatggagactgtgtagcatctgaccttgagacaagaagactgatgtggggcgcggcacaaactcctgggctcatttctgaggcttttccaggcatatgtctgggtgagcatggtctcagttcgcccccacacatctcagaagttggtggtctggaaaacttccaaaagggtgtggactgcagtttttgaagaagcataattagtcatgcccataaatcagtaggcgtgtgggtgtgtgtgttgggggtggtgggggccaggctgcatgagtgtgctcagatagccctggctggcccacagtggtggccttcctgagaactgagtagtgccaaagtcctttctatccagaattatctcacctatttagagccaaatttatgcgtaaggcagacatctgcatctttgaaaatacaattttgtggattttgcctttagggtggtttttgtttgcttgttttgttttgggaattctaattttcttacgaactgttttctcgtttcctttagaaaatcactgaaatgactaatgagatgggaagatgaacaagtattatattttgagttctttcctacactgtctcattttctataaacatactaatgcatgcttttaaattgttaataaattggagttttgctgcaaatttaaagaaaaagaaacatttcctcattttggtctttctttttttgcccttacacatgaaattctagatctctggaagggactcaacaaagctttcctaaattaattggctctgacggtaccttcttaaggatttctggtgtggctctgacatataagcaactcagataactacagaaaactgtgtgtaaaaatcagcccaccagtatttgaaacaagtatgcactgttctttctgcgtacctcccgtctgaaaccttgcgctaacagccggatacaagtacaatttctggctcctcattcagtgaggttagaattgg

SEQ ID NO: 113926 - DNA, 1050 bp, Homo sapiens
acaccttgtatggctcttgcagattcctgatagccttttcctgtgatgcttgtacagaattcaagcattaaattcattttcatgaaaaacaatgaaatgcaaatttaaaaaaacccaaaagaaacaaatctctgtgttcaatgaagattacagctttactctttctatatacaaatgtatatgtttgcctatagagattgcatttggagatttctctaaaaagtaacttcacataagatattcatgacaactgagtctgcattgttctccatttcccagcaagctttgtgacttttcggttgcagcagctgtggatcagctgacacatggtcccagaagatttgcagtcttctttatgctcattagcttttctgaatttaaaataaccccatcttacagtaaaatacggtttgagaataactctctaatactcactggataatttaattcctccttcggcatctgactttgaaagcccacattgaccgtggcttaaaacaaaacaaatggaaactcttccaccccgtgtctatcacacccttttccaatccatataaatttcacaactgctgctttgtgactattgctctcctaactaaaatagttgacgtaagctaaatgcttctttacatttaattattaaataatagaatctgcgaacctcagctatttgcatgaccacttctagaaacctgggtctttgcttgacttagagcttctctctgtcttcaggcccacctctcccatgtgcctctgacacgcccctctcccagcacactggcctcagggccttggagcctggctcttgattcaccactaacgtatttcctcagggccccccaggtgcagtggagcgttgctatgactgatttacacccagcctttctcctcatgggtgctcccctgggcccccccaaatcaccgcgccacatctggcgacctaactcattgtcaagcttcactttcgctcattgtgcccttggcacatcgttttccagtagacaactccatgaacagttttatttatttgcgtatttatctatttgcaaa

SEQ ID NO: 113927 - DNA, 1039 bp, Homo sapiens
ttccaggtccaaatgtggggggcactgctgtgagtccgtggccctgtagattgataggaaactgcgcagagaaggttcatgcttcttgctagccacaaagcaatgaacaggtagtagtattttcttatggatggaaagtttaggtaaaaattgtagtcttatgattacattacatggtattgtataattacctaagaactagcccatgtacagtgtacatttatgtgtttactaagaccatagtttttcccttttttagttcccctttaataactggtaattaatcctgtgtaatattaaataataatcaacagctctgtgaaggccatcatagaaagaatatttttcttctggagagattattgtaagtgttatttagaagaagtcttaagccccagcatacgaaactaagatatctacatatcttttagcagagttttgttttaccccttcgcttaatcagaaataatgaagatttatgtatgtcaagttatttaaaattctcgatgaaaagcatggttgttctgtgtgtgtgcttaagtaccttagctcaaatgcagttacactgctgcagaaaaatgttaacattttgaaacagttcttgatttcacttgtgctgattttatcaaaataaggaggaaaaagacaccgtgcctttgttacatgtgataaacaagcgatttgctctttagaggccccctgctataaaagttagccgtttttaagcctagagaatcaggtgagtaatattagaatatttgatctttttaaggatttgccttgacatttattttgtaaagaccagaaactttattgaaactgagccttagaagagtggctttagcactgtgttgctgtcccaaaatgaagagataatctaggaattggtataaagtggccactacccaaaatctcgtggtgggccacatgggagaacattctagaataaaaataccagagctgaaatcatgatgatgctggcagcctaacacttgaaactatattagtttccatcctttaaatgtagtcttgtataatt

SEQ ID NO: 113928 - DNA, 1047 bp, Homo sapiens
agatggtgaaaacgtccttccaagattatcctctttcagaatccaaaacttgaatttctgaaaaatgattatggtgtggcttattttatgtaccccacaatatatattatcgaatcataaatcaaactgctttctaaaagattttaagtatcttcggataaatttccttaatattttaattgaaaaatgaggcaatcatttctcaagatttttatttctgatgggcacatgaggtcctttaattagtgtatccgttcttattcttgctgaacagtctcctgaataagaataaaagtgacaaaattagacaacgtatggaaaaggaaatcctggctttgctaattttaccagggagagtagctaggccctatatttctggctggaattctcaaatgggagaaaattcttttcctggcatgtattgggtaacagttgtttgtgtaccttgtagcctagccgactctgtcaaaggtaatcctcccagtgcaataatcctctgctttcaaaggcgaaaactgtgtaaattgaattttacagaaatctttcttaaatttcaaaattattgttatttaaaacgtatatttaacttatttttgcattgcaaaattggacataaaaacaaaccacagtctggccccaggtgaggtagggagaggattgttaggggaagtgtgcacagcccataataggccctgtcatgccaagcttagttatttctgcagtaaggcaatggagtatgcaggttgaaaacatgaacttttcagtcagatatctttttttttttttttttgaagtggagtctcgctctatcaccctggctggagtgcagtggcacgatttcggctcactgtaaactccgcctcccaggttcaagcaattctcctgcctcagcctcctgagtggctgggattacagtcacgcgccgccacacctggctaatttttgtatttttagtgacggggtttcaccatgttggtcaggctggtctcgaactcctgatctcgtgatctgcccaccttggcctcccaaagtgctgggactacaggc

SEQ ID NO: 113929 - DNA, 1068 bp, Homo sapiens
ctatcaaaatgacttcccaaaagttttccaacaactgagtcatggaggaagagctttaagaactaaaacaaataaagctcattccttccccaaggcctttgtaattattcttctctctgaccagaacgttttcccccatggctgattccttatcatcttttggatctcaggccaaatgcaacgcccaggggaacctgccctatccacccagcctctatgcccttactctgctgtgtgtcctcatcaccctctgaaattcttgtgttcactcccttttgatcggaatccttcactagcaggggtgctctattagggcagagcctttttgttccgagatgagtctcttaggacctggggcagtgacgggcagacagcactcagtaagtatgtattgggtgaataaataagtgaaggaatgtttccctgactgtcggtgctcagtgaagagctgacctgtgcctacggactgaatcatcttttcatttgtaacttttaactattgtaattctagataatggtgatgactgtattgtgaaaattattaaaagttttataaaaatacaaacacaagtaccttttctccctctcttttttaattcagttacctaccgcggtgactcattcatactaacatctgagtctgtgtcagaaacaagcaagagaaaacagaggcagagataaaggactgatattataatttttgaacagctctttcttctagataaatgttctttatataaaaaataaaatctccccaagaatattcttagactttaaaaatctttatgtgtgtgtgtgtgtgtgtgtgtgtgtgtgtgtgtgtgtgtatttttttttttctttttttgagacggcgtctcgctgtgtctcccaggctggagtgcaatggcacgatctcgactcactgtaacctccgcctcctgagttcaagtgattctcctgtcttagcctcccgagtagctgggattacaggcgcctgccaccatatctgcctaattttttgtatttttagtaaagatgaggtttcaccatgttggccaggctggtcttgaattattgacctcaaat

SEQ ID NO: 113930 - DNA, 1052 bp, Homo sapiens
agacagggtttcaccatgttaaccaggatggtctcgatctcctgacctcgtgatccgcctgcctcggcctcccaaagtgctgggattacaggggtgagccaccgtgcccggccaaaaagccttttaaataggaggttttgttttaatttgagacagagtcttgctttgtcgcccaggcaggagtgcggtggcacaatctctgttcactgcaatctccatttcccgggttcaagacatcctcctgcctcagtctcctgagtagctgggattacaggcacgcaccaccacgcctggctaatttttgtatttttagtagagatggggtttcaccatgttggccaggctggtctcgaatgcctgacctcaagtgatcctcccaccttggcctcctaaagtgctgggattacgagtgtgagccaccatgcctggccaaagaggagtttaattccacagactctcagattgatcagtaagtgatatgaagcaagtgcaggatccctgtgctgatccaaggagtgtgccccgagctggctggtctccggcaggcttcccacggaggacaggaacctgagcctgtgtgtccatggccccatttgtccctgaccccaggttgttttacaaagctgcttgaaagagggtctccaaaggccacttagaggccaggagacaaagcatgaaagagcctggtatgtggggatgtggagtcattgtgatagagcaggacagagatgcaattccaggagatcataggaaataaggcgcacacatcagaaggaagtgtagatttcagttgtgaggatgccccgctgtgtgtcccacgcagcgctggatgcctgtacctcgtcacatcagtgaatcctcacagcctcctgtgagactggataatattaccctccccatggtacagctgaggaagcagcctcagagacgttatgtgatgtgcttcaggtcacacagctaattaattgtcagagccatcacagaaacgaaagccagcttgacttccgagtatgcatgcgtccctcctcatggtgtcttctccaaggatgtga

SEQ ID NO: 113931 - DNA, 1092 bp, Homo sapiens
aaattgaattactttaaagcagagccgtggtgggcaaaattagatcatattttctcaacagtgacgactgcattttagcaatgcctccctttgaggaaacgtagaccaaattgacttactccaaattgttgttgtggtttaatatttattgaatagccacaatttactagcttaccttgaaagtgtggtttttaacagttgtctagaatacatcaccaaggtatgaaatacagtggcaaaagtccagcttctccacttggcaggcagtcaatgggaaaccaaggaaactgccttgctctctgtgcctgctggaacattcttgcctgcactccccttttgtggtcaggaagagctttggaagaatcctactttagcagacatctgagaacgcaacatttttatctactgactaggtccattttaatcctctgccgtggtttataactaccactagtaacagcattgaaacaaatttaattgggccacttactcaagagcctttgtgtccattattgggaggtgcctcctttgagcagacacagccccctcctaggggtgctgaactgggcaaccgcaaagcacaggctggattgagccccccaaccccctcagcagatgacccgatgcctgggttgggcgttgtctacctgacccatgaaaactttttaaaattatagattatgcacatatttggtttttttttttatgagacagggtctcactctgtcacccaggctggagtgcagtggtgcagtcatagctcactgcagccttgaactcctgggctcaagtgatccttccaccccagccttctgagtagctaggcctacaggtggtatgtgccaccgtgactggctaattaaaaaacaaaacaaaacaaaaaaacttgttttgtagagatgggatctcactatattgcccacgctggtcttgaactcctggcctcaagtgatcctcctgcctcagcctcctaatgtgctgtgattacaggtgtgagccgctgtgcccaacctatgcatgtatttgtctttatgatataaatcatctaggaaatccagaaccacaaaggtataggatacgtgtttcctattt

SEQ ID NO: 113932 - DNA, 1053 bp, Homo sapiens
gtaatagacactttgcacagctgaaacacttttcaaggaaccaatttcacttgtcctttgaaatggtattttaagtctactttctgtatggagagataaagtctaaaagttgcattattgtattttaagaggaaaaaggcgtacccctcaaaccaatttgataaatgactgtagtgatagcatttccatcaatctctaaagagagaacttcagctattttgcaatccagattttcttgtcaagcagaatatgttatctggaaaggagggcagtgccatttcttctcttcctgaacaactgcagataggtgagagagtgaggaaatagacggacttgtagctcttccagtgctgatcaaattctaggagagtttgagagaaactgctagccagctatgtcatgtacttgcgatcattctaggacaacacaaatgccacatctctcctagatctttggaggaaggggtactgtcttagaattctgaagatgatttgaagagaggtgtactttttcacctcactagcattattccattccttcagctttatccaggaaccttttctgagcctactttggttgttgattgaaagacataaaatggaattctgttgctgtaagaaacacatggcatttcagtgttattctaattttatgagtttctattatacatactaaactatagcttgaatataaatttcactgtgggccctcttccggcatgtaatggtcatttctggcatggtctcctgtgataaattatattttatgttttatgtgcactagaatgtcaaaaatagcaaacgtaatatgtcggtgggcttcctaaatcaggctcagaattaaagtgctgctttacaaaatgccgtcaaatagttcctgatatataaaaataactacattgccttgatagatatacatttacaatttcaatagtgacttgtcattctttgagcaaaagcttccctgtttcatttaaggatgaaatagattcacttcatgggtatgtacaagtcactttttagtataataagttatgatttaactggctgggcg

SEQ ID NO: 113933 - DNA, 1022 bp, Homo sapiens
tattttgatttttgaatgtgtttttgatatccttgaaaaatcacagtggtagcagtaaaattgttttaattaatgaattgaatagcagtgagtgctgaatcaggtttattgatgtaattatcactgaaatagaaaaaataagtgttagagccatagaaccttcgtttatttgccattccgtgagcactcaagtgtcggaaaagcagctaactgagggtttttttggtgttgtttaaagaatattcttctcaaatcataataattctgtttattaacattacatacacatataattttatacatgattatcttgtacattatttactgaatggtttgaatactaacttcagtatattgaaattttcttatatttatcagttgacgagatcgttttccataataaataggctgtacgcaaactaaacgtgaaacctatttgaatgcatgttaaaatggatagaaatgcgtatacacttaagaaaagagcaactaaaaatgtctgatgactattgccttgactttagtcacgcagaacctgaaaactaaataaagggtaacttattgaatagatttcttatttagtatatcaactaagtcttcattcaacgaatcataaatgctggatatggtaccaggtgctggaaaaacaaaaatgagtaagatgtattccctgacgtctagaagctcacagggtggttgggcaaaccggcaagtaggcgtgtaattaggttttaatgtggttagtgttattacaacagaatatgcagagtcagtgtcagcccagagccgattgttgccaacagagactgggggcaggagaggagagaatgtttcacaaagaaggaaggaagcagcgttggaccagaggcttaaaggatgtggagaaattcgagatttagacagaacagcaaaggagaatgtgtaacttccctggggatgctccaaaagccacaaggagtttgatgcctgggacacatgaggctacaaaagtagcccccgagcaaagtcttcatggtgatgct

SEQ ID NO: 113934 - DNA, 1064 bp, Homo sapiens
actgataataccaaattgaatggctattttatctataatgttcttttatctcaaatggggaaaagggcacattttcatataaggctgtgggatgtgaacagtgaagggtcgttcttcctctaagcggctctccattgctgcagccacctgctctaccgtacggagctgaggtaattaataagaggtattaacacgtctggtatcaccggggagagggaaaaccgaaatctgttgaatcgctttaactgtgaaacagcaaatgttgatttactcaccatctttcactttaccacccagcttgccatcatttctgcaagatgtaataaaaagtaagctcacaccccagtgtaactttaatgggtttaattacatgtaacttgaaatatgtgtttggctacatggtacgtccagccaccaatccataaccagcatttttggaaaagcacagccagcactcaggagagagatgggaattagaaatgcagactggggaggagagatgaggccttggagccctgagttattgcccatgtggggagcgctgagagcggaagggagacaggcaaagccgccaaacctaggggaatgcctccacgtggggcgggggtggaaacagagaaggaggcaggtgtgaacagtagagaaatagaggcaggctaaagagagggcatcgccacacaaatcaagagggaaattaatttcttgaggatgtggggcttcaggttgcaacggtgagtgaggaagcactgagaaactaggagaagctgtctgagctattttttaatgaagtttaatggtgaatgagaagagctattgggggtgcaaaattgaagagataagaactgaataacgatagaaatttattttgctaacaattgatgagatttgtgagtatctgtgtaggctgaagttaaagactcaatggagaaagaaagtaaagaaaatgtcggtttgtctttgagggataaaagatgctatcggagcgtttcctcttaatgagatccatttccatcaccgtctgtgtagcacaccattaaaaataactaacagacaacgtcttttta

SEQ ID NO: 113935 - DNA, 1045 bp, Homo sapiens
ggtcctctctcagcttggagtttttttcccgatgatggattagtgataaactcatatgcaggttattccggagttcctctgaaaccttagcttttcatgaatgaaaaggtcctttatacattttctacatcctttaatttttttcccatggaactagattgctttgtacaaatttatatctctgttatcttctttgaaataatagagagcagttgtccagttttaatgccttaattatttgtttggtggtttggagaaactttactgttccttaatgaaatacattacatttagtaaagagagaacttaaaagttgaaattattctttaaaatacaagctaagattctcatgaagccagaagtctccttgctcatttcgtcctaaatgacttttgatataaggccaaactttgtgccagatgtgtggtattttacaataattacatggcacaaacctccagtcatttccactgagaccattcaacatctgttttatcaaaatggctttcagttttttttcaggtccacagatgagtaagaatattaagtgagacactgagtcacttactttattatttcatagtgtgaatttctcttgtatttatctgttttaaattgccacagacctaaagatttcttttaatgactggtcataacagagtttgtttctctgatattttgaggtaaaaattttaaagacattcatttaacatttacactttctattccctttattctgttacacattgtagttccaaatgctgatgaaaacttaataaggaattggtcaggaagtagatgagaagggatggtgcgatccgttattaccatttccactttgagacccctttagcttttgaccagcctacttcactgtaagtcttcttatctgtgctaaacagaatttacaagtatcgactaacaaagacaaatagtcagaggtcataagtggaagggatggcagacccacgtggcagcgtgaaacggttcttactcacctgtgggtgctcccaaagctgcatgaagggccatttgctaatttccc

SEQ ID NO: 113936 - DNA, 1117 bp, Homo sapiens
tttttgttctttctctgacaaatatgatttgagaataaaaggaaatatataaccatgatggaaatgtatttttgtcccaaagctgatttgtctcagatatttttggtcacagttcaattatttcaaaattatttttaggtttttagattcttgctttggtcacatagcaattttgttccaaagatacgaaaccatgtaatccgaccatttccgaagctgggctcttcaatatttctatctttcagacacagtttggcaaatacggcagctcagtcaagtgaaatgtgctgtaagtcctagggttgattggtcaagaataagatttctccagtaagacatttttacaaaggcacgatgactatactttcatagttcaaacaaacagagcataaggaattattctgaaatataatgatggtacagctgtaacaataaaaaggtctgtaataaataaaagattgtgcatctgttttagaagacctctgactgctataccttgtaacttgccacaggcctgatgcactatatcttaactctaagtacaaatgcaagaatagtgtatatcctacattatgttatgtctcaaagaattttagacagatagggacacactatctgatggtgaagagacggaatcgaagctgaaacatcagactgaattatgtttaagtattatctattcttctgcaaagaaaattagcttttatctgtttttctagaagtagtgatgtgtctctgctaaaagaagcacattcttaccaccgtggaacaattggatgcctttatgaaaccgatgtagtttaatagcaggttcttttgggtgaaaattgttttctagttattttattttattttggggatggggtcaccaggctgtggtgcagtggcatgatcatggctcactgcagccccaacctcctgggctcagatcctccagcctcagccttctaagtagctgggaccacaggcgtgtgccaccacacccagctaatttttaaaaatttctttgtagagaccaggtctccctatgttgcccaggctgatcttgaattcctcgtctcaagaaatcctcctgccttggcttcccgaagtgctgagattacaggcaagaaccact

SEQ ID NO: 113937 - DNA, 1106 bp, Homo sapiens
tcaggaagtttctaggcctttatcagactaaaaatagaacatggctacaatttttccactgtaatacttactcagataaatcagttgaaagagattattaggctcagggccactaagggaaaactttagttcaactctggctgctgtgggggcagaatcctgtggatatgattgtacactcttagcattgacatgaggattgatgaatggatatacaccaaactataggtatgtcaaggtaggggctgttataaaaacatgctgggttagtcataatggcaaaccaataaatcaacagttggaaattctgttttttatttgacgcactcagaagacatatctccatgtggaaagatgaggagttttcttatgtccttatcattaattattccattttggaagccacatgcttattctatacattatcctgatagctaagaattgatatcagtgcaaagaaaaaaaaagtcaaatgccaaagaagtaaatccagttattccagagattgagatggtttcatcactgaacagcttgcagatagccttcagaaagtaatttctgaaatgtatgcaatgtcatcagagatgtgacattttaaaaataaaattgcactgatagactaatcaaaatccacatttctctgagccattgtatctgtcttcattgtcctcaccccctcttcatcttcatcttcaccctcgtcatcaccctttattatctcaccttcttctcattgccaaccacactgagaaaagtagatagagaggacactatctccaaagtaagtgagggcttagagagattaaggatcatccaacgtcactcaagtaagctaatggccaagagagcaataaccacagccctgacaatatatatactctttcctctagatcaacgtttctccccttatttcatgctttaggtatgactttgaaagatgaaataaatgagttgtatagtcttaattcccctttgttgctcagaaatatcctctgagcatttcccaaagaatccagaagagaagacttacttctgttagtaaatgtttagcctctggtcataactatcttcctgttttgtgcaagaagagcaagcaagaaagcaaa

SEQ ID NO: 113938 - DNA, 1019 bp, Homo sapiens
ggagaagaaaaagaaaatattagtcactccttcacgtctttaaaattcttttttccagatcaccttatgtttgtacaagttaaagttgaatctcaaatgcctctgaatatagtataaaagttttcacagctgtggtcaatatggttgcattattctttccggctctttggtgatgtcctgtattaaggatgtagtgttctgaaaaattgtgctcactcctgagactttaaaaatggagtcaacaaagcccaatgacttttagtcaacaaagaaactaaaagttagaaatgagcactagatgagagaacaatgccactgtaaaatactcttttttaaaaaaatacacgcaaagcttcatatgttaataccccaagctccaagatggccaatttatttttgaaacaagaaacacctgtttattatcaaccataacaataatatgtttaattttgagagaatctttttggcagttgttaataagccatactgtaagatttaaaatagttttaatatattctaatggacttcttataaggcatgagaaaatatatttagatgttttctttgctttcacgtaagttcagcattaaacatatgccttccgttaactttagtcattatttcaccagattgtacttaatgaaaaaaagaaatttaacagttgtgtcactttatcttaccgtgttctgtaactcaagggaaaaactaagacaggattaacagtgacccacaagtacagtatatttttgaaaaagcagttttcacttgtaatgagtataaactaaaacacatgggaagaaaagaatccctataggtaaaaacctaagaatggtcattcaattctacttcacttagttgactggactaattttttctgtattttctttggttgcagtatctacaattaaatttaaaaagctaactaaaatttaaaacacatacacattaaaattagcaattcaactaggagctctttttgaaaaagtgaaaaagcaaaaatataaatgtaatgtttgtta

SEQ ID NO: 113939 - DNA, 1034 bp, Homo sapiens
gccaataagagaagatgttggagaatggcatctagatattttcctgagcagttaagtggatagagaggtttcattcatggacgcagggaatgcaggatgagatacgagtttgtggaagaggactatttcagctttacaataggtgcttgtgggacatcctacagaagacattaaacaattggatatgagcctggctgaaaaccgaagtcatggaatagcataatttgtgaggtaaaccttggaagatggcagtgattatgaaagtcagagacaaagaaagaaggagacagaagaaagggaggacgagaggaagggcagctaagcaaaggaagtgacgtgatgtacagagggcagaaaaagggtaggggcatgactgagaaaaatcacttcgtcaagtgcaagataaaactcgagtggtctcctgaaataataggctgaggaatgggagttactctcaagtcagtagcattcaatgaggatttgaacatgggaggagcatttgcaaatatgtcattaggaagatttaactagaatatgggttggagtgtgaatacagaggccatgtaatagattattgagatatctaggatagttataatgagatttttgaaggagagtcattttgatggctgggtggcgtgatggctcatgcctgtaatcccagctctttgggagaccaaagtggaggatgacttgaggccaggagtttgagatcagccagtgcaacatagtgggaacccacctctacaaaacattttaaaaattaggctagcatggtggcatgcttgtagtccctgctgctcgggagactgaggcagaaggatcctttgaatttaggagtttgaggtcgcagtgagctaggattgcaccattgcaatctagcctgggtgacagaacaagaggctgcctccattaaaaaaaaaaaaggtagagtagtttcagaagaagtaaaaagaaaacatggatggaacagatcattgtgaaaatagaagtgctacaattacttctcattgaacatggtgaggaccgggaaa

SEQ ID NO: 113940 - DNA, 1115 bp, Homo sapiens
tcatcttcatcctctgccctagttatatggtgtttatttgcagttacttcaggtgaccccccacccccctcagaagacacatgcattgcattgatttgtgaaatgatccttttcaaaacattaagacttaaggaagatatttgcttaagagcttagaagttttgcagtgcccaacaacatacctattgttctattttttgacccaatttactaaagagaaagaatttcaaaaccctgaaataacttcaaaatttatacagtgtcaaaggaatgtctaaattttaaataaccgccttgtgtttaaataatttctatgatatcttcatagtgtcccaattaaagggtgaatatattgatcattaacggaggaatagacaggctggttgtgacgttgtaatagagtgtgtttgtgagtcacgattttagagacccagagttagtgatagaaaaaaaaaaaaactaaggtgtggagactgcttaaaccctgagcggcgttagatatttccatgtatgaggatggatgtcttagacgtaatggaaaatgagaaagaaaagtatctacaaagaggtagaagagctgtattcatattcttgtagcattgggtataaaaagcgacaaaagtcaaggtaaagctagtatgttcaagaagataaggaaattactgttgttgttgaatcatgggaatgaggaaagcattttgtctttactggaggaaagaccgtgggggaagagagaaattctaattgcagtctgctaatcttactgataaatgaaaagagaacactgatccttcctttcttaaagtattaattttttggtttgggtctgtatttagaaggtagttaaaatatggaatgagagctgataaagatatgttgttgatactggtattgtgatgtaaggtgcttcatgttttccttgtttctttataaaaatgagaggtttggagggattggaagaaagcaccggtgaatctaaaaattcacgaacattcagtcattcaattctcagtttaatggaggaagaggctggaggggatggaatgttctggaagaaaaattaaaggaaggacgttggactggaagcaatgcaaaaataatgataatagtggatc

SEQ ID NO: 113941 - DNA, 1092 bp, Homo sapiens
tcgatgactcttcgtcacccggagtggtgcaggtagccgcggggagaatggagtcttttgttcccggtatttttaattagatggattttttttttatgagtagtgtactgtcctaatccgtgaggcaaagctgcccttttgcctgcattcggtgacttttacgaattcgttgggagctagtcttagcagtagtgattttggataatttatgtctgaaatgtgcaaaaatcggcattgagcttaaattaataagccctttggttccattaactaaaatccatcatactaattgcttaatgggggaaaaggtacaaaataagcttgctcattaaagagcagtcttttgcctgcgaaatacgtagtgtgatttttgtcaggtttaatagagcagtctctcagagaaattcaactttgcagttgtgcttcgatgcaggctactcctgtgcaaagatagttggagatggtttggaaaaacttgtgctgtatctgttgaagtaaaaatcatttgccattgatgtgtgtagttcaataaaacaaagatctgtggcagctgtgggaatgagaaagtcacatttcctccctctcctgtgctggcgtctctgtctctctggaatatcttataaatgatatatacagctatatgtgcctgtgtcacaaagtcattctgtcttctgaaagcctaatataatcaaattcagtgccttaagatggtgtagttgaagatttgatccccttccactaaagtggaaatactttcagtaattgaaagcagattcacgtctggagttgtacaagccaaggttttcatttttaaaataaaccttttgttctctggttttaaatgtttcagagagccatccaaagacctctgtgtgctaattgttaaagtagtacttaagaaaggattgcaaatacccagagaaggcatttaagaaatcagctaacttaactaagcctccctctcagccgaatattttagtgcagcatgtactggtctgtgccccacattgttttgtttttgttttttttttccagcggactcccaggtattaaaatgcgactgcagcgttcaaaacactctaggcagaggcc

SEQ ID NO: 113942 - DNA, 1923 bp, Homo sapiens
cttcaggacatgatatctaaaatgagttgtttaattatgaggaaaaagttaaaagagttgtacttttaacaatgacagttgacatcaggaaaagatagaaaggcgcattccaaatgtttttaatgactagtttcttaacctgttgtattgatcattaataagatgtgaatggacgtatttccagagtatgacatggcagtttgatttcttagaaactgctcggtagccctgcattttaccttgttttcttgccttctcagtagtttatcattgcagcacattatagtaaatatggccataattcaaatgatattcttgttattatgtaaaagccctcttttataaaaaaatatttaaagtattcagcagatttttaattaccaaataaaatcatactaaattttggctgttgcgtcacgtttcttagatagcagtggcctagtgtggggcataatagaatttaattcttctcgaagatttagaaaaagaaaagcgacttcacatggactcttctactgatgtctgaacactgattttcagtgtaatatccttgtctaaacatttaaactaaagctttttgtggcttctatttactgttagtttttatgttcctacatatttttacttggttaaaggggtgcacaggatcttctggcatctggaataatacattcaatttttcacgggactcctttctttcataacgtaggcaagtggcaaaggaggcactgtctaaatacagtgatcctgataattaatgctgtaaaatagattaaaatgctgtatttcaggtattcattcccttaaaagggccaccagaacagcgttgctaagcacccgtcactactgcaagtaacagaaaatgacccaaattaaagaacctgttctaagctgtattcttgcattttctaaagttcatttcaaaagatttaacaagactcattcaattagtggggaaaaaagatctgttttcagctctgatcagcaattaagagactgggctttggaacatcagttctttatgtttataatttatttcgtttggtaggctttactttaaacaattgtgaataaagatttttaacaagccacctttctagcaatccagatgtaaatgctaaatacaggacaatatatttgttttaaatttttattaaaatgagttattttatagtaactttgcctcatttaaagaaagtttaaatttcacactaatatgatatattaatgctttattatggatttcttactctgtgaaaatctatatgtatacatgcacacatacagacatatgtagtttagattaaaggatggctgtaattattctatcttatcatagatgtgagtgctttagcacctaacacttgagaaataggatgttcttccttaaggatatttgaatgttgtgggaaaatggtaccatgaaggagatagaatggtttggtgaagaaagtaaataaataaattattaggagcagaagttttctttttagattttttttttggcaggggacggggggcgggggggtgtccagtaaactgtacccttctgggttagaccagaacttctaagtagttgtggccaaatggttagatctttcagtggcctggttcttagctaacacaactgcagtcacaaatacaagctgcggaacttcctggcagagagaaaggaatgaaaggataagggctattagaggagtgggagagaggagcaggcgggttcccaaaggttcagattaggatcattagtgaaattttttgctggatcactttgatctagacaaatctaaagcatataaatatggattttaagttatgaatgataagtgctattttggctataatcacgtgaagtgattcatatccagaaacattgactgttttaaagcccaagtaacacacttctttattctaaagaga

SEQ ID NO: 113943 - DNA, 1019 bp, Homo sapiens
ttcccctcacttaatattaaatagtgtttgacataaatgtcttggtttgtacattgaggaggcagaatatattacaaaatgtaacaaaatgactaatatgggactaacataaaaaacactttagtcttttgtggttatatatattaacttaaaatttgtaaaaaattaaaacgatgtgtggaagtttcagtgagttgttttcatcctggtttgtgcacagtgcctttttttccttaaccttaaactgcagggagagatggggcctgctgtctagagacctgtaaaatgtaatctggatctctttttatgccttttcttttaaataaaacaaaattaccttatataacaagtttaacattgttaaccttttataattatctaaccattatttcattttacctcctgcttcaaagttgtaaccttttataattatttaaccattatttcattttaccttctgcttcaaagttgtacattagcggagtagacacctggctgagctcttaaaagtttatttggctttcaattcctgtgatagtagggggcagtacatctccttaattatctttgttcagggaaatgctgaaaggccagggtagttaaacaaggccatttggatttgtgaggtcgaagtcagatgcaaggaaagtggttaaatgcattatcatcttattgagcccatcatcagtaaagtgaccttgatggaggtggaaaaagccatttggctattttatgacagccacccctgcttgttttatcatttacacatttttacatatggctttatcatattctttcttttcgttttcaaatattatttcctctgattgtagatcgtcagaatgaaggtgaaaattaaaattagtttctttttaatgatagttagagtttctttcataagtgtgtttcatacatcgatttatatggaaataccccttcattaaaaatgaaggtgatcaggttagctaaccattctgtatttgcttttaagggtcttttaatgatgatgattagtcttt

SEQ ID NO: 113944 - DNA, 1195 bp, Homo sapiens
ctccaataaaatggcattcttgcttatatgtttgaacaagtattgttcaataagaggaagagttttattaaacgcagtacaagagctaacgtttttggaaactccagttaaagcaattaagtgctgcatacaagatttttgttttcctaggcaaagctgtgaaacattactgattggagtttagcgtatgcttcactttatactgaattctcttttgttacaattaatgggagctgagtatgaatctttttatcatatgaaagaaaaaactggcccattaccaaaatacctaaaataatatttcatactttattggagatatctccttatcatcatgctatgaattatgtaacactaaaatctcagggactcaagatcatcaaaaatagttcgttcaggagagagtcacattttcttgatcagaaaggacttatttgtttaagaatcatttatttaaagaacaaattggatcaaaaggtgtttaaaatgaagtataaactctcattcccccactctgttcccaccatcagggcccaaattcaagctctcttcagttctccttagactaagctttccatttgggttgccctgccttctgcctgtcttttctttaatccagcctccacactgtcgtcacagttgtcattctgagttgtgttttatcagtcccttggtgaccatacctcaccctctactgctcctccactcccaccttcgcaccagtattttcgctggtcggtgctgcctgtgccccttccttgcatctcacagagtttccaagagctgacttgcatggtatttcttttttttttttttttttttttttttgagaccgagtctcactaggctgaccaggctggagtgcagtggcatgatctcgcctcactgcagcctccgcctcccgggttcaagcgattctcctgcctcagcctcccgagtagctgggattacaggcgtgcaccaacacacccagctaattttgtgtattttagtagagacagggtctcaccatgttggccaggctggtctcgaactcctgacctcaggtgatccacccgcctcagcctcccaaagtgctgggatgataggcatgagccaccgcacccggccttgcacagcatttcttgtggctcctcctcctctcgggcttccttagcacctgattcttatttctgtgagcacttaacacattatc

SEQ ID NO: 113945 - DNA, 1361 bp, Homo sapiens
cacctgatcttctctctcccctgctcagaaagtcagtgtcatatcaagaagatgcttgagtctgattgaagtacaggtaggcttatggacaagtgacaggagaaggcttttcaggtggagaggcacatgagcaagttttaaaaggtggggtatgaaaagtatattggagaaaatatcaaatgacctacttcgagcatgaagttcacgaaagagaattttggaagataaggttagaaaagtgggttggaaccagaacatggaggaccatgaatttcagatcaaaaggtttaaatgtacctttgagatccctgggaatttagcatagaaaacaatcacacagtagtacggtgtgtttgggggaagatctctctggtagatgctgttagatgaattataaaagcaaggtagtattaatagaagtagagaaacccatttggactcttcctactattactttcaattcatgacttcttcttaaacttattaagaacagtttaccaaagtaaacttcacaaaggcaggggacttctgttcactctggtatcttcagagcctagaacagtgcctggcactggttgatgctcagcgggtacttgttgaattgaatgaatgagacccagaaagaccaagtgactgttttgaattcacacagctaagatagggacagatccaggcctaaaaattgcactcccagtttgctgttttcttgacatgctaggctgtcgtacaggtcattactattagcgtggctttttctttgtcaactcttgtcaactcttaccctaaattcttctgaactcttcttgcaagtgattgcaaactgcctcatatcttacatactcatcacagcctcctctgagctttttttttttttttccaaattgagacagggtctctgtcatccaggctgcagtacagtggtgcaatcatagcttactgtaacctttaacttccaggctgtaatgatcctcctgcctcagcctccagtctggcccacacattgccacacctggccaatttttaaattttcagtaaagactgagtctcgctacgttgcccaaggctggtctcaaactcctgggctcaaacaatcctcccacctcaacctcccaaagtgctgggattacaggcatgagccactgctcccggcctaggatcttaataggttgcttttatctacagacttaatgggttgaattgtttattgttacttttttcagatggtaaatcccaggtcagagactgtcttctgcttgttttatttttcagcagccctcctctctgaacagccgcactcagaacgcctttgagtgcagaagctggttgactgattgcccagcctccaagtctgtcttttagtt

SEQ ID NO: 113946 - DNA, 1199 bp, Homo sapiens
atcccgaaattcttgttctcaattctagttctgaatgccaagaacacagctcctttggttaagcatctggacttcaacctgaccacttgcactagaccatagaataggatgtatgtagaatttcaaaatgaggaaaggagagggaaaaacatacattaatggctgctaagagaagagaaaagggtcatatccttggttactctttgccaaaaataaaaataaaacacattgtaaggaccaccatgcttttgagctcctgtagacaccaggcaaggatttgccataggacatttgtgtcagttagggtgtatccattatgtagaaagctctaaaacttcaccatgggaatgtgggaatgggtctgttctgagaccttttcaatgttgtaagtcattagagaactagcctcaaaccaaaactctccatgattcccaggtaaattgcaacacatttagttgcatagctctgaaacttttccatttgaatacaacaattaccgggtgttcaggaaattagatttgttgcaatattttaagtgatttaaatgaagatcagtattattttttagtatagaaatcttctagtaacagagtttaccacgtccgtcaatgtgaatacaattatatttgcctcgaattttatttgcatttgtttttctgcctattttcttgtggaaattttaatgagcagtgaaatgaccaaaagctgggccacggagaggaaaataaagataatctaaaacatgtttaattatcctcagcataatacacacttcactgtaatagggataatgcaagaacattcagattatctaaacacatttaaaaatggccttccagtgttaggagcataagtatgccactatgaattgtgtgtgtatgatgaactttcttacacagtcatgtgttgcctaaagacatggatgcagtctaagaaaatctcattgttaggtgatgtcattgtagtgctacgatcactgagtgtacttacacaaaccaagatggtatagcctactgcatacttaggctgtatggtatagcctgttactcctaggctgcaaacctgtacagcagagtactctactgaataccttaggcagttgtagcacaatggtatgtattggtgtatctaagcagaaaagatacagtaaaaatataatattacaatcttatgagaccagcatcatcatatatgtggtt

SEQ ID NO: 113947 - DNA, 1017 bp, Homo sapiens
gtcaacttttattttaaaacctcattaaatcatccttataagcaaaggtaattaagatggtgtcatttcattttagtgagttatagttctctggactctccctctgtcactgtttccaattagaatttctctaaaagttacaagagtagttaattttaattactaaaaatacctagggggaaatttgttgagtggactcttgaatttcaagggatttttgtcttgcaagtaaattatagagcagaggctataaattagttctccattctttttagaccttgaactttttattattctgcctaaatgtaactgtaacttccattttctcatcttaaaatttgcaaatttatgttctctatatttctttcatgattagcaagaggtctctgtcttacatattttttgaaccttactttctcaatttactaatttgtaatttctactctaatctttattaatccccttctttttcttagacataattatggctattaatatgctgctaaatgcaactttgtccccattccatgtgtaggtgttctttttaaaattgttctgtgtacattttgtgattgaatatttgattttctagacattttgatttttactatttaaaactttctaggtttaattcattgataacagaaaatgtggcttggatatgtaagctttttaaagatttgtaagggttttctttgcctcttacatagtgatcttcaaactttttgcttacatactcactaaaagaatttgatgaactcaataccctcctacacattttaaagttgaagtcaaatacttttcatcacaagtaaaaataattgcaaaggattaatttccagtgtatgacaaatattgatattttaaataaattgttatatcacaatttttttttaagagagtctcgttctgttgctaggctggagtgcaatggcatgatcatagctcattacagctttgacctcctgggatcaagctatcctctcacctcagcctcccaagtagctaggactaaag

SEQ ID NO: 113948 - DNA, 1268 bp, Homo sapiens
agcctgggcgacagagcgagacttcatctaaaaaaaaataaaataaaataaaaaatttgtggccaggcactgtggctccgcaattttggaggccgaggtgggaggattgcttaaggccaggggtttgggcaacatatgagaccctgtctctacaaaaaataagaatattagcaaggtatgttggcaccacctgtagtcccagctactctggaggctgaggctggaggatagcttgaactcaggagttcaaggttgcagtgagctatgattgtgccactgcactccagcctgggccacaaagtgagaccctgtctccaaaaataattttaaatataaataaataaaattgtattggaaatgtatctcctgatgagatgaggtggtaattataattgttcgtggctctttgatttgctgctctagaatgggcattgcctcatggtaagtttctaggtagatgagaaaagaagctcttctgtaggtaccagatcagccaagtcaatataagggcctgaaatgaattcctttgcaactgttcaggcttacctaccccttagaaattttttactcacaggattatagataccatggcttgaagaccactggtctaatagatggtacatttttatgtatgatcatattatgattattaatgcacttgaaaatattcttatttgtaggcatcagcatttgctctctatgcattcaaccatatttaaatgtatgatttagatgagtgagtgtaattcagctagggcactatttagcattgtggatgggataattcctctttttgagaaactgtctcttatattttagggacatcacttagtctaagtatccttagaggctaacagacattgtggcaactcaaaaacttcacaccccgtttccagacattctcaggcaatgagaactgtcccagattgaaaattaccgacataaatcccaaacatcctttttaagcctgtttgcttctttagaggtttaaaagacctgttaaactgttttgtttctgttctttgtgtgcatatttcttactgttttgctttattgacacatagagttcatgcctattatattttcattgtaggctgtaaccttaatatatatccttttttatctaagtgaatgctttcttctatcataattctattttatttgatattaatattgtatccccttctttttaattgaacttacctggtttatgtgtgcctctagctttgcatttaaccttcccattatcgctgctccctaatgctgtt

SEQ ID NO: 113949 - DNA, 1050 bp, Homo sapiens
aagtgtgaagacactgtcttccgtcttttgccgtcatcagcgttccaccttcattgagaccctgcaagaccctggcagccttggcttccaggcatggtttacaccatgtgaaagcaaacaagtaaacacaaatatcaagcctaaatttattttttatggtcacagagttcctaaaggttaaaaactttcagaatgggtctgcatagggccctcccaccggcctcctgaatccctcctccagtgactttcctgtcaggtttataatgtcttttcgttctttatttcttgattgcattctatgattttcccctaagacaagctgtatgattaaattacccaagtttccaggattatacttttctttacatagcacaagctgtttaatacattttgtatctgagatgcaacaaatcacatctgagatacacagataaacagcagttcatctactttattttttaatacttatttttaataatcaaataaaatcatactttatgtctttaaatcatatttttaattacagaaagtgaatattgaaaaacaaagtaaaaaataatgaataaaattatgcagatgctctggaaaatacctggagagaacctgtgactaatttggtacaaagcagaacaaatgttaatttagttatagattatatatacttttatatcataccaattgtcaattttacacatagtgagaactgtttcaactgtaaaatgtctttcaggaacaaatctgaatattaatttagcttacttgtttctgtggaacttaaacacttttgcacttttctttagaattttgaattttaaaaaattaaaaataacttttgtaattgaggtaataatcctcatttgtagtgttgaaaatattattttcatactactctcattctttaaaaataaacactaaaaataaccagtccagtaaaattaaagaattagtcaaattttttctaatgtcatgtgaaaatttattgactattttattttttgaaatattagtgccattgtagtgccagttaaaatatttaatggttgatgtacg

SEQ ID NO: 113950 - DNA, 1024 bp, Homo sapiens
aacctagttattaatatgcttatatctatattgtagattttttgtatgttcctatgaacataatacatacattgattttatttgccttttaataacatgggcagaatgtaatgtggaaggtaccaccactaattgtgattttaaaaaaattacccttcagtgtaatcctgcaactattattgtggaatatatcaatatgattaaattttggcattgcagaacagaatcttcactgcactgtaggttagaatacaagaaaaattgaaaataaaatgagaaaatttctttcttaaccttttgcaattttagtataattttgctaacctgtgaaaatgtctacacataggcattgtcttgtacatggcaagacagcattgtctctgacacacctgcattatttgagatgtatgcattcatgtcagttcttttcagaaacagtaggtaggtattacacaggaatatggtctatttttatggccttctcccataagatgccttctttgtaacatatcacagtgtacttaaaagaggtcattaaaattaaaaagatccaaggaagcagttacgagtgtagaccttcaatatatgaattaattttggatttcagattccttttagatttgttttagctctctacatgtcatatacttaaagttttcattgaaattaagaatattacccaaattttcatattgctttaggaatatttacaggaaaagaaaaagaacatgtttgttcttcagctatttttttctttacggagcatatcatcaccacaatttcatattcaagctttaaagcagaactcattaatgcatgtttcatatgcgttgccaaaaatacaaaattgttttcttgctttatctagtgctgagatttttagctggactaacaacattgtgtttgtctctatggcacattatcaacgtgtctctgtagcagaaatagtagatggttggaataaatagtagacgtgcactggtgtgtgtttatgtttatgtaacagtaccattttccagagcta

SEQ ID NO: 113951 - DNA, 1049 bp, Homo sapiens
ttggcagtcttgacaggtttttatttgtgcagtggaaagaatttgatcgttaagggagactcttaaattgttaagtaaacatattcacttttggagccagaattttattttgaacgcatgaagccttatgagaaatagtacattttataatgtgctctaataaagggaaaatgtgtcctctcaaaataattgaatttcttctctaattttttatgtatatgtgatctctaaagctacagttttataattattcttaccagacaaatattactctgacctaaaatgatttagagtagaaatttccaaaccagtttagtatctttttaggaacagtgaaataacctttggttattttagtagtaaattaaatattcagggtttgtgtggatttataggacgggggtaaacatgccaagtcacatagtgggcatgtgtaaaatatttagactttaatagaaagaaaaaccaacctgtattgagttataaaaacaccatactgttgaaatgattgatggttttctcatcacatgtaacagactaacataatttcatgaaacctttgcttaccgcttacaaattatccaaaattcttttgcagtaaagctaacagtatgtgctccttaagcaaaacattgcctatttcttttcttttctcctctttcttccttactccttcccttccctccttattccttccattcccctctcctcctctcgccctgttccttccctccctcccttcctttcttcctccctccttccttttcttcccttcctcccttcctcccttcctctttctttcctcctctctcccccttctgggatgttgccttaatagaaataacagtctactagagaaactcaaaacatgtaaaaaatattatacaaggtagaaaatgataaaatgtgtaagaggagtaaagaccaaattctgttggagaaagcagaaactctcagctgggaagattaggaagggctttagtagagacacatttcaaaggtgtgaatgtcttaattctcactatattcctctagaaactcatgaccac

SEQ ID NO: 113952 - DNA, 1074 bp, Homo sapiens
tttatcctcctctaattcctagtggcactatacattttaatagtatttgaagccacgttagaattatgacagcatatgttaaaattgtgcaagtggttcagtaatataagctaacatttcctgaaatgatttaaaaatctggcagactgcaaagttatcctgataaggaacttggttttgattacagtaatgagatatacgggatggtgtcagaaactgtcttccagttgacacaataatccataatttatagattggcttaaaaattaaaagacaaagtcaattataactaattatgatgctacatttgctcgaggagttactatatcctttgggataaaggaagtaatattcatgtcagtcaggaatctttagctacagtttcctggttctatcttaagaatttttcagtttcgtttcatgagaatcctaagccactgaaagcctgaaaccctgctatttttagaaatactgtagtagcttctgtgtatcactgcacatttgttcctattctgaacttcttatctgtgccaaatcttcagagaggttactggaagttttgctcgatgactgctgaatcagtcagaagtgaattttaaattatgcaggagaaaataacaataaactgagttacagcatcaagatatcattgttatttctgttgatactggtttcatcacttgataggatttaaatacccagactattgcatatttactaaagttttatttcatcatgtcaacatttttttttttttacagtcaaaagccaaattgtcagcaaaggatattacaaggataggtatttttagcatcttttcaagaagtgaaaggaaggagtggtttatatttttctataattttatgccatgagacgtgacaattttccatcttaagaaggacaattagttcttagaaggaaagaaaaatgcattcttatataaacttcctagaaaatttagtgagttgataaattcctagctgcatatcaactttctactcttgtggccttcttttgtgtgagctttgatcatcaagcagtttctaagtgtttttgaagcacatgtgttgcatg

SEQ ID NO: 113953 - DNA, 2799 bp, Homo sapiens
tgatattaatgaattatgacaagccttttgcctgtcaagcagaggttcccgccttcctcctttaagacaaaaacttaatggaagatgctcagatgcgcgagctctctgatgataccccttaagtgctcttctctttctgatgcgaatattcagagagccgtgaagctgcaagtggcagcatttaatattgcctttctcataatgcctgaataattttccagagactgatctctgcagctgctgtgaacatggttatttgtttatttttcaccttggtcctggtggaatgctgacctagccaatcttcaggactcacagggaaaatggtttcagattcatagctctcatcttttctttcaaataaacacaaaactgaagcttgtgacgttgagtaacagaaaaataagagggactgtttctttagtttcctttaaaagtgaaaaaaaaaatgactgtatgaatgaagaatttatttggtgaaaaatgaagactctcttgcatatttttaatggatatttgtgagaggaaaggagaaagcataggctgttgtggtaagctatagaatgttttcaagatttccccccgtagtgctgctcattatgttaaacagtctagcttttagctactgtagttttcgttttatgtgtattggccttcatttgctgaaatgcttcaagttcacagtactaaagtcattttgaaaacgggatgtaattacaaaggtatcttatgcttaccaacagcttttttggatcaatttaattatcattacttgtggatactgtaaattgaatatcccgtccctaattacattaaactcaggggttagctgcttaaacgtctaaatgagaaaagttcatcctttgctataaataggagaattgttctcttatttagactgaccttggaagctaagcattttacatgatattgtcaggtgagcattataaagacagcctgtaatgagatctgtaatgaggaactaaggtatagtagccctttgaaaagttaatttattcagcattttcttattgcatgatagaattaaagtttgtgtatatgtccggacccctttttaaaggggccagtctcactgttcttggtttactcatattctgccagtagtttgaagtgggttagtattactattccaccttaatggaagtcaccattaaagtagtgaattcatcttgcccttttaaacagagctaatttatttagggagtaggaatgttattttccctaccttctcctcacttccttttacagaaatgatatatcagaatttattcaaaccactttaagcatacattttcctgagaggaaaaaaaaaatgcctttagacatcaataaactggaacggcatttccctgttctggaaaatcagcctttaattagttgatgtgtgtgtcttgggttagtatttgttgtctgttcagctcaagtgatttttgtgctttataagaaaacggattgttctggtgggagatttgattgatttctgcttgttatagtcattgtaaattttagtgccatgcatagctacttgcttttatttactttgttttctttgtcaattgtagcttcattaaaaatctcttatctgttcacagtggaaactcttaaaaatgtaagcgtaactacttatttccatagaacagctcctgctgagtgtgctttacgatttatcataaaaacctgtaaggacaaattgaggctggatgtgctaggaaatgaagccgtccctgggatcactagaagagatttctattatgcaaaagaagtagctaaaatgattgattttgagacttcagtcaaaacataccctgaatgttttctggattttctaatgagacatattgtagaatacaccagaataacgtgaaaaatgtagacttagtagcataaataattaacaagtggttttgggctctggggtttccaaagcaattccatgttatactaagtatactgggagccatccacttacagctttttttttttttgagacggagtcttgctctgtcgccaggctggaatgcagtggcacgatctcagctcactgtaacctccgcctcccgggttcaagcgattcccctgcctcagcctcccaagtagctgggactcaggcacgcgccaccatgcccggccaattttttttttattttagtagacggggtttcaccatgttggccaagatggccttgatctcctgacctagtgatctgtccgcctctacctccaaaagtgctgggattacaggcgtgagccacggcacccggcctcacttacagcttttaaaaatattttcaaccatactaaattccagaaatttacttttagtgtgctatactaaataacaaaacaacaattctagaaaacttgaatttaagtatagtgtgtcttttaatatcttttaaaactagttttctaaaaatatggaacattttacacatatcactttagtggttaaagttatgaaattgaatgttcatacaactggcagttttcctcatcaattcaaacaggcagtgagctttggatgaaactacatttctaatattagaggactaatcataggcaacctaactttttaaaaacaggcaacaattttatgcttccgatacaattagatacagttaccaatcatatcagtccattagctgtcaagttttattcttcttcataaaaagcaatcagaggtagacatttaaacatagattatgtagacacgtgatgtatatatatatgtagcatataccccatctctactaaaaatacatatatatatatatatat

SEQ ID NO: 113954 - DNA, 1989 bp, Homo sapiens
tgcaggttggcagtggcattcctgggattggcaggctcaggtccacacatctcatttcaagatccaggtaatttttctggattagatggttttcacggtagagggcagaaactcaagggaggacagagccaaatttagccaatgcacttaaagcttctgtgtagctgtgacacaccctgtgagcccatattccataggtcaagacaaattgcatgggaaatatgatgaggaaagaaaaaataatgagtaattcaacctactacaccccagatatccacgagacttactccttacttccttcaaatctttgttctaatatcaccatctctgtgatgccctccctaattccaccctatttaaagttttattactcttctattttctgtttcccttccctgatttatttttgttcctaacacttcatactatctgacatattatctaatttacatatatatatatttttattttatttactgcctttcccaactagaatatttgtaagcaccacaagcccagagatgttggtttttgtttattactgtgtactcagtacccagaatagtgcctgacgcccggaaactgctcaaacatatctaaatatcccttccttcccatggaacttttttttttttcttaaattttaaaatcactcatcccctgatgaatctgcatccattttctttggtttttgtggtttataccttcactattattaaaggctctgtgcagagagagacgtaaatgctttttatcaaattagccattcttaactacaaatctgacttcttaaatatttattaaataaagaaagactcttgatttaatgtgctggctttcatacaaattaccaaatacagatttgattgggatgtttctccagagttaagtcctctgtaaaagtgttggagtaaatgaattacttagcataatagctatacaagatatgttttggttggtgatgccaccctctgtgaataggtgatttcttgtttgtccttcatttgaaaaagtaacataatagtcaacctacttgaaagcgaattagttcttattcgcatgcgaatgaagaggcctaggtgggattaaaagcattttctattactgaatacatatggcgttcgtaatttgtattcaaagacctgtttgctatttttggcatggcttccaacctcataaatgcaaaaagcagctccacttcttatagcaatatgccagcctggtctgtcaactacagttatttcccatcagttattcatagtcttagactttgtttcagtaaattgttctgcattgtttactgccctcactacttattatctccccagcccaggtcataatacaacagatacttgggtatcatgatgttatatattcttttccaactcagcatggtgatattgggagggtgatcttattcctgtttttcatatgggagattgatgaaacttgtttttcattttttattacatcataatacttatttgctgacaaactcatcaggactctgagggagccataaatttgtatcagtataatcaatattgatggaaacactttgaaactcctcctgtagaattagagtcagcttacaagccacattacaatggtcttatgattatataccagactcttagttctatgttaatttagtatgaatgtctatataccctagcatttttttactccaaataatgtttatttcccaaaataaatttcattctgcaaagatgaaaatctgtatcacacctaaaattgtgcaatacagatcttaaaactgccagatagcattccaaagtgcttactttggaaggaaaataattaaatgtctaaattattatacatttttttaaagatttctttattgctgtaattcttactgcttcctctgcttttccttttattttattttattttactattactattatttttttgagacagagtttcacccttattgcccaggctggagtgcaatggcgcaacctc

SEQ ID NO: 113955 - DNA, 1034 bp, Homo sapiens
atggaattatccgttatttttaacatattcactctaatgcacatggatgaaaatgactgtgataatctagcagggatcctttgtgttttggtgaagcatgtaggtccgcatcctgcagtctagtataaatggatttcaaaccgaatttaatgaaaattacctttgctgacagtgagcctgagacacagatggtcactgtatcctcagatgtgtttaactccatttcagtggggccacctttgttgtttataacttctaggtatagattcttgtgggagttccaagatttgttttaagcagtttttcctttcttaacaaaaatagtaagcaccatataatgcttgcttcgtttcagtgatattttttcattcttcactctctcttgcacatttatttgatgctcaagtgatgatatacaaatcactgagaatattatttcctagttttctggaatattagaaggacaatattacatagaattttactttcacatatataattatttcaataatgttgccagaagaattgagtatctcttctgaacaaatgccgtgtctaagaacaagaaggatagaattaaatcaatgaggggatggaaagtaaaaaatgggtcagacgcagtggctcacacctgtaatcccagcactttgggaggccaagacaggcggatcacctgaagttgggagttcaagaccagcctgaccaacatagagaaaccccatctctactaaaaatacaaaactagctgggggtggtggcgcatgcctgtaatcccagctacttgggaggctgaggcaaaagaatcacttgaacccaggaggcagaggttgccatgagccgagactgcgccattgcactccaacctggacaacaagagcaaaactctgtctcaaaaaaaaaaaaaaaaaaaaatgtagggagatacaggtatattgtttgtaattcagatctaagattatttctgaacctgaaccagaagatagacatttgaaacagaaattcacactgtcagttaagatcttagttgtgttttt

SEQ ID NO: 113956 - DNA, 1049 bp, Homo sapiens
ttgaagctttagtgccaaaaaaaaaaatgtaaaatatgtcaattattgttatgtattgattccatgctaaaattaatattttggatctctcatattaagtaaactgcattattcaaattaatttcacctgcttttaaaaacttttaaatgtgggtattaaaaagttacgattatgtgtgtggttcatttatatctctgttggaaagagaagaatttgaaaaacaagaaagaaaatgaaactcacatcccactactcagaaataagcattgttaatattttcatatactcccgttctgttatttttaaggtagaaatttttctttccctctccacagtttatttcagtatctcaggaaacatttgtaggggcaagagaaagcaaccccaggaaagcttaaaatgcttgcctgagacgttacatttgttaagtgaaggagctgaaatccaatcccatgtctttctgagaattccacttctatttgcttccaagacctgtgctctttctgctgtagcacagtacatctcttcaaaaacctttacaagaaaaattaaaagatgacttacagtattacataatccaaagtattgagcagaaaagaaaactcatcagggcctgaagttttacatttttatggatagttttatttgggaaggaaatatttctatatttcagaatttctaacggaatttctaaacattggtgactacttatgtttatacagttgttgtatttgggaaaaaacctctgtatttcaaaatttctaagtgaatggctaaacattggtgactaccaatgtttataggattgtttgtaatttttttcctaaaatttattgaagaggtataggtgggcaggggatgctggatatagttaatgttggctgttaatgctagcaattattaataggtatgtatagaattaagcaaataattgctttagagataattttttaaaaatgaaatttgaaggaaaagaaagatacagataggaaggaagaacgaaaattgtcttcgtttgcagactacatgatcttgtcttagaaaatct

SEQ ID NO: 113957 - DNA, 1025 bp, Homo sapiens
cctcccaaagtactgggattacagacttgaaccgtcacacccgacctgacaaacctcttttaaaaccaaactcatatttgtaaatccaaactcagagtcattgctttttaagacaagagggggccaggcacagtggctcatacctgtaatcctaaactttgggaggccaaagtggatggatcccttaccccctggagtttgagacatagtaaaactctgtctctacaaaaaaaaaaaaaaagaaaagaaaagaaaattaaactacctgggcctggtggcgcgcacctgtggtacggtcccagctacacaggaggctgaagtggaaggattgcttgaacccaagaagtggaagttgcagggagccaagatcacaccactgcactccagccttggcgacagagtgagaccctgtctcaacaacaacaacaaaaaagaccagagggaataaaatttcatgtgaggaaacaaagacccaggaggtgcacagtaattttcatagtcacagaggtgggccctagtgtccttgagtttagcatctgtacctgccgattccctgcctctgccttgagtaaggaacgaatttagtagtcaggaaatttatgaaagaattgcccatagggctgttccacaaagtggactccatagtctattaaaaatatgatcttaaaaattaaaaacaaaaacaagctatagcagctgctggttgcagacataaatttaatcctcacagccatgctgttggatgcatattatctccagttttacagattaggatccagagacttggagaggttagttaggtgattaacccaaagtcatacagtaatagttgccaaaacataaaattcagcctatctgacttcaaagaccaaacactttccatcacactatgctttctctcctttatacttttcaaaaaatccatttctgatgaagcaaagcacatgtatgtgacttacgaatgtaatgctgctatagagttgtccagaactgtgtgtatgtacacccgtccctctgacatctgc

SEQ ID NO: 113958 - DNA, 2878 bp, Homo sapiens
tatctttctgtttcgtgctccattactccctaaaccaaattctcagcttcagtcaagtaaactatttatttaccattcccggagcaggcactttgctttctgctatttcttggcctctatacttgcaaatgcttaacatttgcatgtagaatgctctccttccttctcaccatgaaaacgtcttctgccctttttcaaaagttttctatgacaccgtctgcataatctcattgcctctagtaattctacattttccacatgtgtttaattatttagccatgactagttacttgacgttaattttctatcaggtttctgtggatacgtttgtgtccctgtctctgtgttttgttcatgctgcagcgtgttaagtttccaggtaccccatacagtgttctgtgaatgtgcacagatgcaaactgaaatatatttatatgaccatggaagatgattgattcatcttgctgctcactgactgctattttggagagtgcattgtttgtaatcttcccagtgatttaactgtttttattaagtgagggctttaaagcacttaccatttgcttttggctgttctttttgaacaggagtaaaaatgctcatagtgcttggcaattgaatgcttaaatatatacattaattagtctaatataagcttttagatagtgttttttatgttcacgttttgggcaagtattcaggcatccgcacgtctcttctgtttaccaaaggtgtacccaggaagagtttgaagaaacaatgttattaacaattatttatggagttcccagaggcacaaggcatttggctaaatgcttagaatacaatagtaggcaaattcagaaaagggagtttacaagctaacaaggcatattaatgaaatgatcacacaaataaatgtcaagtcaccactcaggtcactcagggaactggtacttaagcagagatttgaagggtgaggacatacctggggacggaggaaggagagaaagaagaaaatacaggtaaagggtagagcatatgcagaagtagcaggtgggagcctgacatgtttgaggaattggaagtagatgattgttgctggaacacagagcaaagcagcataatgcaaggtgagctttgtttaaggacttggatctttggccagaaagcagtaaacagtgctgggggttagaaggatgtgaccagattgctattttgcattattaccttggttacaatatagagcaaattggagactgcagggaggtggtagtggagttgaagagaagtgggtgggtgttggaagatatttagagaatactaatatagtatggatgtaaaagcaaaggaaaaggaggtttccaagatgacagctacatttatgatttgcaggaaaggatggctggtggtaccattttctgaaagggggtatgctaaaatagaacaaggtttgggggctgaggaaagatccttagttctgttgtgaacattctgaagttgagacattttgcagcattcaagtggagatgtcaagccactagatctgtggctgagtagctcaagggaaatgtcaaagctatggatatcggtgttataaagtgatcattatatagatgataactgacactgtgcgtatagatgagattgcttaagaaaaaaagcatagattgggaagagaggcctgagtgattctgtatttcagtggcttagtaaagggacaagaggctacaaaatagactgagaaggtacaagcagaagggcatggaggaagtgctgagagatgaagagtgcagagtccctgcaggcaagagaagagaccatttgaagagggacctaatcagtggtgtagaaaaccatcaaacatcaagaaagatgaaaaataaaaatgctctgcttgattcatttacgtggagaatactgatgagctagcagtgacttctccggagggatgggagtggaagccagagtggatgaaggagtgagcaaggagatggagacagtgggaacagagaactcctccaagaagttcggctatgaataggaatgagaggaataacatggtatctgtatgttcagggaatattttaatgtttttaaaattatagagaattatgagtgctcaagtgctattcagatgtagaaggaagatattggatgtgtaaaccaggtttgtgatcatcaacaaaccataaggatcattcgaacgatattaaattttcgtacagcattaaaatttctcctctaagcacaactattaacttcattccttcattcagcaaatagttattttaacactttctatgtgtcatgcactgttctaggttctgggaatataaatgtgtataatatttactgagatggagaagattcggtgtgggtgaggttgaatttgggggaaaatcaagaagtttgttttggccatgttaagtttgagctgtcttccagacacccacgtggagatgtcagatagactgctggagaagctgactgtagagtgtggcagatgtgaggacagggaccttagtgtccttattgctgtatccccagcgtctggaacacagacataatttgacttgagcactcttcctaatactcctagagaacctaattgatacaaagtttactgtgggacacaataaagaatagaaaacggtaaatctaagattgacaagaaagtttgatttgaatgtaaacctttgtaaccttagccctacttgtagcttttgttcattttaccttcaggcctctagcatttcctccataagttattatgaagccatggtggagggaggaagagggactaaaattcaagatgttgtatagaaaaacaagaaattgctaacagagtattcgtttccaccagataaaaatttcacttaaggccaggcacagtggc

SEQ ID NO: 113959 - DNA, 1064 bp, Homo sapiens
ttacctgggacacttttttcctctgcttgaggttttcagacacaggtaatgtaaattcaatgggcaaacccatttgagggctacctcttggatacaaattcttgaaggagatgtttttctttctccacctagagccaaggtcaaggcaggcaggtttctttgtgtcactttatatagggtagttttgttatagtttccctatactgagagcacaattctttgggagccttgctttatggaagggtttttattaaactctctactttcaaagggacaagccctgggctttatcttcaccccagcgttccgtgtactctttcatgatgaagctcgaggtcaagtttcggattcaccttgtttttggcctcttagtatactttactttcttacaaagtcagtgagatgagtaaaaatgattctatacaattttttatcctttatttaatgttagcaggagagttgttcaggtgtctactttccatatcactgtaaatgaaagtttaagcttttaactatgcattaagctgttgaatcctcacaacaattctcgtggtagatgtgaagaacacacgggttaaagaggtttgtatgactcagctaagatcatacagccagtaaaaatttgaaaaggagtttgaacccaagccgtctaactttggaagctatagcaaatgttggtgacataacaaaggagttcctaacgaatgtagcttgtgattgacctatatctttcctactagaaggaacaaacacaccagtaatgactcgatggatgcatggatgcaaggatggagggatgcatggatggatgcatggatgcaaggatggagggatgcatggatggatgcaaggatggagggatgcatggatgcatggatggagggaagggagggaggaagggaagtgtctcaacatagagaccaggagaagaaatggcactacagagtgtatttatttgaacaaattcaataggagaaagaagaaaggttctatgtcaggaggttcatgcaattattctgctgcatctggtagggtcattgcttctatttggaggttacatgtat

SEQ ID NO: 113960 - DNA, 1057 bp, Homo sapiens
atcttcaatatgcatatttttacaaaagaaatatctcctcttccatttctagatgtacctcacgtgattaattctcatgagtaagcagagatcttgacctgtagcttcttacatctgcctatttgtttagcagaacagagaattacggtaaaacagaggcatggtacaagcgtttgtgtttgctttacaaacacgtctcccaacttagtacaaaaaaacactgcaaactcttaattttagatcttcttaggtttgttgtaaatagaaagtagagtataatgttttatagatttatttctaaactatattatggttacttttctcgtgcttttcagatatttgagaaattgtttatgtgctgtcatgaatatgaattcattattattaaatgttaatgaataattttgcttcaaaataaaatagtgagcctgtatactttcacttgtatagtgtcctagcccatattttaattttttagtttttccctttgttttctttcatgtcagcttcttcatctggtccatcagttattgaacatattacgtcacctccgccccatcccatcttcatgacaatcagaggaggttgctaagtgctagtttcatccaggccattttgtggccaaacgctaagcacactaccagttctatccaatgctcactcactggtgcagtttccatttgagtccagccctatagaaagaagatgacagctttcggttttcatagtttgactaaactatctttttgtgtcatgtaaggaaccaaaatcatattttaaacttgctccttgatagctccttatttaaaattttctgggaatgttttatcactacagatattaaggcatggagaagaaataaatgctttattgtagccacagaaattgttttctttttctaacccaatcatttgccatctctctgaaaaaaaattccaaggccaggcacgatggctcgtgcctcgagtcccagcactttgggaggtcaaggtgggaggatcagttaagcccggtagtttgagaccagcctggacaacaaagtgagaccccatctcta

SEQ ID NO: 113961 - DNA, 1025 bp, Homo sapiens
gtcatttacttttaccaaatggaaaacagagatgatgtggtttttttctctcttacttggcagcccagcaataacttaactaagtgagcagtagcctttttaaggtaagatagaattttaaagtcggctccagatataattctaatgtgtccggtgacactgcagaaaatgtaaatttccctggaaccatgtattattctgggatgtgtgcatgtgtgcatgcttgtgtgcatgctggtagatgttacggtcaagtaaaatgtcagcacagtaattatagaccaaaaaagttcacttcaaagaattaatactgttcaaaggaaaattcacgatttggaaactcacaaatgtaaaactaaagcattttcttttcgttcctttccattaaaagttgagaggagtagttaccactctaggatgaagtctataatagcataaaaatccctctggataggaaagagtgtgttgtttgagttttccagcccatctgatcggatttcagaactctttaagcgcttagcttttggtgtttttgggattaggaatgtgtgttcttgtagagagttggaaagcaaatgttaggcttgtcagcatctgaggaccgcagaagcagtccacccattgttcgagtcacgcttccagggcccagcacttttcactgaggagcctgcttttgaagtgttttctttgcttaattttctccacctttgagatcctttcagaagtattttctttcaaaatatcatgcattcttctttagaagaattggcctttctaataatacaaagaaacataggatacttgtaatctgtcaagtagggctaaaaacattagggcattaaggacagatagaataagggttgtggaagaagttttgcagtcgcattataaattgacttttttccctttttaatttagtctgactatagagaactatatctaggcaagaaaataagaaatgttgggttcatttagaaattgcaattggttttttcatacgtaatgggaaatcaaaatggaaatgc

SEQ ID NO: 113962 - DNA, 1030 bp, Homo sapiens
gtacattttaaaataattgaatataattggattgtttataacacaaagaataaatgcttcagatgatggataacccatttaccctgatgtgatttattacacattgtatccctgtatcaaaatatcttctcatgtaccccacaaatatatagacctattatgtacctataaaaattaaaaattaaaaaaaggtttttttttttttttaaaaaaagagtaactatccccacaacagtacatcacaatcacacacacacaccctgaatcctggcagcattgcagtacacaggaatacgttacttgaattgaaactgcaaaagtagtttaatgcaaacacacacccccacataaatacacttttatttattaaaagacaaggaaactaaaaaactgaagtatgaaggccaattggaataataatgtgtgttttacaattttttctcaaatttcctctttaacattaactcgagagtagattccattcccaaggtgattcagccattcaatatttcaaaactttcgttattccctcgagctcagtgccccctctactgcttctcctacaaacagtgatttcccagtaatgccagcagaagcaacagtgaagctaatgcagtcactctgctagggaagagaagttttcaagagaggcaaaggcacagtttccctttttctttcctaccagttaatgccctcagtgggtggtcatgcctgctctgttcttgaacaaaggacttccttctcaggagcagcaggaataaaaccgacaagtatcacatctgtttcatgctgcttctccagttcccatgggatagcaccacgtctatagcagcagttctgatggtgccacagggaaacaaggcagtaggacatcataaatgaacagatcctgcttgaatgaaagagaaggggaaaagaaaatactaaataacaatataatgaacagtggagaagtaaaagggcaaagatacaactcctcagagaagacaaatgttttagagatagtctctatttggtgtaaggtctgagt

SEQ ID NO: 113963 - DNA, 1043 bp, Homo sapiens
attaacttgtattttaacagatgaataaatgaagtcattcctacacattaaaagtatcttttgatctggaacaagtaagataaaatgagaggcaaacatataatgagtgctttcagtgagtaaggaatacactaggaaaaaagctgttacaaatatcctaataatgcctaacatttctctaaacccttattgattagaaaccattttcaaagttatagtttttattgattattcttttgaaatagtttgtgtccattcttttcttcctaaaggtatctcttccatgcaggtcttcatggttcatgtttcaactaccaccagatccttcgctcctgccaatcattcctgccccagtatgttcttcacctcacttgattttactaaaacattgcttggatcacgtcatcataaagaccttaggttggaaagagcctcaaatgcagcctctcgcctggctcaggaatcttttcaagaggatccctggcataagattttcctgcctttttgaaccattggatagggattcactgctttctgaggcagcttgttctatttttagcttaaagtatcagaaagttccttcttttggctctactgaatgcttctctttaacttccacacaaaatgaatccaatctttcttttatgtgaaaacctttctttaaaaaaaaaaaaaagaaattgtataaaaaatagagacgaggtctcactatgttgcccacgctggtcttgaactcctgggctcaaacagtcctcccgccttggcctcccaaagtgctgggattacaggctgtcaccaccatgcctgggcagtgacaacctttcaacaaatatgagactataagtcttttcacctcaattattctcttcaccacaccgaacattcccaattcctttcttggtgttttcgtttgtttttttgtttttgtttttgttttgttttttttttttttggtccaatatccctgagaccaccacagttcttgacacacggtaaatattgaaggcatatttgtttcctgagttaatgaatggctaaagtgc

SEQ ID NO: 113964 - DNA, 1060 bp, Homo sapiens
tcttataattatggttcagaagcagctatctcaagtcctcccgaaggatatagtgtagtgttgccactatgttgattattcaaccatagaatttttaaaagtataaagccaagtacctccaggaatgaccttaattattgaaattagcatccctcataccaatgatcatttaccagtatgttttcaaactttctatcttaaatcacagtactataaatttttatagtacccttttaagtatccagatttctctttattaagtgaaatacacagaaaacacatttcttgcttgctatatgtagcaggattagacatctacagcattatgctttcaagaaaatttttcttgacattgtttaagaaggagagagaacagtgagatttccacatctgttaaataatcattagcatgtaggattgaattctgtcttctttttcaacctaagaccagctgttgaagtaaactagaagggccccttaattattgcatatttcaatagcttgctgaggattcagttacctagatccaccactctgatcaaaggggactgatttactttgtcaccattgttattgaaagcattccttatttgattgttttgcttctaaaatgttctataaaaggtcagacagggtgtctttctctgattccatcaggcctctgggaagaacctctgctaccaattatgtgctacttggacgggtgctaagacattgcacggcttctttcccttggccttcatacaggtttgcttttgtcaccaatattgctgagtcaaaggtgtcttaatgtccatatggcatttggcatcagtgaaaagcaaattcagaaaaatgaacttatttcctcttgtttgtgacgcgatttggtaccattgccgaggagacatttgccatgagttgtacatctgtatcaaaggctttaatttattttaagggtctccttattaccattggcttcatgattgtttttgtaaacatggaataaagtcttaacctggcataacccacagcctagggactaaacaaaactaaactaatgcctgcaactttggccctc

SEQ ID NO: 113965 - DNA, 1062 bp, Homo sapiens
cttttaatattccatctgctgctcccttgaaggaaaaaatgtggtaacaaaagctaattatatatttatggtgttgtgatttgcagcttattttctgtcctcatgattttcttaacttgtatatttatacataaagaataacatttttgtttattttaaatattctaaaaagcaccactttggtatcatgcttctctatttggggaaatcaaaacatttaaagttacgtgtcttagaaaagtaagaaattctttttagatataatactgtattaaaggaacaaataacactgaatttctgtccttaaggttttcatccctaaacatgaataataataagtcagagagtaaagttctaggttgaaatagcaatttctgcacatttcctcatttttattcatccggttacagagttgaacatcctctggaagaatttaggttgtattcagttattctcattttcagggtgggattaagcatgaccttatgcagaattccactttaaacaagaatgccctcaagcttactttagacaatgttaagaaaatccactcgatgagattttgatatttattcggtagatttttttaactttttctttctcttcatcctgtcacatcatgagcagtttgaagacatcaggttcagttccctagcaaaaccaagtttcttcctcctagtatgtttctttttccttctgctttgagtggcttctgtggaaaaacatcttatatgtgggataaaaacgaaaacaatttgtgtgagagacacacatgcggtaggtctgtactcaatgctgtggactgttaaaaacaaagaaaggttttgctatttaaaaggagaggtaatgcaaatactgcaatgcactcataagaaaaaaataaattttccagtaactataatttaacagcaatataagccagtcctgtgtagagttctaaaatgatgagagtggttagagccaaatagggttcatatgatgagatcttgtgatgtgaagtaattttaaaagatgaaagatacttcttaaatactttggaaattatatggttgaccctctttt

SEQ ID NO: 113966 - DNA, 1130 bp, Homo sapiens
gacccaatttaatttttttttttttgagttggagtcttgctgtgttgcccaggctggagtgcaatggcgcaatctccactcactgcaagctccacctcccaggttcaagcaattctcctgcatcagcctcccaagtagctgggattgcaggcacccaccaccacgcccagctaatttttgtatttttagtagagacggggtttcaccatattggccaggctggtctcaaacttctgacctcgtgatccgcgcacttaggcctcccaaagtgctgggattacaggcgtgagccaccaccccagccccaatttaaaattttgattccttctccagcagttctaatcgcctaccctgccttgtattctgtcaatatcaccttccctttcatttactaatttattatgtttcctgcatattgttctccccttcttcccctccacttgctacaatgtaagctctacaagggcagaggtttttatgtttgtttttagctgtgataggtgcttgataggtgctgtgataggtgcttgagtgaatatctgtggaatgaatgaatcaaccaatactacatgagtctctcagctcacattcttaagaaaatagtcatcacttcacagcctgattgctgtcacatggcccttaagaaaatagtcatcacttcacagcctgattgctgtcacatggcccttgtactctggaagagcactcaggttaatctccctctgacttcttttctcataataaatttcttcccaggaacctctgtgtggcctaccaaatcaggtacagattcttccacttggaggtgaaagtggttggttggccccactttatctatccagaactctctcttaagttgctttccaaaccagtgttgtttggaaatctccagtcttcctgctttgactttgctaactgtgcttctcttcaaggtttagctaaatgttagtctacactttaagccttcgaaaccaaccccggcacaaagcaaatgtttccttgttcaccttcttcatgtagtttattattttgcacctgcctgagatttgtgttctcgctgtctcaggaatggaagtcccatctcctcaattagggaataagcccctttaggccaatacacctgccttctt

SEQ ID NO: 113967 - DNA, 1069 bp, Homo sapiens
tggctacagagggagggacacactggaaactaatttatctgtgagaaggcagaggagcagagtatgacattttggtccttttgagaaaatttgcaggatgttgaggtccgttgctgctgctgctgctgtttctgttgttttaaatagtatataactaagggtgaggaccattagaggacagaaatcacatcttaatcagctttgatttttttatgtttaaaaaagagattgagattcactttgtagtctagggagtttaattaaagtaagtggagacaaaagtactcttttgagagctgtcatttctcttagtgtgacgctattaataatgtagtgtaatgctattttggaagtttggttctttccttttcttttgtcttcctctgactcttttctgtattctaaatgaaaggggaataatgcacttagaggggggcactctcctaaattcactgtctcatgtacgacattatctccgacttcggctctcatgttttgaaaaaatacctcttcatcgctctatttttatttttcttcttcttttattgtgaatctcttttaccaaaaacatttgtagggttcttcacaaagattttttttttcaatcaggatgaaaactagatcatgatgtgaccatttcactgtgagtgtaacttccctttttgacagctccattagatctgccaggttataaatcttcatatttctgacttgccttgaaatcagaaagtgttttcattatgctagtctctgtgagcaacaagcatgaaggaaggcatggcaggtatcatagcccctttgatgaacttacctgtttcaactcagtgccagggcagaacatttactgctaaccctgatgggtcaactttgattgcaaattatgtgtggtacattttgaatttaaagaatgtttctgagattattctacgatcacttgtcatttttatgtgtgcagtaatgtgttgtgtataacttggatttcaacaatatccattgtttgaaagttagaaaatattctaagaatactaattatcttgctcaaataatcatttaagtacaactgtcactt

SEQ ID NO: 113968 - DNA, 2326 bp, Homo sapiens
tatatgcattttgaaaacctttgtgttctactgaaattacccatttaatttcagggttggtttgttaaaaaaagctgaaatctgaaggcacattagaggagctgtcagatgctgttttctgtaggtgttaataaaaccagatgaaaaaaaaatctgaaacaaattaaaaccaaaagcaattttgccatctgttgtgtattaattagaactttgtgtatcaagggtaaacttgctcttagagaatgtcactgaacacccacttaatagaataatatgcaaatttattaggttatggatttatatgcagtttttaattctaattcatctgcagtggatccccaagaaattggtagtgtgtatatacatatatatatatataatgagttctctttctttttttttttttttttttttttcagagcaacctgcaagcaatcaaggccagtctaccctgcagcccttgccgccttcccataagcagcactctgcacagcatcatccatccatcacttctctcaacagaaactccctgaccaatagaaggaaccagagtccggccccgccggctgctttgcccgccgagctgcaaaccacacccgagtccgtccagctgcaggacagctgggtccttggcagtaatgtaccactggaaagcaggtaacatctaaaatttcaaaataagctagcccaacccttttctcaccaggagcaatttactatacttacatattctggtgtggtgttttggggttttgttgttgttgtgttttcttttttcttctctaagaagcagttccagattgttgtgatttttttagttgctgggtcagtgaatgtgcctattcttttcacacagtttgttgcctacaagagatgagaataaattacttcagtgaaactttcccttaccactgtttgtttttttcttatctacaaattatcaggcatgtggagaaaaggacagagatgtaaaatgttattctcagttgcatgtagtttgattcagtggacatgtctggcatcttcttggttctagacctctgtactttctcagactatattttgttcattacatcatatattcatagtggagccccactatgaatataacacttaagcacaaatcagatgacagtttgttaaggatattgtagtttcttgcagtatgagggagataggacctactctctaaagttccttgcaggattatttcctaagacaatccattcatcctgacacagttctattaggaagtttttccctacaatgaactgaaatctccatccctgaaacttccatcctctgactgtaaccgtacaactagtagtctgcaactatacaaaacaattttgccctgattcatacatgatggcccatgagcttctcagtcttctagaggcttcagcagtttaatggtccttctctgtacacatagcatagtgtttcattaaggttcaaagttaggacttctcgcaaaggctggctgacaagtggtaaactgctcatacaaaagtatgatcagcgaaagctgttttgagctaatccatttcattattcaggatctcctggcatataaaatttcgccttctttctttggacaggagcgtaacagtcactgtctccttgtaattatgtattgcacaaccaacagtggtgtcttaccttattggtcttctgttggcagctttgcggggaggttcccccaacattcctcttattctttatttcttctctgccccagggtttccgttaggcttggagaaaaagagttatcaccatagaaaagccagaaaatagagagctcttgacgccttgagagactgtcccccaaaatgtcctgccctagagcttccggttaacattaggatttaaattagcttctgggtgaacaaagtgtctcacaatgaatacattgctatttctcaccattaggtatatggtctcaacccattctgccttgaggatgagctagcaggaggtccccacagttagttgtcaacaatgaaagtctttctgtgttttcttttactcttgacctaagaacaaggttctaaagaactcttatctttttatccatatcagccacgagtagttgagttttattgtttattttgtattattgaacattcttctgggagaaattaggaagagaaagaacaggaaaaataggcaaacagcagatttctcttcacttaagacacagtcatgtatacggatttttttttcctgaggttattagcacagacgtaaatttacccagtgtaattaattagcacacactgaacagctaatcaacaccgattcactattgtcatttggaaaaaat

SEQ ID NO: 113969 - DNA, 2285 bp, Homo sapiens
gactgactgatgctgatgccatatgcttttgttaaagacagcttggggagacacagggtacctgtggggaaaaggaatattactgaatatggaaaagaggtccaaaaatgaagaacctaaggttacttaacaaaaatttcaaaattggacctgggccaatggtaggaaattcttaaagtttcaccatcatcatttatttaaaaaaaaaaaaaaaagggaaagtcaacttaaattatatactaatgaatagtaaaaaatcacttggattctaagtctcttaaaatatggcaccttttataacttagtatttcttaagaggactaggaagggatattgtttatttgtgagaatgggaagaaacatgaagagggagatataaagttcaagaatttgctgtgtgctgttaatatttaaggcctatttcaagccctggctaaaaaaacctttgtctcagagagaggaggataattgaggaagctattgtaagcttaattcagtgcctaagctctgtggtgaccatatagttcattactaaagccaggacacttgcagagtgagaaggggccatatcaacagttaccctggaattgcagcataaactgatagctgtaccaggcaaagagggacgtgtgattaccacactaagttttatttccaagagtaaagttaattttaagtccaaattttcttatgccttagataaataagaataagaaatcaaacgagaaaggcaggttgaatgcaggtaaggctccagacttgaacatttctaatagtttctattgctaacttagagcaaatatttaaacttttattgacccccttcgcagaaaaagcttctattggcctccaaaatatgtagctcctaaaataatacttaaaatatttgtcttaattttcttctcagagtttcaagagaacacttatcacaatatcaagagaacaagaggtagcaggccgggcgtggtggctcacgcctgtaatcccagcactttgggaggccgaggcgggtggatcacctgaggtcaggagtttgagaccagcctggccaacatggtgaaaccccgtctctacgaaaaatacaaaaattagccaggcggggtggtgggcacctgtaatctcagctacttggcaggctgaggtgagagaatctcttgaacccgggaggcagtggttgcagtgagccaagatctcaccactgcactccagcctgggcgacagagggagactctgtctcaaaaaaaaaaaaaaaaaaaaaaaaaggtagcgtatataaaatatggtcctgaatttactcaaagaataaacatctctgtgtctccagcagcattacagtttgggtttccaaaaccattctctcaggctgaagtagaggcttcattctaggaaagtttgagataaagtttcaaagatggttattaagataagtgagagtaaaagccctattttttaatgtgagattattattaaccacttgtaatgctgtagcctcaacttgattgtttagtgggcgtcacgccaataattaaaatgtgaaagaaggttctagaccaatagcagctctcaaatgaaggtcattctcaggagtcagtattgatatatattctaattaaaacctggtggatatagtagggatacaaatcacagtttagcgtcatgagaaaagcatatgctttagagacctggtttgtaatcctgcatccaccattttcactaactatttaaatgtgaggtcacatatttaaatgtgaagtcagtttccaatgcaataataatacctactcaaaatgatttataagtgtgaaatgaaataaagtaagtggagcacgtggcacatgctaggtgttccgtaaatgtttttaaaataattaccaaatggtaatagcagccattgtgaagggcacctcattggttaatacctttcatcataaagtagctctcatctctccaaacaataagaaaagcatttgtcttaactgagatatttttgtctaatttatctttatgtgttaggtaggctaaacatgaaattaaaccatggttaattttactagattaaaatctcttagttttctcactcttcccgtcgcttaacaaaaagtaggtggatttttgtaggtaggaacgcccagactgttaattttgttcttgagaagaaaaaaaatcttcaaataataatgaaaggcaactattcatatccttgaaacatttaattaactaaagtaataaatgtttggaatgaatcaataaaagccttcatagatgcattgtcttcacatcactca

SEQ ID NO: 113970 - DNA, 1065 bp, Homo sapiens
acactctccagagaactgggcgtccataaagcaatgaatggattatatactcattcatatatgtggatttttcttctcttctgatgtagtattgatcatgtttttcatttgatagtaacccaaataatggaagctactaatagaagttgtaaatattgcttttatttaaccatttcataacatatctgagcattcacactactggaaatcgctttttaaaatgccagaaatgaccacattgtgttttgatcttcttctaagtataggaaaaggcctaccacattgaaatgctaatggtgtccactgagataaatcacaggctttgtggtttatccaccaagaacaatagccagtgatgcatcctcaggtttacaaagcaatttgtgatgccccatgaaattctataactgaataagagtattgcagagctgtatgtagaatactatgatgtttctgcagtggaccagtatcttccactggctacaatactcctgtgatataattatgcactttggaaagtgaaataaccattttgtgtcagtgttcaatgggaaaacagaattgtagagcatgaaggaactttagagacaattgagtcaggaatggcaactacgtgacaagttatacagtattttttccaattttttgaccatggaagacatcattaatgattcacagcactttctctccttaacccgattacatgctgcttatcttcatcagagtgcttcatacagtacctctgacggcctctaccagtcagaggtaaaagcaagatgaaacctttctgttacctttctgtcatcttttaatctaagttaactttctccttataaagacggtcaaaccagatactgaaggggttgtctcttgactaggatcacaccctagtgaaacaatactgctgttgtttcataacagtgaaggtaaatgagtaatttcacaacaaaaatcaatattccagagacagatttctagtattcggttagaaaatgtatcagccatcaagagattctcttctagttagctgtgtatattatttgtacctgtcagaagtgtgctgct

SEQ ID NO: 113971 - DNA, 1081 bp, Homo sapiens
tttgggtttaccttaacgcaaaggtagaggatcatgtctcttaagaatctacaggtgttgcagcaaagtagcataaatttgcaagtgacctgtggtctagtaagtggcaaatgctgttatagggtgttctaccagttacttaaaagatggtgaaaaatggaactcaattagagcaaataatgattgattcctaagagtttcctggtaccaatgaagtgaatagtattaaatcactattgaagtgccaccatattgccctgcattgctatgtaaattatatttgtttgaggaactctttgttttataattttcattgcgcagttatccttggtatttcagaaaatggaaattgtaactttacatatgactcttgttttaaacatgcttagcaattgccgttgtagctgaaggcagcagatctttaaacaacttgtgttctttacccccagcaatgcatctctttggcctcaactggcagctacagcagactgaaaatgacacatttgagaatggaaaagtgaattctgataccatgccaacaaacactgtgtcattaccttctggagacaatggtaagcgaaagaattatgtatcctgtgtttctcttttaacatcccttttccataaatttatttttacccatgcttacatctagtttagatggaacagggaaaagtgttcgaaattacagatatcatctttttataagtttttttcaattaatttacttgaaaggttgaaaattcacatttttattacaggaataatatgattttctgccttctgatttgatggctaggcttttctgcctttcccttctgcagatgtatattgagttttatttttagtctgcaaatagattataattcagtgtatcatctcttgtattaccttgggtttattaggttttcttcattcaacttgcgtgtggagttggaacactgtattaattttattataaaagcatttaaatgcaaagcacattaaaggattatagtttattgaccttttctctggttgccctttctctaaacctttaagaatttgcactttgagctaacaaagattttgaaatcaattg

SEQ ID NO: 113972 - DNA, 1051 bp, Homo sapiens
aatgcatggttcctgtgaagatgatcgaatggtacttattaaccatacatgtagggaacttttttacagactgaagaaattgtaattataccaaagagacaaacgcttattatggatattgtatttattttacaacatcttaaccttttattatgattaaaatgaaaatagagtttggctaattagtttcacagtcctgaaaagcatgatactgagaaagctgtggatttagagactcccacagcctgggtgctgggtgctggctgctggtattttgccagggaatacctctgctcacgtcagcactcctcagctcacagaagcctatattcaaatcctcgctctttcgcctgtttactttgtaactttgggcggcgtgcttggttattcagatttgcaagaaaattttagggcagctgtggaatgggctgcctaggatcctatcagtcgcagaggtttggaagaaaaaagaacatcacatgaatgtggccatattaatagaaatctccgtaaagctggagtccttgaaaacagtggcttttaagctattgaccatgacaatgcaataagaaatacatgttacatcaaagccaacatatacacacacatatacatatgtatctgaaatatgcttcccaaaataatatttatccttgccttgtaaaatgcatcctgggattttccattttattttattgtatttctcatttttaacaaacgccacttgcaacccactaaaataatttcatactttatgaaatattgtgctctgtaatttcagaaatactgctttggtagcctccttctctaagggggactgaagttcccccaagtgatcatagaattcagttttatacagttctgtgcacctttagagcacctgtatatacatataagcgaagtactttcttcctagatgtgtaaaagtctcctatatagggaatggttaacggaagccccagaatcagttaagtgcactagagaactgccaactggactaggggatttgtaggaatttccctgcatggaaaagctatctctctctgggctc

SEQ ID NO: 113973 - DNA, 1085 bp, Homo sapiens
caggctgccttgaactcctgagctcaagcaatcctcctgcctcagcctcccaaagtgctaggattattggcgtgagccacctcgcccggtgcttccagccttcttgaacatagtgtgcttagtcactttgatcacttctctgccttctgtttacccccttacagttgggctttcacagtacccctagctcatgacttgtcctcctctaccttcaccacacactcatacttcactgaaactgatgtctccagagttacccattgctttgtcagtagcaccagtgaaacctctttattctttatcatgtttgagtttttggaaccatttaatagttaacctatccctcctgttgcaatagtctttccttagcttctgtgataccacattcactttgactttctccctgactgttttggcaatgatgtctctgtttagttgactcacctcccgtctacctgatccctaaatactgctgtttctcaggactctgcgcttgacaatataatcactctggattctgtcacccactttcatggctccagttacattctctgtgcttcctaactctcaaatcagtaagtccagcctagatgtctctcttcagctccagatctcaactacatattttgtagacagtggtggtagtagtagactacataaaatctacccaattgtctttggaacatttccacttgggtgttttccatgcatcttaaactccacgtgtctaaaacagaacccatcaactactttggttatctattactacataacaaaccataacaaaactcagtggcttagaaagcaatgttatcatctcttgtggttcagtgaattggccaggtacttcttgcgttcttacttaggacactgcgattgctttcagatgttaaccaaggttaaccaaaggctccactgagctggaagtccagggtagctcactcacatggctggcagttaatgccatctgttgacctgagctcaactgtagtcaccagctggggcacctagacatggccttccatgtggcttgggcctcttagaacatagcagctggttctgaagaggaatatcccaagagggag

SEQ ID NO: 113974 - DNA, 1013 bp, Homo sapiens
tggataagaagggattcctatattaggaaatggcaccgtcgttcacttcatcactggtccaggaggcccggtgactgcttctactctctcatctcccgtatttagtcagtctctaagttccttcaactctgaccccataatatcttttgaatcctgttttctctcagctggatatggtagccttctatctgcgctgtatgtctccagtcttgctcatccactcttcacacacaaatttgagatatcagttccttgcctaagccccttcagtgacctagattctagtcagaagcctttaaatgacttacaaggctctccacagcctggctgtacatcacaccatactgcaatataaaaacaatagcacacagagacaaggagtgtagagttacgagcctcaccacctgatgtggtgtcctagttctgatcattaacgcctgtgctacttgggacaggttatatagcttcattgtgcctaagtggtctcatcaattaaaagggactaatttacttcatagaatggtctttggtcttgaatattcaatgcaaatatacaaaggtgtaaacatacaatggtgtatagtacatagtaaatgcttgaaaaatgtttatggttgtcactattactatttaatgcatctcatctttactagactataaggcaaggatcctgtctgttctttcactgctgtataccaagctcttggcacagttctggcatgtagtaggtgctcacaaagtatcagttgaatgaatgagtgaaaataatacaactaaatgatatgatataaagtatacgaagggccatgcatcaagtatatgcaaagtactagtatagaatagtggctaagaactgaagctctgccactcactgggtgcctttaagcaaattaccactctcacctcctgtttctttatagggtaatataaaggtttacaatgaggtttgaatcaggtcatgcatgcagggtgccaagcaatgattggaacatgaaagctattcaatgcatatc

SEQ ID NO: 113975 - DNA, 1228 bp, Homo sapiens
tacaaatgcccaaccttgcttcctgacgtcttaattattagtgcctctgtgggatttaagatgatattatcatttaccttccgcaacaattgcagttagactttgacagtgaatttcttttctgcctttccgtttcactcattataggcttgtttactcacatcataggcaggtggcaaattcatgatatatatggcagaaaacttagcattttataattttcactgatttttctgatagcacaaaatagttttcaaacagataccaaacctcctaattaccaatatgactttaaatcttctgttttgtccttacagcatctcggttggtaaactattatttataaagtgtttttcagttcaaagtacttttgaaaaggcattatctgaaaagctgtcactccactgatgtgttttcatatgaactgggtatcacataagaaggagaggaataacaatagctttgcgtatgtggtctctctctgttttcacactctgacaactgtattttaagacattaagactgttgtgacacatacttactgatgaaagaaaaaaatcacagttagtaggtgaaaagactgctagtggctcccacattcaggcacaacaggacacgttgaaaaaaaccttcaagatgataccctattgtgtttgaagacgtggtacgtttcactcttactgtgaaggctttaattggtttgattcctaacccacaagctttgagtttagaataactacagggcactctgttgccctgtctctattttttcctccagttttcctccttttccttttagtaaaacctacagacaaccttagtgtttcctatgatcattcccaggttcaggctctagggctttatggaggtagtgatctcagtaagggaggatagagagccctagaactggcctttttttatttcttctgaagccaaagttttctggaattcgggacatgatgaaagacttctgtgtccaggcttttatctaagaggactgatgagcttcagaggaaaaagttgtgcaagtatttacaagtttatcaaactgtgtcaatggcccactgacttccaggtgtgtttaccatcaataaagagcatttgaaaatgctaacaggaatgaacacacttgacttgtccaaatgagagaatggctgtgacttgaaaagcagcagtgcagaatttaaagacaaagccccttcacgaaaccctagtcccctgtattcaa

SEQ ID NO: 113976 - DNA, 1071 bp, Homo sapiens
agccaccgcacccagccagtctagaccattttaaagtttagatttgactccagttcatcttataggtgacactgactaggatataataaccagattttcttaaggctaggcacagtgacttaggcctgtaatcccagcaccaggaggccaaggtgggtggatcacttaaggtcaggagttcaagaccggcctgaccaacatggtgaaaccccatctctactaaaaatacaaaattagccgaacgtggtagcgcacacctgtaatcccagctactcaggaggctgaggcaggagaattgcttgaaccctggaggcaaagattgcagtaagtgagagatcgtgacattgcactccagcctggacgacaggagcaaaactctgtctaggagaaaaaaaaaaaaagcagattttcttaagtggaagtcctctataacttcaattatagtagacagattggatttatagcaattgtccagtgaaatatgaaaaaatattttcccactgaaaccgcatatgtgattatttgtgtataattcaagaaatatacctctaagctgagcacaatagtaaacatgtaacttacaaattctagaaaataatttcaggtaagaattgtctattgtgttgtgtacttgaaaggtttatttaaagatttagttgactgcaagttgtatataacatttaagattagagaaatgaaaggtgcagtttcgggttttctcataatccttctagtatttaaacacaatacatgtgatatcctcttttcttttctaccacaatatatgtgtttaagtaggttatgcattttcttaagcttcacggttattatagtttcttcctgtggtttattcaagatcagcagagcaaacaactgtttctgagttcagtgtttaaacatgaaatattgtataaggcagcccaaattgaacatttctctgtttctggagaacattaaataaatcaacctgaaataattaaaattggccagccattcagaatagttgcttgagctttcgcagtctttgtgaccctttgtaaaactgcccgtttgattgttgccaaggaatca

SEQ ID NO: 113977 - DNA, 1679 bp, Homo sapiens
gatttgtgtatctttttgtggccatacaagggacaatgcaatacctctataaccaaacagctccatgccccaggtcccagaatgcctatataccagaggcagggcaggaaaactatacctctgatcacattccctcattctttgtgactccaccacccgatacccgatacatcagaagaaatgagttgagtctagctgagggagaaaagttatgatctgactgtatgtatcttaggaagtacaacaaacacgtgtgtatagctttgaaaaccaggaagtgtgccaaaaagttatccataggcggatttaacttaccaaccaatagttattcaacaaatcattttagtgttgttctcagtggccttggtattattacatggataatagtttcccatagatgagctgttcttgaacaaatttctagttgtttaggaacaaacaggatttttattagcagtgggtctttgtattataatttaataaaccctgcaatagttcttaacaattccatttcctatcattttaatttattctgttgcttttatactccatatgaataacattgtgggaaataagggacctgcttcatttacaaataaatcttagatgtgaaccttttaaaagatgtagagcacctttaaagcattctgctcttttatactaataagatgagttatttccaattttggcatacaaagatccaattgcctttcccctgtttccttactacctgtgtatatgcccaccatagtttcctggttagggcccttagtggccctacggggccatttgtgagccacagattaaacacccaggaaactctggtgtgttttctcacttgggatggttactgttcttgcatttcctccccattttaacccctacgcatctggctgaaagaagctgccacttggtgaaagaatgctcataaatcagccagatttttttctttctccatattatgtgccatctcattgaataccaaacaggaaggttaattgaaagagaaatggaggagaaagtaaacagaagcaaacaaaaattcccactagaaagcaaaggacattcttcattagtcatcctactgtcttcataaactctgtctatgctttcataaaaccataggcattttgatagtaaaataggttatgaatttggagtgttcactgaacaccctgtctacctgaaagggttctattctgatatttttattagagtattcatattttcctctcattatgaatcatgtgttcagcaaattaggcatattcgtctgcaggttcatcatcccaagtcctcctttcttgggtttccctttgattggtgatgcatgcagatggaaaatgaaacaaggagaaatctacttttagcaatattgtgattaaaatagatacttctcctttcctccccagaaagcattcatgattattagaccctttaataaataaagaaaaagagaagttacatgattaaaccacatcaaataagcaccagtacttactgctaaaatgatttaacagtaatagcaccgatatagatgctccactacaaaaatactctcttttatatgtgaccattccatataagcttcaaaggattatactcatgtgctgccactgtttttcatgggtaggaaatatgtaaaaatatttagaggattcagagacaagttaaaaata

SEQ ID NO: 113978 - DNA, 1066 bp, Homo sapiens
cctgtggatgcagttagttggccatagatgcaatgcaaatgcagtggtaggctctgctgaacagatggttataggcagagtcaatcacttttaagtgtaatacgaagtaaataacctggacaatgataaatactaagtaccaaatttttactactgctaacctatcacttccacaagaaccattctttttagtatttgttgaagaggtttaccccagaattcattcatttgtatcccagagaattggaggctgtaagtgagattgagaccatagcagggtaatgattgaataacatatttgattgttatctactatggagggttgttgtgaaggaaaagaagactcagctctctgtagacaggcaagttgtcttctggaggctgattggcattttccatttatccaggagacagaaatggagaatatgggtttacaatgtataaatgtttgttagatataatgaagaagctcgagtcagaaagcatatttaaatcctggaacaagctactcaagaaattttggaacctcccaagtaatcgtagtattgttaaagtttaatactatgattacttaggtgtgaaacactggaggtttcgtcagttctttttgttagcttaaggagtatttttagaatgggagttttttttttaacttctctccatccgttatcctaaaagatcaagtctcttgtgtagtagccctatttgaaggacccctcaaggtctcttgcagttctaggattttttcgctgttgataatttctgctttatttggaaaactactagatttaaacatggggttctctttttatctctatgtcatttaactttttgtttttcctatggcattgaaacatagtgagaaaccatcttcactttttcagatcatttggggtttgttttgtgggatgctctactttgcatgcctcacttactttttatttgttaattaattcatttatgtgtccagtaagcaattattgaacatctcttctgtgatactgagaacaatttcttacaaaagtcagtgtaagataataaaaaaggtatgggctttgacatttta

SEQ ID NO: 113979 - DNA, 1067 bp, Homo sapiens
accacacctggctcattttttgtatttttgtggagaaggggtttcttcatgttgcccaggcgggctggtctcacactccaggacgcaagcaatccacctgcctcagcctcccaaggtgctgggattataagcatgagccaccgcacccagccgagagttgttttttaaaatcgtgatgatgaaagaaaggtggaggatattgatgtatttttcttctagtaatgtctcaaacacagagttgtatattgagctacattgattttcatgtacttttaggcagttcacttggaaatttggcctaggggaaatcctaattcctttaaactacaaaagagcagctatttgtttttattctaattcttagtacattaggaaacaagatcattaatgatcacaaagacatgctttgtttgctcagacaaaactcacacatgcagtactcagcatcctctgttaaacaccagggctgcccttgggctttgggatgccgaaggttagaaattgagaatgaaatgcacacagctggggaggtatttcggaaacaagatggggtggaaagagagaaagagcaaaacttttactgatacagacaagcttaggcttggtgttctaattcttatctcagataatggtgaaagaatagtactttaattgttaaattaaaaagtaagtgacaaatttgaaaataaaatgaccactctgataagtgcttcacttaaattacaaaactcaatattctttgcaacttttgtagtgtttcccagattgagcatcatatccaaaataaaacaatatgtaattctaaaaatatctttttagattttaagtcacattttgtttataatttccaataacagtggatatggggcaccacatcatacccacaaatagctgttctgggaggcatttggcttcacatcagtcagtggttggtagtggtgatgaaaggcaaccttgcgccaaactaccagcgtccctgaccttgccagagacaggtttactgtgaagctggtgtagcataaatgtcagggtccttcatttgcactggcacctcctaagatcccaca

SEQ ID NO: 113980 - DNA, 1051 bp, Homo sapiens
ctcagacttgtaatttttaaaagaagaggtcacttaatctcttttctacaaatgcaaacctggttcctctgacctttctaaaaggtggaggccctgtttggttgtcagtattctctactgtttcaatatttttaaaactactacaaagataatgtttattttgatgttgtaatctatgttgatgttgcagtttgtctgtccttcaaattcttctttcgtatttgcttgtctttacatacaccaatttcatcaaaaaaaggacatggagccttgggttccgcttccttgcagccagcattgagagcaatggcagatctgcactctgagccaaattcgtctttcgctcagtgttccacagcctgttgagtgagagagtaatcaaccaccaaaaacaaatttagtggcctaaatttgaaactttagtaagtttgactctgtgtttctatcatagtttagccttaaatactacctgccaagggtttatgaaatcattccatttctactgttacaatctgtatactataaagccccaaaggtggtagtaatttggactcttctaccaacctctggtgaagtgtgttacagatttaaccttgtagtgtccctccttccttatctccttcaccttcccgtgtgagtcatacgatgacgtctccaaaagtcccattagaattacaactgcaactcagtttacagattacatcctcaaaaaagtaggtgagactcctcactgacttctgcacctgacttgctgtgtaaccgtcaggaaaagtcacagtcccgagggccatgtggatacacgttctccagtcatgttggtgatttattttccactaaagaatttcccaaggcctcggtttctgtcccttagaatgggagtaagtgtggggataaacagctctcactattgacatcaggccttgagttccctctttctccaccctatccttcatgccgtaatttatcctcatgaaaaagacaggcagcagcatagtcatcagctagagctgcgtggtttcatatcagacggcagtgccagtgctactgagag

SEQ ID NO: 113981 - DNA, 1041 bp, Homo sapiens
tttgtgtgagtatctacacttttttagaaaagattaatttatcttgctcaaataaaattactagtgaaggagcagaaaatatataagggcaagttgtgatgtgttctttattccaaaaagctgaaccccatgttgaccaggaattgtgcatctaaccagcagagggtttgtgagagacaaggaagaaaacttcctgattccaaaatggagttgtccctaccctgggaacaggccagttcatataaagaatgttctcagcaaaaggagggcagcttggggaggcagagtacaaggggcttctcctgctggtatggagcagaatggaccctggggcttatgaaaccaaatcattgccaatcccacatttctttcctcaaagtcagactttttcttttcttcatagtcacttaaaaaataccagctccctcatgagtttgtcctttttaaactctccctattaataagatgaatcaataatatttaatatgtattgagcatttactacttgctaaggcccaatgcaaactgttctacattaattatcatgtttaattctcaggtagaagctagtaaaatctccactgaagaaactgaggctccaaaaggttatgtaagttttctgtggacgcacagctagtaagcaacaaaatcagaaccatgtgagcgatttccaagcccacgctcttttttttttttttctttttttgagacggcgtctggctctgtcgcccaggctggagtgcagtggtgcgatctcggctcactgcaagctccacctcccgggtgcagccattctcctgcctcagcctcccacatagctgggactacaggcgcccaccaccatgcccggctaattttttgtatttttagtagagacggggtttcaccatgttagccaggatggtctcgatctcctgacctcgtgatctgcccgcctcagcctcccaaagtgctgggattacaggcgtgagccaccgcgcctggcccaagcccatgttcttaagccctagatagactgtcctgcctcctgaattatttttc

SEQ ID NO: 113982 - DNA, 1050 bp, Homo sapiens
taaacattttcgatgagccacatttgtctttcacattcaaaacttccatgagtctttgcctacctgtaccagcaagtagaccaaggacccgcaggtcataggcttgaaacccgaatacttgcctcatttgttatgttccagggatggctgtgtatctgaatgtattttgaaaaacagttaaggccaagaattagccttggcatttagagtaatctgtagatctgccttgtgctttcctacggaatccatgtagaagccatgtaaaagaaggtggaactgcctggtggctttggagaacgaagtgtctggttctgagctcctttcatcagttttttctactggggggaaaaaacacctttttttttttctttttttttctaaatctccaagagacgacattgtgatagagtggtttagagcaagctctggagccaggcagcctaggttgccaaggtgttaccttgcccaagttaatcactcctctcctctgtttcctcatctgtatttactgtctcaactgttattacatcatagggttgtggtgaagatgaaatgagagaataatatatgcacttagaacagtatttggcacaaaggaagcctttattattacctacagcgagcagggctggcggcaaagtgcttcgtgtgtgtccctggatcattctgaacctggtcagagctacgagatagaggcctgggccagagctagaaatttaggaatcattaatacatcagccaggtgttcataatctgtacattacagagccagggctcatggaagagctaaaatcaaggcggcattttgtgtttgtgaacatatgtgaatttttctgggaagagaacccaaaactttcaccagtttactcaaagatctgagacctggcggggcgtggtggctcacgcctgtaatcccagcactttgggaggccgaggagggtggatcatgaggtcaggagatcgagaccatcctggctaacacggtgaaaccccacctctactaaaaatacaaaaattagccaggtgtggtggcgggcgcctgtagtccca

SEQ ID NO: 113983 - DNA, 1016 bp, Homo sapiens
gttctctatgatataaaatgcaaatgaagaatcgtggtatctttctcagtacagatatttttcttacggttggtttttagccttttgcaaaacttgtgttaagagttgcaaatattttaagtattatgttaattttgaccggctatatattttaaatgtattttctactttgctttctacttctgatgttctggtgacccaaagacctacctttacctgtaaatcaatctacagctttgcataattgattctgttggcaaaaataatctgattggctgattagaaataattttgtccacccttaaaactgctaatccagatcagaattaagttgtgttatttattttggttgtgcaggcctaacgtaaaagcaaaaggtttactctctaacagtgatcagcgttattaatttttgtaaactaagaatttctgtagaaatactaccctatgagaatcagaaactccagaagtttcgatggcactttctttatgttcaaatcatcaattaagctgttacagggttctactagtttatatggcatgtaaagtatatagcatggagaaggaattataaagaaattatatgaatgttatgcagtaatacatttttattttaatgtttaaaaggtaaattatttttattattataatttcagagtagcacctaacaccatatgttcttcactgtaattttccttgcatcatcttatcaattagctgtaaacatgcttattttaaaatgccattcaaacgcctctaatagaatcctgtggcaaagtgaagaatccttttacatacacagtacagatgtatcaaaaccatgtactgttttgtttacacacatgacagaaccaccacacctgagtggcccaactgagggttacagtttcagtcattctgttaggagtcctcctaccacttgcatatgtcagcagtgaaaaataatcaacaaaagcatctttgaaaagcaattttagatcattaaagatgtatgaattttgacaaggcgggagatt

SEQ ID NO: 113984 - DNA, 1082 bp, Homo sapiens
tttgagggaatttttttaagcaacaaggtgctttaagaaggcatgtcttgataaatgaccagtaatgtttaaaacagattacaaatctagactagggattctgaaattattttgttgagatggcttttccacaccgtacaatataccttgttgcttggctaaagggaaaaaatttaagttaattttgtctggcctgcagctatttagtggatcgttgcatatatttctgtcctgcacaggtaagtggtgtctcaagggtcaggccaatcaaagatgccacttggataagaattagattccatagataacgttgctgtttctatccatgtgcaattacagtatttgtgctgtttataaaggcctgttcccactaagtgtcccttatctgtttattttaggtgcaaaaactcaatactcaaatcactggtgttttccttctttgtctcgacagagggttgtcctggtctgtgcaacagcaatggaagatgtaccctggaccaaaatggctggcattgtgtgtgccagcctggatggagaggagcaggctgtgacgtagccatggagactctttgcacagatagcaaggacaatgaaggaggtaagaaatactgagcatgaacacgagtctgtgccagagcacaggttcgtaagtgacagtgagtacatagatatctgttgccaaaaaaaaaaaaaaaaaaaaaaaacctgatccccatcgattagattgattgaaaaatgtatgagtgctgatagaatgattttgctctccatttttcctgaaacaaatgcaagattattatcattcagggaaaaggcaaggtaaccaagctactgcataatgtccattgttctccattccttttcctggtccccaggtgactcttctcctcaaccacagtatttagggctctgtgaattgggagctccaaagcagtattttaataactgacattccaaaagatgcaaagaattttccagcctcttctgttgaaaggcatggatggaaaaaaacaaaacagtaacagagaacagtcccctggatgctgtactctagtgacgttttatccttaacttgatactcg

SEQ ID NO: 113985 - DNA, 1263 bp, Homo sapiens
aattctttaaaaatgtctttcttttagatgtaccaaacatttccttctctgatgtttatagtattagtttgctaaggaacccctttaatatgtagtaagttttacctcatccttgttccaattctcacacattgcaaaatttaaaaattacattaattaactaataccagccaaagggcacttaaacatgtagaactaaaaatcaactttgtgaattttatattaccaattaaaggatcaaagaaagtgtcaatcataagtctgtgaatttgaatccattaaagtgtagataccaaattataaaaattttattcagtaccccttattgacttaatatttaaaaatcaagcaggcatggaaatatcacaccccaagtccctgcttgcaatattctaaacagtcttttggttaccataaaagaagctgttttacttttatatgtgaatatagtttgttatgcttcttcaaatgtcttgtgttctaaaggctgtgacacagtttccaactcagaagatagaagtgctaataatatctgttctctggcttgttctttgtgaatatttctctagtctaagaaggttgaattatgacaaaataaatgagcaaatccagcctgcacttaccactggatctgtgtctaattgaatgagactagagaagatgtcttgataattgtgatgatctaggcaattcaggatgagttaagaatcaaggtgtaatatactaaaggttcttaacttgatctcagtttccttggttttgctattagtcaaaattgtaatatttcaaacctttctgaaatagtgaaatctcaaccaatcacatgagaatgctgctgtgcttccgctcagcagagatttcccaaaaccaagcattttgaaaatccctgtgctccagctgctggctgcagccggttccgtcgtggtagcctcacgttttcacagtagatagattactgacctaaaaattcaccactcgttgtacccacacacccgcctcttcagtgctttggcttttcagaaagttggaaagcaagcacgagctcacactgtcaactctctatgctcaaattaggtgaccttgaatcccagtcctatggcatatgattcagagcttcactgccaccagtctgtcaactagaaatatccagactcactttttttccttttagtacttccatgctgatccctcttttcatttaggagagaccagcatctaacaaccagctctaatttgccatcctagcctgcgctgctgggaatt

SEQ ID NO: 113986 - DNA, 1047 bp, Homo sapiens
ggcattctctctttacttccccactaggataaaactgatgacaataaaggcaaagcttatcacttgaatgtccattcgtttttgcaccaagaaaactcacgtcccatagctaaagaggatgccaccaccactgaagctgccacctcaataatctgtttgtttgttttttctcaaaatgagggcatcctgaggaagtgtgcatgattcatttaccatgaatgaatcatcattgttcatcattactctctaaacaatttaaagtgggtatattgagtcttcattattttaatagtttaggatattataaactgctgttataacagcagaagtaaaaaaacaaatttaaacctaaccaagtttaggtttaacaaacctaaacctaaaccaagtttaaacctaatcagtttttttcttttaatattttcagaaacaactcatactttagttaattattgtattcctgcactttctaaggttataaggcaaaagacattgcactgtaggaagagacaggacaaaagcgagtataaggacggttaattcttagtgagtatgtagtatgcgctaggccctgttctaaggatcttacatatatagttcgtgtaatcctcccagcatcctgtgaaatatgtattattatcaccacctttacaggtaaggaacctgaggcacagataagttaggcagcatgcccagatcatacatttagtgttagtaatgaagttaggacttaaacccaggcaatcgggtacagagttcatactcaaaagatgtacaactgagaagaaaaaaaagtatgtgtgttatgtatacacatgagtgtatgcataccatgtacacagctagtcacagttaactgtataatcagggaggtaggaaagactagaggggcctctccaatgtcatgtctttcaaagtagactcagcttggtggagttgcaactctgtcaccaattatatatacctgaaagaccagctgtgtcaacattagactgtttatagaaaggaaaaaaaaaaaacctctaaaattgctctgaatgttatatt

SEQ ID NO: 113987 - DNA, 1160 bp, Homo sapiens
aggtatgagcggaatcagtagtatattgtacttcactggagaatttgatggagacatgcttcccctggaataaactttatgtccctcattcaggggcagttttttaatggctttgcattgagcacaaaagatttagacaatttgcttctttgttttagggtagacacatactgccttttaaaggtaatattttttaagatgactgttagtaaattgttgaatcctcagcgtcaggcaaggaaggcaaacagtaatatcagagaaatgctacctgtgagcacattcttttgagtcattattaaatagacagtactattcatgtctaatctttgatcatggattccagactataatcagtttctcatgatctgttttattttgcttttaatttccctctgtgtattaggagtaactccctttgatgtttatctatgatccttttcacagcagcaacccagctcatagatactaccttgcaacggatccagtcacgggagatctgtacgtttctgacacaaacacccgcagaatttatcgcccaaagtcacttacgggggcaaaagacttgactaaaaatgcagaagtcgtcgcagggacaggggagcaatgccttccgtttgacgaggcgagatgtggggatggagggaaggccgtggaagccacactcatgagtcccaaaggtaccggcagttggcgatttgaggatttctttttatttattaaaaaaaaaaaaaaaggggttgaaaatccatttagtgcctagtcatgtttaatgctgagtctaactttttacctttgacagtgttctggaaagctgtttcacatctagggtttttaaaagccatgtagcatgaaactgctagcatcctaacttggttttacagtaaatactaggttcttggcattttttattatcataccattttatcagctcttcaaagaatgaagcaactaactactctatataattcaggccacatcctgttcaacttcaaggaagtatccaaattctttcatagtcctggaatttctttgtcatgaatgagtcccaggcttctttaaaacccatcactaagcaaccctgtgagccctcaccctctttggagagctgtgaaacttttgtttctatgccatgggaaaaaatccttgctgagaggaat

SEQ ID NO: 113988 - DNA, 1050 bp, Homo sapiens
ggaatggcccactgacctagccattaaccctatggataactccatttatgtcctggataataatgtagttttacagatcactgaaaatcgtcaagttcgcattgctgctggacggcccatgcactgtcaggttcccggagtggaatatcctgtggggaagcacgcggtgcagacaacactggaatcagccactgccattgctgtgtcctacagtggggtcctgtacattactgaaactgatgagaagaaaattaaccggataaggcaggtcacaacagatggagaaatctccttagtggccggaataccttcagagtgtgactgcaaaaatgatgccaactgtgactgttaccagagtggagatggctacgccaaggatgccaaactcagtgccccatcctccctggctgcttctccagatggtacactgtatattgcagatctagggaatatccggatccgggctgtgtcaaagaataagcctttacttaactctatgaacttctatgaagttgcgtctccaactgatcaagaactctacatctttgacatcaatggtactcaccaatatactgtaagtttagtcactggtgattacctttacaattttagctacagcaatgacaatgatattactgctgtgacagacagcaatggcaacacccttagaattagacgggacccaaatcgcatgccagttcgagtggtgtctcctgataaccaagtgatatggttgacaataggaacaaatggatgtttgaaaagcatgactgctcaaggactggaattagttttgtttacttaccatggcaatagtggccttttagccactaaaagtgatgaaactggatggacaacgttttttgagtaagtatatgaaaattctactctgattataaaatactgtgatataataatatcatctataataacaatataatcttaagagctggaggattccatgtttttgagagtctagagcttctgtaatttttggatcccggctgggcacggtggctcattcccgtagtctcagctcctggggaggct

SEQ ID NO: 113989 - DNA, 1063 bp, Homo sapiens
gcagactggctgaagtagaggttgggttggcaagccaatcttgtatataatgggaaaacattattttaaagaatgaaagattttaattaattaaaatacagcaaaatcacattttcaccaatacttattacatgtcatatttaaagtatatctattaaatcttataactagataaattgctgtaagggcaactacactattccaaaaagcattattaaaatatcttacaaaatatcaccctcacaattttatatatatccatatatataaaagaatatcatagtttaacaaaccagtgtttaaaaatgacttttctaataaaattagcagaaagactgcttttaaaaaccagcgttttgttaattttcctcataagctggctacagcaaagacgactaaaaaatgtctaagaaacctttatgcattttgcaaaataatgtgttaaagaagagcacttaacccaaggaattcagaatcatcgtgtcagaatgacaaatgatcattttttttcttcccatacattcttgtaatttggctgtgaaagagcaaaggccgcctcttctaagggtcagaaactttaaaacacattcaaaaggaaatgcacaaaaagaaaagggtggggggaggtgtcattatcaggccgcccctccagaagcactgtctgtgttcagacacagcagcacgtattgtctgtgtaagtttgagatggttaatgggcaaactcaacccctgtcgctactcatcagagccttgacaacagagtttctgctgcttgtctcccgacctgggtgtgcggcgggatgtgagcatcctaatagaggcagcggggggcttctgaatccccgtcggaatgcctttgtttttgtagttattggtgaactggccgactcccagaatattagtacgtgtctgtaatatttcccttcatttttagagtaccatgtgtctatgtgtctactttagaccttacaaagggcagcctgtaagttcacaaagaagggatttgacaggtttgacaatggccagagtgtcaccaaaaccacaacgagattgtgaaaaaaaa

SEQ ID NO: 113990 - DNA, 1011 bp, Homo sapiens
ggccaacatggtgaaaccctgtctctactagaaatacaaaaattagccgggcgtggtggcactcacctataatcccagctactcgggaggctgaggcaggagaatcgcttgaacccgggaggcagatgttgcagtgagccaagatcacgccactgcactccagcctgggtgaaaagagtgaggctccatcccaaaaaaaagaagaagaattagagaggtgtcttccacaggacaaaactgagaggatatcctttcctttgataagcatctgccatccaaccctaaaaactgaaacactgaaccttgcatcattgttatttctgccaaaaactgcattaaaaactgagcagcccactttataagtatatatgtatacacacacacacacttatacacacacacatatatatcttaaaatggtgctcagccacctgctttattttccttttcctttttctttcttcatgaaagaaaacatttaggagtttaagaatgatttgcaagagagtttatcagcagatcacttaaaatcatgggaaaattctatttttgatagaattttaaatatttgatttagtagaatcaaatagtttatttctatttttgatgttttgtttaattgcttaataatttttgctttaaattattaaccaaaacgtgtatttccagggacatcaataaaaaaatgcataggcaagtttctaaagtgactgctgtacatttcaagcattaacctgaacactatgaaggcaatacttttattaatacttgatctattccaattaccttctgcagtctagtttttaaaaatcattagttctgcccaggtttcaaaggagaaaaggaactggggaaagagtatgttgttcagattactcaaaaaattgcacaaaaaataaaaacagattagtcagattttctcagttcatcggctgtgtccctggagtgtgttgatagttgcaaggttgaattaactctttcagggtgttccatttggcaagtcaatattcc

SEQ ID NO: 113991 - DNA, 1022 bp, Homo sapiens
cacttagcttcagctactccttagaaggcacaaattcagaacttccagggctaaactgttaagctgggccgctaggatcccagcttaaccctctgtcattctaactgtactacctacaaaggttacttgtatttttatttcccaaagaaccaaaggctaataggtgagagtctgaactttcagcttcctgggctgtatctccctgtgccgaggatcctgtgatatagaatgcctgcccagcagggaatggaatgtgtggtaagccaatgaaagagcaaagtcagaggttgcagaaatgctttctacaggagaaaggtgaagtttctgcttcagattgaatggggctagaaaatataaaccagcaaaagggtcaaaaaagggcagaggagaatgaatcagcaagctgcttgcaggtggtacaatctatataaagctagagttcccagctttaaatcaggcactgtgatctacaggagggctagtgggcctggggtcagctgcacaaaagtcccagttatggtccagtcaagagatagcgtgagagccagatcaaatcagctaaccacgtcgtattttcattttccgtctctgaaatgggggggggggaaatagtacaatacagaattctcctatgtagaggcattcaaaagggcattaattttttttaacccgatagcacgttcttcacatcataccatgagatgtgtaatctgctgcaagacttatgccaaactgaacgacagaactttaggctggttttgtcaataattctgtaactctgcgctgcttgttcttaaataaaccagtgcgtgtttgtttcttcaagagcagtaatttcttcaaaaaagcgatcacagcaataaactctgttggatttctttcatttatgccttcctttgctaggggcgtttgggttggtggggaggacatcttcagctctgccttttgtgagtctaaacaatgattccacttaatggtgcattggcttcctctgtgtctccatccctggcttctccctcctg

SEQ ID NO: 113992 - DNA, 1035 bp, Homo sapiens
agggattgggtgcaggggagggaagtcttccaagaccttggaggtgtgtacaccgcgctcctgagagatcacatatgtgcctctttacaaaatatttacttagtgcacatcccatggaagctgagctctcatttcatcaggcaaatgagaaaaagaagtctattaaactgcagaaggacttcaaattcccctaaagtttgcctttaatatttagccaaacctctgacagcatgaaatgccaaggatcaaagttgttttgtttctttctaaaaggacatcatcaggtactccttattcctagtcaacttttagaaatttagaacctatctcacggcacaaccggccaagtatttaatccatatctaatagttcatgttttgtgcttcttgttctttagatcagttaagaaacagctaccagattggttatgacggctccctcagaattatctacgccagtggcctggactcacactaccaaacagagccgcacgttctggctggcaccgctaatccgacggttgccaaaagaaacatgactttgcctggcgagaacggtcaaaacttggtggaatggagattccgaaaagagcaagcccaagggaaagtcaatgtctttggccgcaagctcagggtacgtacgtgttgtggagcaggagatagctgcagccctctgatctgtgcagatcatcctgagggcaggttgcgtctcctgctcacccccctatgtctacactgagtatgagcacctcgctcagtgtggttccaatcccacatgggcctgttctggcaggtgcagctggggaggctggagggaggtcaggtcgtgagagggctgagaagaaaaagcaataggacactagagggaaaaggagatcaggagtgaaggtaaagccatgaccatgaaaaccagctccagacatcttccaggtcactttcacagagctatggtccattcccaaagcggactccagctgctgctctttgttctgctgagccccagacactgccgccacctgcatccccgtttgctgcc

SEQ ID NO: 113993 - DNA, 1270 bp, Homo sapiens
tgatgaaacagcaggagtcctaaagacagtaaacctccagagtgatggttttatttgcaccattagatacaggcaaattggtcccctgattgacaggcagattttccgctttagtgaagatgggatggtaaatgcaagatttgactatagctatgacaacagctttcgagtgaccagcatgcagggtgtgatcaatgaaacgccactgcctattgatctgtatcagtttgatgacatttctggcaaagttgagcagtttggaaagtttggagttatatattatgatattaaccagatcatttctacagctgtaatgacctatacgaagcactttgatgctcatggccgtatcaaggagattcaatatgagatattcaggtcgctcatgtactggattacaattcagtatgataacatgggtcgggtaaccaagagagagattaaaatagggccctttgccaacaccaccaaatatgcttatgaatatgatgttgatggacagctccaaacagtttacctcaatgaaaagataatgtggcggtacaactacgatctgaatggaaacctccatttactgaacccaagtaacagtgcgcgtctgacaccccttcgctatgacctgcgagacagaatcactcgactgggtgatgttcaatatcggttggatgaagatggtttcctacgtcaaaggggcacggaaatctttgaatatagctccaaggggcttctaactcgagtttacagtaaaggcagtggctggacagtgatctaccgttatgacggcctgggaaggcgtgtttctagcaaaaccagtctaggacagcacctgcagtttttttatgctgacttaacttatcccactaggattactcatgtctacaaccattcgagttcagaaattacctccctgtattatgatctccaaggacatctttttgccatggaaatcagcagtggggatgaattctatattgcatcggataacacagggacaccactggctgtgttcagtagcaatgggcttatgctgaaacagattcagtacactgcatatggggaaatctattttgactctaatattgactttcaactggtaattggatttcatggtggcctgtatgacccactcaccaaattaatccactttggagaaagagattatgacattttggcaggacggtggacaacacctgacatagaaatctggaaaagaattgggaaggacccagctccttttaacttgtacatgtttaggaataacaaccctgca

SEQ ID NO: 113994 - DNA, 1149 bp, Homo sapiens
gtggcggccgtgctcaacaacgccttctacctggagaacctgcacttcaccatcgagggcaaggacacgcactacttcatcaagaccaccacgcccgagagcgacctgggcacgctgcggttgaccagcggccgcaaggcgctggagaacggcatcaacgtgacggtgtcgcagtccaccacggtggtgaacggcaggacgcgcaggttcgcggacgtggagatgcagttcggcgcgctggcgctgcacgtgcgctacggcatgaccctggacgaggagaaggcgcgcatcctggagcaggcgcggcagcgcgcgctcgcccgggcctgggcgcgcgagcagcagcgcgtgcgcgacggcgaggagggcgcgcgcctctggacggagggcgagaagcggcagctgctgagcgccggcaaggtgcagggctacgacgggtactacgtactctcggtggagcagtaccccgagctggccgacagcgccaacaacatccagttcctgcggcagagcgagatcggcaggaggtaacgcccgggccgcgcccgccgagccgctcacgccctgcccacattgtcctgtggcacaacccgagtgggactctccaacgcccaagagccttcctcccgggggaatgagactgctgttacgacccacacccacaccgcgaaaacaaggaccgcttttttccgaatgaccttaaaggtgatcggctttaacgaatatgtttacatatgcatagcgctgcactcagtcggactgaacgtagccagaggaaaaaaaaatcatcaaggacaaaggcctcgacctgttgcgctgggccgtctgttccttctaggcactgtatttaactaactttaaaaaagaaaaaaaaatgtgtacagtgtttccaaatagtcccgaattgtcgacctttgcttacaagaagtagtctgtctgcataggatgtgatagctatctctgttcattttacaatgtggggcaaagttactgtttctagacaacccaactgctttccctgtgcagctttgtagaaggacattggcacagtgacttctgcggcggggatttattaatggattttacaatgctaacgtggtttcccttcggggaaaaaactggcaactagaatccttgtcactgataagc

SEQ ID NO: 113995 - DNA, 1002 bp, Homo sapiens
tgagactaagatttgatgtacagtaaattgtaattcatataaaaatccataaacaacttgtctcacataatttacaaaaaaatcaggatttcctttgcttatcagtgacaaggattctagttgccagttttttccccgaagggaaaccacgttagcattgtaaaatccattaataaatccccgccgcagaagtcactgtgccaatgtccttctacaaagctgcacagggaaagcagttgggttgtctagaaacagtaactttgccccacattgtaaaatgaacagagatagctatcacatcctatgcagacagactacttcttgtaagcaaaggtcgacaattcgggactatttggaaacactgtacacatttttttttcttttttaaagttagttaaatacagtgcctagaaggaacagacggcccagcgcaacaggtcgaggcctttgtccttgatgatttttttttcctctggctacgttcagtccgactgagtgcagcgctatgcatatgtaaacatattcgttaaagccgatcacctttaaggtcattcggaaaaaagcggtccttgttttcgcggtgtgggtgtgggtcgtaacagcagtctcattcccccgggaggaaggctcttgggcgttggagagtcccactcgggttgtgccacaggacaatgtgggcagggcgtgagcggctcggcgggcgcggcccgggcgttacctcctgccgatctcgctctgccgcaggaactggatgttgttggcgctgtcggccagctcggggtactgctccaccgagagtacgtagtacccgtcgtagccctgcaccttgccggcgctcagcagctgccgcttctcgccctccgtccagaggcgcgcgccctcctcgccgtcgcgcacgcgctgctgctcgcgcgcccaggcccgggcgagcgcgcgctgccgcgcctgctccaggatgcgcgccttctcctcgtccagggtcatgccgtagcgcacgtgcag

SEQ ID NO: 113996 - DNA, 1057 bp, Homo sapiens
tctgcaggcctgtatttagcatgctgtaagtacttttgggtgaaataggctctgagtctaaattctcagacatgtttctgatgtattaccatgaaaagcttgtgccacatgacagaagtgagatcatagtcttaacctcttcttgacgtggactggtcttcactcgggcaccgataaataacagatttggagtatctcctggtgcttattttagatgatgaagtcaaatcaacccaattagtgtcctgttagtaggtataatgagcctatttctttctaaaaagacttgtgatctggacatgcttttacaagaaatagtgaccttggggaatatgtaaacaaaagacctttttctaagagttgggagggggtgggggactgtataatgaaaagaattagcttacaaaaaagaaattgatattcaaagtattttaggcaaagccagtcaaaatgctttcatgatattttgagatgtaaattttgtctgatttgtattgttcttttcatttgccttcttaactttatatgtgacctgaattttccataacttgatgactatagattgcacctaggcattccaataaaagccaacccaatgtgtgtgtgtttttatattttttcaagtcttgggctagccagcattgcttttgtgtttaacgtggaggacgcaaatagatgcagttgttggggaattgattcatctgcaacccagttggtagtatcttttttttttttttttttgtccattggccagactgctggctcagcagagtgaacttcacaggggactctcccatggcctactttagaaaaacagtaaacacacccccacaaagccaaacacgctaactgtaaagaagagtttacaaaaataccacccattactacttgagagcaggcctcattcctgtgatcctggcaataagtgtgcttaattaaaacacttgattagaataatcagtttgggcctggtaggcttgcagcctcctggagatgtctaaatctacatatagaccggctgattagaagatgcttagttcagcaattctggccggca

SEQ ID NO: 113997 - DNA, 1040 bp, Homo sapiens
cacttctgcgccgcggtggctttcgtggctgccgcaggcttgggtagaggagggagactggatgtcaccgctgcagggaggccaggccgaggcggctggggagctgcggggaagcgggagggggggcggctttcgctcttccaggctgtcactccagcacgttccgtgagagcccagctccctcagaaataaaaatgccactctgaatttaagtgatccgttcttccgggacattctttccagcgacaggactgttaacatgaaaagtaaaagggaaacaatatgatagttcagaaatcactgttttcaggcgctgcggaactcagcccgcggacgattcccgggaggaagggccttatttcgatctgtgagtgagagcaacgcggcatgacagtgtctgctcgacgtgcagggaaatcttacccgagccactttggcagggcccaggcctcggtgcggcggtgctgaagcagaagtctccgctttaagtgtgaaactcggagggcagagcagaggtggggaagagagggtcagagagccggccccgccgcggttggggtggagagtggcgagcggcgagcggcggcgccttctcttcggtttcacctcggtttctggcccgggaactgcccttttggcgtgcaggactttccctaccacagccgcgcgtcactagggggcgccggagcccttcctgaaatcgccgccatcccctgcagggcccgcccggggatgcaggagggggcgtcccaggacccctgcccacggggccgccggatgttgggacggcttttccatgtccgcagaagccgagtcccaggaaccccaggggaaggccagagggaagccccagatgagggaggactcagggaagggtgtcgtcttcctctcgctacctcccgttctctgccttgggtcacctctgtgttctgcagtgacctgtcacctgtcaatgctccagactgaagttaaacgccaggcttgattttttttttttttttttttttttgagcttggaaatcatgtcatagctgaataaa

SEQ ID NO: 113998 - DNA, 1077 bp, Homo sapiens
aaaatggaaattccctgagagtccactgctctgctcctgcggcggtgcttttccccctcgttgtaagcatgctctttaccagagctgcacggatgtcataaactgcctcacgatgcactagagcagaatcgtgcgttagcaaatttcacagatgcaaagtgggatttctgtcaatggaagcctgcatggaaaatacggaacagcttaagaaagtactgtcttctctcaaaattccacaggagcctgaaatgcaggggttccggcctaggcgttttttgaggcaaataacgtcgccacacggccgagatacaggcccctttttgccccatgagacttactggcctcagagtccggccgcttctgttttgtttcttcatgtatccttggcttctagcgcagttcctggtacacagcaggcgctcaatacatatttgctgagctaagcaaatatgtcctaggccctgtggaagatacgacatgaggaagaccaggtccctgccaaaaaggcaccgagggcccaggctggggagggtagtgctgacatcgagtaggccttcagctctgaccccagcttcattttaagtgactaggaacaaattctcaaaacttcttttctatcaactcttcttcacccccaatatcacagcacaactgtctgtcattgatggagttcctgcaataagacaagcgctagaagtttaccatatttgtatccttactggattcccaaattaatcctagtaagcaagtgacatgattgtttttagtagagacagggtttcactttgttggccaggctagtcttgaactcctgacctcaagtgatccacccacctcagcctcccaaagtgctgggattaggaaaatgaatacttttgcaagcacaatgacaggagtgtcaaaggaggtaggctccacactctgatgtctctttatcagtgaggccttttctgactccctcacatgaagagcaaactcacttcccttgtgccaaagcactcaacatatatgacatcccacacggggtaggctgaatcgtggcccttaaagtatgtccatgttccaatccttagaaca

SEQ ID NO: 113999 - DNA, 1049 bp, Homo sapiens
gagtgtgcccctcctgccccaaagcacctttggctaaacattgtctgttgggtcgtgagtagggaggagcaaagtgaacagtcactaaatccatagcagggctaagtccaagcagcacatgctgaggcctgggcgggggctccaggcttgctgggtttgcagccccagctgcgggtctcaaagccagcacagatcacaagagcaaggccagcagctcctccagggaagagcaaaacgctgccttggaaacacattttaattgatgaaaggattctttgttttagccgctgatggcagtgcaagtgaacttcagggcactcgaggtgctttggcccaattaggaagtcagccggagcctcccgtcacaggcagccatggtacctgctgtctgatgttttgccaacttgctttagtgcaatcaccccgctgcaccgggatgtttcaatttagacttctgctacgtcaggactctgaagacgctcattgtctgggagtgggcttcctgcctgttacctctttcctcctgcctctcctctcttggacacagctgtgacattgctcactggccaagtgagttgttactgtccctcggctgcgggttggcaggtttccactctcggaggagcagcagcagggtttgcaggcgaagatcctggactctgtcaatgcaagcccggcaccttggcattgggagtgctggagttctttgtgagtcatctgtgtggccggcatggcacagtcgttgctggagaatattagagtttagaatcgtatctccagcattgctttgtagataaggacatgcagttaggacttaggcaggcttgcacagctctagaggtagaacggggctgagaactcaggttccccagcttggaggctggtgcccataccaagacactgggccaagtgacatggggtcttgggacagctcatgaagctgggtgctaaggcaggcaaatgggagccgtagtctgtggccctccaccacagctggctttccagcctctctgctcctgccttccgattcctgatgccctagccttgcc

SEQ ID NO: 114000 - DNA, 2294 bp, Homo sapiens
tgctgggattacaggtgtgagccacctggggattctttttacagcaacattttgcattgagatttgaagtcttacagatttttatgattatctttgctaagaaatggttgtgagctatattttacttgcaagtaagttcaactacctttgattcatggcagaaaattcctttgggactgtaaagttttccagcgcttcatggtattggcgttcagcagcagtgggaccatggtcataggtgacgtgccctggccccttgtgctggtcattagggatacagctcagtgtatctcatgaactcaaccgtggtgccttctgagactttaaattcaaattatttgtatactctcttgttcagtgattcttaaaagaatttgttttgttcccaaatgtcttctttttaattgttgtagaagaaatgaggaacaagtgaaaagttaatgagcaaaaaaaaaaaaaaaaaagttggtttatgtttgcatttttagaatgtaatttgaaaaattactcctcactaaaggtagtcgttttttgctatatataagcggcaaaagaaaatttactatttttttgcattagagagactccaagttggctgcagaaatttttctagaaaataagataaatctgatgggaaaactagtaatcggatatcatgttgtgcagctgacttgttagaaatcctttgactccccaataattcgtgaactcagagagctgaaaacatacaaaccacaccaccccatgcatctttttttgtcttagtcttttctgctctgtgtttctcttggtatggtgcactataattggctcctatagagagaaaatagcaagtgaatcccaggacatatttttctctgcacagaaaatatgagttaagccaaagtaaacaaattgctttcactactcaccagataataattgtattttgtttttatttttaggaaattcataccgaagtgcagcaagattgtcattgactttgattcaattaacagcagaccgagtcaaaagcttcagtgagttacatctcattcaatctccagaagattgggattatcgtcttctaagaggttgctaatgcctttcatcttgaagttacacataacttcttactagccagtatggcaaaagtaggcatctaaagaatataaagcctcaaatcttccttactgtctctcttgtcacatggaatctacatgtgtttgaactattgctttagggtttaaaataggggagcctgtggtggcctggtgcacagggctagaacgagagtgcctccccttcttgtgtcctggctggctgggatgctggtggctcttcagaggagcatcagctgtctgtcatctgctgcgatccggcagcctctcttcactgctacatgtgctggaaggacaaataaataattgtggttgtgttcttaatggggacgagcagacacactgatctgaacatctggcccaagtgaagcatggcatatagtgcccttggaagaaaattaggcctcaaatgacagtagcattgaagtgtttgctgcagagttgagggaaacccccagccaccctcccggaatccgagatagggtggcacatctgtcctgacagacgaggagtgtaactgaaccaggaatatttcctccattcctgctctcccactgcacacagggtggtggcacattatccctctggggggtggggacgcctgttgttttggctcaatttgggtttgttggtcacatggagctcttccatttcgtttagctgaataatgagttgttcctagaggagacagcctgtctctccttgttgcccccaaagcccatgccctgccgtggtggcagctggggctgtggatgggaggggtccccaacatggatgtgttgcccctcctccgcatgccaacgcagttcatgtacaaggcccctctgcaactggagagaaaattaattcctatcccgtgagtggattgtgagaaattccacccacgtggagacagcttactgcagcactgttggtgttcggagctcttctgtgccctggctccatgctttcacctacacaagcatcaccttcctaatcaccgcggggcggggagcgtgtggctgtgccccttctctttaatctcatttaatttttattaaacatgctcagtacctgtgttgagaaaaggctttctttatcctaaagattattacctttttaaagtgctcttatattttcatgagtttttattttgtctctgagattttgtattccacattctagggtattctgtaatttggctccttaccaata

SEQ ID NO: 114001 - DNA, 1785 bp, Homo sapiens
tctggctgctggcgtttttccttgtgcgtatgtgggctgagcacgatgtggtaaagcagatccctcaggatggacacgctcagcttcgtcacttgttgattctcttgctcttaaaatcccctagccctcttaacagccacggtgaacttccccatgtgtgcgtgtcagcacaccaatgagccagctcaggtgggcactttcatgccccagggtcttgtggagccgtgaagcggagctgcgcttagggtggggaaggcacttgacctcggccgtcctggccgctctaggtgccttcaggcctcactgctcatcagcaaccagccagaccacgtgggcctcatttggtattcttaggacttgccatttctaatcaatgtttttacttgagtctgttatatgttatttcagaggggggaatggaatgtgttaacacttagtaaattcttcatgagctgcaaccaaagtttttctttctttccctttcaacccacagtgtgccatgcggagctgaatgccatcatgaacaaaaattcgaccgatgtgaaaggctgtagtatgtatgttgccttgttcccttgtaatgaatgcgctaagctcatcatccaggcaggtaggaaccgggtctttccatttgtcacatttgcattgctgcctgctcgtcagtagctcattgctgatgtgtttgatcttaaattgctattgtttagatctaaattaattgcactatcagctttgcaagatatttcccgtgttttgtttttgaatggtgccaggtattctaagactaattgcatcctctgtgattcttagcatgtttttaatttagtttgcaacttcttaaactgcaagctgccaaaaaacaacacaggcattgcatataattactgtcaatttactgttctctgacatattgtgcatagatttgggggagggaagaaatgaacttctgtcagaaacaaggtcagctgggagtctgtatatgaaattttaatttgtatctaatacatggtagatatttgaggatctcaacataccttggcatataaatgtcataagacccaaatggcactaccttcaggttttcttattttacggttcccataaatctacaccattgtattctgaatatttcgcctttttcaaactgtcacatctaagattcagctacactttgtctccataaaactctcggctggagatttaaagacttaccatgtttagccaaatgtgtggtttgaaggggccgtttatcaccagtcctgtggatctcagagcagaagcggcctgctggtactgaggagtcgcgtgggctccctggctgtcgccgtcaccgttcctgggaagctctcctcgcggtgcccaggtgtggaggcggtggcaggcctgtgggccgagcagtccgggccccacactgcagcctcctctgccttcagaggctgatggagcagcggccttcagtgcggggcccttgggattcctggctgccgagttagcgctgcctgctgagatcaggacaagaaaacagatctgccctctgtagagctggtttgaagtggtctgcaaagccatgctgggaagcacagtggtgcccacctctgaatttgccagcagcccccactccctccattagtcctcccactagtaagagaagctaccttgtgcatactgccttgattacctgtagtaagggaaattggttaatcggatcaaggcttgactacttgacatgttttccctttgcatttgtttaaaaaaaaaatccataaagactggagggaagattag

SEQ ID NO: 114002 - DNA, 1050 bp, Homo sapiens
tcagccttatgcctgcaacattgcattgctgctgggggacccaggcacacagaggtagctgcagctgcacccgaacacgagagggtggctgaggagagtggccaggccttcatctctctgacccagagtacgtgctcagtaaatgatcatcgatgaagcaagtgagtcgggactgaaatgtatgagcgccataagtttaggccactgctcatttaaggcctcagaactcctggaagtgttacgtgtagaaggttggcaggctggagagggtaggggagaccttgaagattcccatatttatattctaggtggcttgtgtgatgtgggccatggccggatgtcattcattaactcgtttgacaaatatttattttagcacttgtgtgcatagcatgtgctgggaataccaggggagccagaaggcagtgcttccggaacttgtctgcacgttggaatcacccggggaattgcttacaaattcaagcccaagccacagcccaggccatcacactctgcaggcacagggcacagatctctgtattttggaagcgcctaagggtgttctgatatcagagaggtttgcaagtcacggctgttaggatttataatagagttttagataacacacccaggaaaattcagtaacgatacaagacggccatccagaaacctcctgggcaggatgagggagtcaaacccaggtgtgtgctgtgggcaccactcattccccctcaaggaggatgtcgcctgtggattagggagcgggagcatctaggcaaactggacctctggggtgtgtgttggctttgccaggttcgagagagggaggaaggggatccccttgactctgaactcaggcaggtccggatgtgacccgggatcatgggtggaatgcactggtctatcaagagctcaactagtcattgccatttaagtggatgaatgtttttcttataaaagacagactgggctgggcatggtggcccacacctgtaatcccacagctttgggaggccaagatgggaagatcacttacggccaggatttcaa

SEQ ID NO: 114003 - DNA, 1283 bp, Homo sapiens
aatcctgtaaattactgagtttttttttttttttttaatgcacaggtcaaccttgaacttgggtatgccatttcatgtcacttgttaattgcagggtgggaacccagtagaaataatagagggtgatgcttcccaccttttcattccagaaggccatgagcagacgcttcttagctcgagtcctgacccttgtcttgtcagtgaacagaactgtccgtgctctgaacggctcagcctggggtggcggcagaaggcgttgcaggtctgttctcagtggcagcaggcactccatgcctggccttctgaccccggtcctagcgggagccaccacaccaggctgccacctgttcaggtcagctttggcagaacaaccctcaggtctaaggacatcgttttctttaaggaaaatcctgtgtcactaaaaatgagggatttttaagcaacctggagagttcagaactagaactagagttcagaactagatcagaaccttcattttcctgactccaaattttctcaggccccagtagttcctgtcacatctccatagcagatgaagatcagttgagggtagaataacactatcactgctaaattatttaggcagcaattagaatttgttcagcattatttagggtttttaaacaaacctatctgagtaaccttataatactaccgtctaaaatagatattgtatcagtcttatatcagatgaggtgaaagtcacatctataaaacgctgaactcttaaatctaaccagggatggaatatatcctgttaatttgtcaaacttctagagaaccgcctacatgagacagtaaggattaatcaagccctactaagagagaatttgaaaaatacagttttctaattatacagtctcttctccatggtccaaggttaatgcagttctgaattctgacagttagtaatagaaaagaaaaaaaaaaaaaaccaaagcatatgaattgtcttataattacctgaaacagaaagtctcttctggcaatcaaggccttctaagcattaatctgatattttcagcatttgattcttttccttttaaacaaggttgggaataactggagggttgtgtgtcactctttgtgcttatcaaatatatatgtactgtttgcagatttattttgcttattgcttagctgtagatgtgtaattctaggttgaacattttatctttttttctttttttttttacaatttagactaacttatgaatacttcctagacactgtatctttgaaatacttgatccttattccta

SEQ ID NO: 114004 - DNA, 1074 bp, Homo sapiens
gagaattaacttgttcccgttgttaaacttaagggaatttttagtaatgcttgccacatgtatccagctgcccagcacttgtggccttgctgatttctgctggcaaagggctctgggttttggtgagtgcctctgtgcttggcctcctatcccacccaatggaccagggagccagggttgcttggcctgctgcatctcactgcaccagggagggaaccgtagcatctcagtgtccccaagagtcgggggaggcctcactctgagtgcgttgggtagaagtggggctcttacccgagtcagttcctatgtctacagggatactctaaaaaggatgtaatgctgggaaggaaaatgctgaaaaacctggaattaattaaggcgaaagagttcagcagagcatcttaaacacctttgccagtgtggggcagtgcctctttaaattctctatttaaatttcatctttatttttcagacttagcatattgttaagcatgcatagatgtcacttttgtgattacttagccatttactttacccccttgaacactgacattttcctgactgccatgcacgtgatatatttctttggcatctgaaaggttagtgttgagaaactaatttatcaagaagttaggaggctgatccttcttaagatatgacttcctcacaacttgtaagagcttcttagtaattaagatcaaatttgttctttccgtcctgaaattgaatgtcctctggtttcgttagtcagtccatgaatttgataacttgctgtttcttttcctgcagaatttaatttcacttaaagcttcctgccgctcctcccctgcctggccttctactagttgtggcccgacagcaggtctaattagggacttttgtacaaaactactgttataatcaatggaaaacctttgaacaactgcatagaaaagaaattaagtagattatttttacgaatcaaggggcaaactcagctgtgatcgtgtggggtttcagataaacagagggacacaccagtgtatatatgagtcttctcccacccactaaaatcaaccagctccatgtaagcat

SEQ ID NO: 114005 - DNA, 1062 bp, Homo sapiens
gggttctatgcccacaggatctaagcctcctcctttcttgtaagtaacttctataatgtcacacatgcagggtgacatctcctaattccaaggtcagtgctcttcctgctacctccctgtgtctctcctgtggggcacatgaattcagctgtactgaaatgccaatcattgtctcatttttttttgcagttgatcagactgaggctccgataaaataattactcctcagagatcaggagctcggggaggggtggcctgtgtccggcatcatgcagaaagccacatgcgtggctcactgtaacatttcttcaaaggggagtgcagtggactgaatgtgtctccccccaaattcacatgttgaaaccctaattccaatgtgctgatatttggaggtggggcctggggggacgtaattaggccatgagggtggagctctcctgaatgggattagtgcccttctaaaagggaccccagggagctcagttactctttttccatgtgcaaggataggcggagaagatggctatctgcaaccctgaaaggagaccttgccagaatctaaccatgctggtgtcctgacttccagcctccagaaccatgagaaataaatgtccattgtttctcagccacccagtctatgggactttgttatagcagccccaagggactgtgacagggagcttgagaactgtgtaaatttgagtttaccaaataacatacagcttaatactgctttattaattccgtaagtcggaagtcattagtcctgattgatgccttgtggggaggagggaaacacacactacttgtaacataataggaagatggagcttttcctgggctgtgtctctagagagttatttttaaagggtgtttttgttcttccagtcttgggatcaaaacttcataaaactattttattataatgtagtattaatgtggaaaatgaaaattccctctgctaaagaagctttttattccatccttttcctgaaaaatccaaaagataatatgatgtcagtaacattaagtggcaggaagaaggcaatgttattatactaa

SEQ ID NO: 114006 - DNA, 2187 bp, Homo sapiens
ggggagactcagtggacgcctgtcaacttaaaagtgcagggtcggtctgccttttgtgctgcgtttctacaagcttagttcttcctgtgagacagaaaattgtcacatgccattgttaactgcctcttgtgccccttctgggactgggggtgcactttccttggcttgtgggtgctgccacaaaaaaccaggcaaggagaccgacagctctcagcacctgcagcagctatgcgtctgttttgagttctgcagtccccctggttttattccctgcttccacagcggcagaccagccagttgcaggcaccaagcctttgggcatgtttccttctaggtcggcgcctgcatcgtgaattcagaaaacaagattgtcgggattgggtacaatgggatgccaaatgggtgcagtgatgacgtgttgccttggagaaggacagcagagaataagctggacaccaaatacccgtacggtagggcaagttttatgtcccattctgcttagtgacatagcctggtgagtgcctaattaagaaagttggtcagaaggcatcatctcccttttgtcatcaacaactggaaagaaaagtatcctactgaactaccccaatttcctggccttgtctcttaagttccaaagagagccacggagagaagcatggtagtggccacacaggctggccctgagatccagggctctgctgcctgtgctgagcctggcaggcttcactggcaacctgctggcctgcaccacaccagtgcactgatagtcggcgtctctgcagagggtcacagccccttgcagagatagctgagggatgtgcatggtgtctctgtgggttcctttttttactacttggaagcagggtcggctaaccaggggctggctcgggctttggtctgatgagaagcaggcttcattcagcccatgtgcctgatgagaacatctggctcaagctcattgctggcaagcaggaatcaaactgtgaactagacatcaggagatggaggatccagttgcttcctccagttacaggggatgctgcaatttcacagtaggctgtggtcagaccaaaagccagaagtgaggctgggcacgatggctcacgcctgtaatcccaacactttgggaggtggagacgggcagatcacctgaggtcaggagttcgagaccagcctagccaacatggtgaaaccccatctctactaaaaatacaaaaattagctgtgcgtggtggcaggtgcctgtaatctcagctactcgggaggctgaggaaggagaatcgcttgaactcaggaggtggaggttgtagtgagccaagactgcgccactgcactccagcctgggtgacagagcaagactctgtctcaaaaaacaaaacaaaaacaaacaaacaaaaaacaaaacaaaaacaaagaaaagaaaaagctagaagtgtagaactgtaaacctttggcttgactgtctctggattttccccttgaaattagggaaggctgcttcttagagtttgttgcctgtctaagccccagggaaaattccttcagagattgcctgggagggtccagccatagctttacttttccttgcattccttggagaatatgcaagcaatgctggaaaagaggcaaatcatgctgggtatgcaggttgctgatttttgtaaggttaggccctgtattttatgtctgagaatgaacagactggcgctgttggaagtgaagggagagtaaggccatccaaatgggaaagattgtgtcttcaggccaaggcgtgatgtacgacctttcttctttgttgactctcctggtaggttttcttctgggtttttctcatgaagaatccaagtcaacatttagtctaatttatatatttttactaatgttcctggacctcaatcatgttaaataagccccataaatttctttctaaattgcctaggggcaacttctccatgtttgaaagaaaaagttaagaggtacctggagagagaggaggaactgaggactgcaaagcagtctgggtttccaggatgtgaaaagtagtttagggatgaaggggaccgaatcctcagatccttgatttaacctcaccctccctcgtcggagtgggaagagaggatggagttgggggagggtaagactgtcttctcagcacagcttcagagccggtggtagtggatgactaat

SEQ ID NO: 114007 - DNA, 1006 bp, Homo sapiens
gggccggaggtagggaaggaaggcacccacggcgaatttgcccgctttgaccgcatttagggcggccgcttgtgcagccagccttctggaaggtaggctttgcgcttggtgaagagaagcccccacctccggatctgtgttccgccccagtccattcatcaggaggtgatcacacaagtcaagcttctctagttcccggtggaatgagacgccctggtggggtcttaaggttgaacgtttgaatactgtaaaaaagatgggacctgcctacaattaatctctcacactactgagcgaatgtgcgttgttttggacttccctaaattggcccaaatgcatagccaacacttgaattgcggtgtactaacaacatcattcagcaccaaaccaaaccattcttatttaaaccttgcttcctagcttatttatttcccaaacaacttgaaaacatttgttatactaaaatgtctacatcttactattaaaaaaaaaaaaccaaagtaacacactttgctgctgccgtaattttatgtcactgagatgaactattctacaatacttgtaatttcaaatttgttaaactttcagctaagtagttttacccaaattctaaaaccagtgaggaatccaaaatagcacgcagcattaaatgacgtttattgttccataaatcttcagacttcaaaaagaaacgctaaatagacaaacagaactctaaagcaattaagagacaagctcgctgcttcttccccactgactggcaaggaaacatttggtcatacaaaagccattaaaatgacggaaaggagagttgccactctctagccttttttgttctgatcaagtttgaactctgctgttcggagttcacacaatttacgtagtaacagaccttcagagaattcctaacggtcaagacaatgaaattgcatttatatctgtaaaaggaaaagaaacatgaagattatccccattttagaggtggacacatttagatttgatttga

SEQ ID NO: 114008 - DNA, 1058 bp, Homo sapiens
ctctcgaaagttttgtggtttccctagaagacgaaagaggttgagaaggttgcggagacttttgcaatcttccccgtccagaaactctaaaacctctcggcgtttggcccaggggagctatctggggtcaaggggagggagctggccgcacattccttcgcccgccttcctcccacctggagccgcggccccgcggggcagtgcgtccgagctggtgcggcgacgccggcagcggcggggttaagctcaggaatgcggcgcgaggaatgcgcatgcagatgaggcgggcgggcgcatgctaatcgcatgcaaatgaggggcccgccgctgccgcggcagcgccgcagcttcccggatccgagcccagacggcggcggctccggcagcctgggcgccgcgaccctcggcggccagagggggacggggcggaggaggaggaagaggcggaggcagcggcggcgagggggaggagggttcgctcgccggctccgacgcagacatggtggactgatccgcagcggggccgcgaacagcgtttcctgaggcacctcccgcgcgtggttccgccgcgccccgcgccctgcgcccctcagcccctcgccggcgcccgcgtcgcgggttggcagcctagcccggcagccgcgttcccgccgcgtcccgcgcccggtacctatggaggcgccgctcgccggcgaggccgccgaccatgcctaggagggccgggagcggtcagctgccgctgccccggggctgggaggaggccagggactacgacggcaaggtcttctacattgaccacaacaccaggaggaccagctggatcgacccccgggacaggtgggcgccggccgcgggggcgcgggcccgttcggacacggcggctgttgtcccggagacccggccgcgcggggggctggggcggcgccggcccgcggtgccccgaggggtcccgggagggatgtggggctggctgctccggcggggccgaggagccgcccgtacccgggctcctccgcccaccggcttcccgacgcccctccggggacccggccccgagg

SEQ ID NO: 114009 - DNA, 1097 bp, Homo sapiens
taaatttaaataacgtgccaccagggataacttcgacatttggacttttgtcatttctgaaaattataactttattgaatgtggccctttgggctttatatactttttaggtgcttctcctatttaacattttcccttttctcaatttgaagctgaaatacctaactactttataatctcagttacttttgccctaaaaatgttgtttttgaaagctactaaaaggcaattacaagaaagttataaataacattataaatttatggaacaatccttgttcaattatccgtgaagctacgggcctaggtttccctcctgaaatgagaaaaggcacctgtgctgaggttcggtcttgccgcagcctggctgcctgttgctggcctgatgaaaattgtgacaggcatcacaccttcccagtgtctccagacgtgctagttgttgtcataaacttcacgctccaagccagttatttgacttatgctattgcactttgaaactacttaacagatagtaaatgtcagtgctgatggtgtgcacccaactgcggcttttaaggcacctgtataaatatttgacttttacagttgtgtggtaattctttctgctttctgatacttggagtttcaggtaattgaaataacaataaattcttgaaatatttaggcattctaggttctcttcttcggtttacatgctttactatattatctcagttgtgtttaccggaaaggattacaagaatatgtaatgtctgggtaaagtaaatagaaagtggagtgaaattatatgacttggctatccatatcactacttttttcacaagtcaagcatgtcctttattttaaactcttaatggattagtaattattatgaactattttcaggaaactggataaacaattcattggatagggacaaatagttttgactaagatagctttttatttttccaattttccttgcagctgttaggtcttaaatattcagagacataaatttgacgacttacaaatatttctggatctcagagttttaaaagatactctgttgagatcagagtcaccattatatactcagtttaaatttgattatatttt

SEQ ID NO: 114010 - DNA, 1032 bp, Homo sapiens
aaacatatggaaagagagatgttacacaggccaataggagtgtgtggattcttctgcaggatcaacttacaaattctgaaagaaaaacaacttgatatactatgggtctgcagtacttttgaactgtttaagccatttaattagaatggtcacgatgatttaccttgcatattttttatgttattctgttaaggaaaagaattttgtgtttttgatagtctatcagaatttgttgaatatttctgattatacagataattatgccgatttagtaggggaggctagggcattttataagaacataatttcattcaacaggtagtcatgccagaatgctgaagcattattctaaaatgcttttaagcttttggaggtgaatgacgtcattcaaactttgctgggatgtgatcaaagcttttattgctccacttcttacttttattgactaagtttacgtgagtttctgaatccctctaaacctccatttttcagctctaaaatgaggataatatcatcttcttcataggggtgtttgtgggctcaccattagggcccagcctaattgtattagtgtagtgttgacattccagtttaggaactgagtgaccctggaaatagtagaaatactagcatggacagtatttactcagtgtgtattgtgtgctaggcactctgctaagctctttaactgtgatctcatttcattctcccgttggtcctgtgaggtaggtactactgtcatcttccagttacagatgaggaaattgagtcacagagaagtagcccttgttaagtgtggagctaggatttaaagccagacagcttgactctacagcatgtgtccttaatcattcctttaaattgtctcgacgcttgcgcatgttcaggggtctttgggtggagtgcacagaggggcagaacctttttgcccagtgtttatttttcaggctgagtgactaggctaatcctggggaaatctccctgtttgtgattaattccttgtccccctaccctgcctgcatgggcccactc

SEQ ID NO: 114011 - DNA, 1802 bp, Homo sapiens
cgggaagcggagcttgcagtgagcagacattgcgccaatgcactccagcctgggtgacagaacgggactctgtcttaaaaaaaaaaaaaaaagaattttggacttctttatgcatttctaaactcctgttactgaaaaagttaccacagaataatgtagaagaggaaagggattttttttttttgacaagagttttattcttgttgcccaggctggggtgcagtggtgtgatttcggctcactacagcctccgcctcctgggttcaaggttcaagcaattctgcctcagcctcccgagtagctgggattataggctctcgccaccacgcccagctagtttttgtatttttaatagagatggggtttcaccatgttggccaggctagtctcgaacttctgacctcaggtgatctgcccatctcagcctcccaaaatgctgggattacaggcatgagccaccacgcccggctgaggaaagggatttttaaaggcacagtgtgtatgtaagttgtgagatacaaatgatttatcaaaatataggttcacaatgttttcaatgtcttcagtgattttttccaattattttatctttattagattaaaaaaattcctcagcataaaattattcattttaaccattttgaagactacaccttagtagtttttagtatattcattgttatgaaaccataaacactgtataattcctgaacattttaatcacccccaaaacaaacgaccccttacctattaagaactcacttctcattcatctcccgtctctacagctttttgcaaaaactgatctactttgtgtctctgaatttgcctattctggacattttatataaatggaatagtaaaatttgtatccctttgtatctggcttctttttttcttagtgtaatgcattcagggttcattttgtagcatttattgtactactgcatcattttcatgacttaataatattcgattgtgtagatataccatattttgtactttcattagctgatgtgcatttgggtcatttccactctttggctgttatgaatgatgctgctatgaatatccctgtacaatttttgtatgaatgtgtgtcttcagttctcttcagtatatacatgtctaaaagtggagttgctgggtcatatggcagttctatgtttaactttttgaggggactgctagactgtttaccaccattttacattcccaccagcagggtatgagtgtgcaaattcctccacatcctcaccaacacttctctctctttctctccttctctcctctttctgtctctctcttctctttccttctcttctcttctctcttttctttttttcttttctttcttcttttgagacggagccggtctctcttgcccaggctggagtgcagtggtgatctcggctcactgcggcttccacctccacctccagggttcaacagatcctcccacctcagcctcctgagtagctgggattataggcacaagccaccatgcctgggcaatttttgtatttttagtagagacggggttgggccggtctcgaacttttgacctcaagtgatctgcctaccttggccttccaaagtgctaggattacagatgtgagccaccacaactggcctcacttctttcttttttttaaaaagttattttagtgggtgtgaggtaggatcttactgtggtgttgatttgtatttccctcttcgtagtgttttgatggccttagttgggcccaagcctccccttattctagccttttatagctgttgctattctgccccctttttgt

SEQ ID NO: 114012 - DNA, 1043 bp, Homo sapiens
gttcattatagggttcgctctcctatgagaatctaatgccaccactgatctgacaggaggcggagctcaggcggtcatgcttgctcgcaccacacacctccttctgtgcggcccagttcctaacaggccattgaccggtaccagtctgtggctaggggttgggaacccctgatttattccacaagggatttggactctaggtactgtgtgggacaaaggtgagtcagacatgggtgctgaatttgaggagctgtcttgtatctcatgttacttttttttttgtttttaaaacaaggaaatgcagcatgttacttagtttcccaaactggttctttgaattagctggacctaatggtagtggaaataggtctgttactcttaaggtaagaatgatttcatgggtccctgttcaaatgtagcagcctgtggattctgtatacctcatgattattttgatggaaaatcaagagacatctctgggcacctggctttgccatggcagggcctaaagtagagattgcttttgtggtgtagagacagctcaaccccagtcactcaataaagttaccagataccaggcgctgctatataattcttaagaagagttgtacataggacatgagaaaaacaggcaaaatgaatttttggaagtaccatagttgtttgtttatacttgactgttggaagtatatagtattatgctttggtagttagaaatactgactttcttgtggcatattgataatatttataaaattactaggtgatgatcaagcaaaaaattattccatatattatccttgtgatgcctgtcactttgaagcatgtcccaaagactgctctgtagagctatttttttttttttttttttgctttgtcagtaatttttcctatactttttgccctgatgtcagtaaacaaatcatggttccaaaatggagccagctcagaagtgaggtagtcatgcactaacagagttatgtattgggagctgttttttcactcctgtagctcatgaggaattacaatagttccaatagagc

SEQ ID NO: 114013 - DNA, 1055 bp, Homo sapiens
ctaagtttttttgtactttttgtagagtcagggtttcgccatgttgcccaggctggtctccaactcctggcctcaagcatttctcccatcgtggcctcccaaagtgctgggattacaggcgtgagccaccacgcccagccagatcatttacttttttccttctttgtctcccttccccttttctgctaaatgacatagctaatgatatttctcataggacagcatgactagaaaccagtatttaacttggcagaatgtttaacataacatcagtgccctggtttgctattgtagattgaaagactacaaaactaacttgattgtctaactctactttcagtccttcatttacccctgaaggtatgcctgtagaacgtatgtagatgcattcttgagagatttcctagtgtctcatgtgtaaggagcttgtgtgtgtctgcatcactaatgttttcataaaattgattctaagttatttgagaatagagacctgctttgtgtgtgccccttcatgctctgtgcttagattgcctgtccccacagggacacttaacacggcggaggcctgtacccatagaaatgaaatgtatgcatttgaaggaccttttccttcttccagtaacctccataatttgtccccagcttactttactgacttcaccacctagtcattcactcagtcactcattcattcattcaatcaaactattcgtcacacatttattggaaacactatatgcctagcacatacatttcggggacacggtgttgaatgaaataggtgagatctctgttttcatggattttatattctactttggggaaggcaaacagattctaaagatagtagtgaatttgctttgattaaaataaacaagatgaagtgataatagtgtcggtgggagctgctttgggttaggtgatcaggaaaggcctttctgaggagctggcatttagctgagctatgaggataagaaggagccattcatgtgaagatctggggggaagagtggtctaggcagaagaaaagactaaacagaagtactagccctgtg

SEQ ID NO: 114014 - DNA, 1234 bp, Homo sapiens
ttcactactgtattccaatgctcagctttgtgcaagctcttagtaactattgaataaaagaaactttgataggtaccattattatttccattttaggaaactgagactgaagaggtttaagtgacttgtctaagggcacaaagctgttaagtggtggcagaactcaagcgtgtctgtctgacttccaagctgtacatctaacaagatactgccttcgattcctgctaggaaaggcctttggccgcctccctggctttggaagatagagcctccttcaggatttagctgaagtttcatcacttaaagtttgccttaacaacttagccacacataatcttccagtgcttaattcttatgctacctgtttttagcatctgtattaaaactacatgtgtactgtattttgactccttgaattaaactattactttttcagaatttattattttctcaaattaggttataggctctgtttagttaaatcatgcacaatattatttatttatcctgccttgcaagatacccagtacaatgtcttgtggatattagttgctcaaataaatcctaatttgattctgtcatttctgccttgttccagtgttttcagttcttttagaggctgagatctatatgctataaatcctcttcattcctgtcctgtctctggttctaaaaacggttcagtgttgtcccacagcttctcccaatctaggcttctgtggaaccatctccttttcaaatgtgccacttacaccacctacacttctgcatatcccctcccttttcgagacaagttgaactgatcatgaaggatagagaattttcaaagtgataaagtggagttccagctcttccacattcttcttctttttttttttttttttttttttttgatggagtcttgctctgtcccccaggctggagtgcaatggcgtgatcttggctcactgcaacctctgcctcctgggtttaagcgattctcctgcctcagcctcctgggtagctgagattacaggtgcccgccaccatgcccagctaatttttgtatttttagtaaagatggggtttcaccatattggtcaggctggtctcgaactcctgacctcaggtgatctgcccgcctcagcctcccaaagtgctgggattacaggcatgagccactgtgcccggccacgttcttttctatagtgctttttcattaatttaaaccctgttgggtgtctactataatcca

SEQ ID NO: 114015 - DNA, 1047 bp, Homo sapiens
ccactgcgcctggccggttatggatattttttttacctctactcttatagtcgagcctcagtcttagaggaaaaatagtttctttcagtcgattgccacgttatagtttgctttaaactacttagatttggattcagggtaaagagccttcataaataggaagtgatagaaattcagagggagtgtggcatgtttttgttggatttacttatgctgtgaaacttacctagaagtgtacaggcagtcactaaactatggttaaagaggaatcttttcatttgtacattccttatccctgttacaggttgctgcactttttttttctgtctttatggtagctagaaatatattgtgtatctgattctatgttttcctacatttctacatttgacttggtttgagatcaagtttgtgaattttgattaaatgcctagattatgcatgtgaaaaatcttttgtcctgtgttgctatgagcaacaattgttaaaattaacttttttagaaaatgtggacaaatacatgaatcttaacagatttttaaaaagtcatcatttagcattgtgagtgttctgtctataaaataaattgttactgtgaccataattatcgtggtgaagggaggaatgcagtagaagtgaataatcatcagacacattgacaaaacattcctaaaatgctattcaaatgaggaaagacattatggggctgcagccaagtagccaagcgttgagtccttttagccagttgtctgaccgggtttactattgtgaccaaaaagaagctgtgtgtagtggtttgcatagaagggtcatgatttatctgaaatatctcaactttttttttttttgtaatcctgtctctcatcctcccctgacaacactttacttcattcttaaagactccttttgtcctgatggtgtttgtttcattgctttctaccgtactccagtctgaattttactgactcctagtgattgcttagacttgctatttgattctgttgtgtgatttttgattatactcctttgtgctatttaaactagcag

SEQ ID NO: 114016 - DNA, 1033 bp, Homo sapiens
ttgttactgtgtgataacgcagacttgtttcttttgattcttgttcttgatacctttgtttccttgtatgtttagtgatttttgactgtgagctaagttacttatttttaatagaactttgtatgtattgatcctttgaggcctggcaaaagatgggttctttcagaaagggtttatatttactttttctaggtgctgaggggctctgccagtctggaatcacctaaattcctatctttgcttcgttttagccaccacatagggtaaaattgggctgtaaaacctatctggaagttgtattgattttatgaattcttgggggaggtgggcttcaccctccccctataacctttgggctggagtttcggacaggctctttctttttgcagtcttctggggttctgggatggatgtgagtattactttaccattataagaggatctagtctctttggcatctgaacttaatggtagggttttgcttagtttcctcactttggtcaaactcttgagtgtggttgtagatcctaattaggaaaactcatgcttagctcaggggtttggacattgtggtctgcagaccaagtctggcctggtgttttctttttgtaaataaagttttaatggaacacaacaacatccattcttttatgtgttatctatggctgcttttgtacttcagtggcagagtggagtggtttccgcaggagaccatatggtctgcaaagctgaacatatttatcgtatggtcctttatataaaactttgctgactcctgcgcaaagtcattaacctgatggacaccctatctaattaggtgaaagtctcctttagggccccatttccttttctggctactgctttccttcagttcctggcctgaacattctttattttctcgctagctcatggacaaaggcaagttttttgtttttttgttttttaagtaacacatttagttgtcttaagcaggattgttggtctggcatctagtccttcatgtggctggaaatacgtatgtatttttataaca

SEQ ID NO: 114017 - DNA, 1027 bp, Homo sapiens
aaaaactggtcacatgatagggaggatgcagataactttatttaggtaagctgtgaggttgagacttctgtgatctggtttgggggcatgacaaaatgaataacctgagtgcgaaacagctgactaccaatgagtgtttggggcataacctcagtgtaaattaggatacgtctctatttcctttatttttcattttggttgtttgacttgacctacgttacaggtcattgctaaattactttggaagtaccctttgtcttgattgtgttactgtatgtggatggtgctcaaaattattaaatttaattcagaagtttcaattttgtgaagagatggtgggtattttctaggtcataatacaaaagtgatttgtgatctagctattgggtgcctcaaattgtataacataattatagttagaattgaatcatcaaataaggtggcaagattaatgggagtggctagctttaatgttccaggttatattaattttagataaaatgaaattagtattcctatggacaattgagtcaagttcttgaattactgtattcagttgggattgactcaatttaacaaaatggtactattagagtttttgaggataatgagaaaatggaactgaaattaaaattgtctcttgcactttggacaaaataatttctgtgagcagcaattaagaaggtccatataagagattcaccttctgctctaatttcatttagtaagattgcatgatcttaagctccgtgatattttacttggaaaatgttatgacttaacgtaggtcagtgtcccctgcattatgtgatttggtgtgcgcatatatatatatatatatatatatatatatatatacatatatatattatatatacatatatatatatatatacatatatatattatatatacatatatatattatatatacatatatatattatatatacatatatattatatataatatatatatttttatatatatttttaatatatatattttaagtagtggcacagaaag

SEQ ID NO: 114018 - DNA, 1054 bp, Homo sapiens
ggaacacagaattttcatatggccacggagtgtggttcttctctgtgtgaactctggtgttgatttttaaaaggcatgcactgattcgagaaaacctaattttatatactggagttagacatacctaggaaataattcatcccattagacatttattgagaacctaccgtatgctagacattgtggggataatgatgactcaggttagtgagggagaataaagccttttatacacatagctcgaatacatgcagaaatgataagtgagaagagatacaagtgagaagtgtggcagagatttaagggagagagaggttatttctgatagatgtgcatttgagttgggctttgtgtagagctgtcatatctcccagtctgcttgggtcagccccagtttactccggatgtcctgatgtcccctccaattaacatctttctggtcaaaattgttccagtttgtgtgataaattatatggatggtccccctagctttgagaatcaggtaagacttggcttagtggagatagagaacagtctaggtaaagataaatggcataaacaaaaaacatgggtgatggaacactttggtgcacttagaaaaaacatgtttagtttgactgtagctttgggaacaggaaagggaatcactggaaatgaaggttgggaggtgagttgaggtcaaattttgagtatcctgaatgccagactagataccttgattttatgtagttggccatggaagtttgtgatttttttttttttttgagatgatgtcttgctttgtcaccaggctggagtgcagtgatgtgatcttggctcagtgcaacctttgcctcctgggttcaagcgattctcctgcctcagcctcccgagtagctgggactacaggcgtgcgccaccatgccaagccaatttttttgtatttttagtagagacagggtttctccatgttggccaggatggtctccatctcctgacctcgtgatctgtccaccttggtcccaaagtgctgggattacaggcatgagccaccacgcccggctgactttttttc

SEQ ID NO: 114019 - DNA, 1083 bp, Homo sapiens
cacaaactgccttagattataaacatttctgcatgtgccttatctttccaattagactcagtctttccaattagcctcattgagagcagggtcaagggttaaaaataaaagtgaaaacatttatgttgtgctttaactctttatagaatacttttcatatatattatttggtgtcttttaacaatatattgactgggatttccaaatgaaaactggaagaacaaggtataatatttatgttttaaaatttgatttaagattcactagagtttagttatactaaaagtgtatattggtaatatcttcatatttttatattatgtattttggagtactgaaaaatatactttacataatctctgagcaaatgtaactaaagttttatgagatttctttagaggtaaatttgaaatcagtaaataaacatggtagggaaacttttctgacttttaaaattaaaattggaaacttagtgggagattttaaaactttacgttaatcaaagttatatctgtaaatgattaacaaacactcaaatggttcccaaagcaaagacaggcatcctgtgacccactactctcccccacacttgattcactgtctctacagtcgaccacatttacatatttaaaagtttcttttggtatttgccgctgtgtttttaaataactttatctatctatcttgacttcttagctttggattttgagaactgacttcccgccctggttgaggattcagctttcttactgtgccttcctcatgcacatgtgcctccctcccctcatcctcttggtgttttctatcaccttgtaaagaaatcagtagtctgtgtgtacatttttatgactatgtaaatattattcatggatgacctatctggtgtactatgattgcatttccttttgttttctctgtagttaataatcatctcttttttccattggcttacttctctatattcctattaccaatttgtggccagaattataaatctcctttcagtacattccaacacactgtgtattctgttggtttggaacctcctgcaccttctgttcttaatttcaagtttgtcctggt

SEQ ID NO: 114020 - DNA, 2182 bp, Homo sapiens
atcgctataatgattacaaaatgttttctatttctgtcattactgttgcggacataaaactgagttcatggactggtgttggtctgcagagtagaccaactttgattagtgctgatgcagagggcagtgtgtctacagtcctgtattaggtgaatgaaggtgggttgggtccagcttatgcagggcattgagtgctggaatgaatagcttggcttttattctgtaggcactggggagccacagaattcttgaatgatctgattgacaacattgtgtgtggtagatttatagtgagaatacactgttgatcagaacctggaagaggaaggaagttgatgagactgggtaaaataaaactaaaatttctggagaagtcactccagcacagctaaataaactccttagaggatacaagaacttaagctagcctactccctaaagcttaaacaagccggaaaacaaagttaaattctaaaaagtaccctccacctaatgttttcagaaaccacgcagatagaagatccaagaaaacaatggaggggggaacaggagaagatgctcaaggactacctctctgtggcacaggatgccctccggacacagaaggaactgtaccatgtgaaggagcagaggctggcgctggccctggatgaatacgtgcgattaaatgatgcctataaggaaaagtcaagttctcacacaagctgtaagtacagtgtggctattcagactttggaagtggagactgaattgtagataacagaagaccacttacatttctatggagtttaattttgagtccttttccctcctaagcaggaagagtctctcaaaaccattgagaggtgagggcacaccccagattttctcacccctacttcagataaaagaatccctgtttgggggttatgcatgccttctgtttctgcacctgcctctgccaggttgccttttatgcatttacgagttaatttttaccttttcagaacagtgcaagtagtttggccctttttgctacttttgtacaatatttttagtggggaggaactggaactattacctagagtgtaatttctgttgaccatctgagttgatttactgctccctcatctcacagattgactatttggagctggctttgtttaaagaagcagctgtgatgagctcagaagttctgcttaaattataaattccttgataatgcaaaactctgatatactgctgcagtatagtcctctgaggacatagtgtgtataaaatccagaagaaaattaagcaccaaggtcttaatgacatttctctttacagagttaaaaaaaatggtagaggtttgaagataactttttatatttaggtgtctgatcaatggcaataaaggaattagaaagcaagtattcacagaagcacataaatcttgtttttagcttcagtaaattctaagctgagaactagttatgcaacttgtaaataattagtttttcttttttctctataaaagtattctcaggatcttcatccagtactaaatatgatcccgatattttaaaagctgagatctccactacaagattaagggtaagaagttttaaattgtggttctatgttgacccatatgcatagagtctgaaggctgtggaaggggctttagtgatcagttctcatctccatttggtgtagaaaactcctccccttatctctgatgagtggtccttctaccttgatgtgaacaagttcagagtgtgggatagtctttattattgagacaatgtgttccactattgggtagtgttttgtttgtttgtttgtttgtttttttgagatgaagtctcactctgtcacccaggctagcgcactgcaatctccgcctcctgggttcaagcaattctcccgcctcagcctccagagtagctgggattacaggcgcgtgccactatgcacaactaattttagtatttttagtagagatggggtttcaccatgttggccaggctggtcacattggtcttgaactcctgactgcaagttatctgcccgccttagcctcccaaagtgctgggattataggtgtgagtcactgcgcctggcctattgggcagttttattgttagcagttagaatattgaatcaaaatttgagtcttgtaacttgctttccctcattgtgctgagttttgtcctccaga

SEQ ID NO: 114021 - DNA, 1390 bp, Homo sapiens
ataatattccattatatgaataaagttttattttatttttttgagacagagtttctctcagtcgcccaggctggagtgcaatggtgcgatcttggctcactgcaacctctgcctcccgggttcaagtgattctcctgtctcagcctcccgagtagctgggattacaggcgcatgccaccacacccagctaatttttgtatttttagtaaagacagggttttgctatgttggtcaggctggtctcgaactcctgacctcaagcaatccatccaccttggcctctcaaagtgctgggattgtaggcgtgatccattgcgtccagccgtattttatttatccagtcatcagttggcagataattgtttttttgccactttttggctattatggataatgctgctgtgaacttacatgtacaagtgtttgtgtggacataggtttctatttctcttgggtatatgccttgaagtagaattgttggctcatgtggtaatttactgtgtattttttttttctttttaaaccttttttttttttttttttttttttttgagagaagtcttgctcttgtcccctaggtttgagtgcaatggcttgatctcggctcactgcaaactctgcctcctgggttcaaacgattgtcctgcctctgcctcccaaatagctgggattaaggcacctgccaccacacccggctaatttttgtattttttagtagagacagggtttcaccatgttggccaggctggtctcgaactcctgaactcaggtgatccacccacctccgcctcccaaagtgctgggattataggtgtgagccactcgcccagccttactggtttaattatttgtggagatctagcattgaccttccatatattaatatttatctgttatttgtatcttgagatagtattttcataaatgttttatgtaatttttctcattggcttttgttttatttcctttttattattgttaaacaaaagatttaaaaaaaataattgtgtttagccatctcgtttctgatggccaattccatttattagccatcatacacggttctagcagcatctgggattctgctttcctctgtgctttatgaaagttaaacaatgttttattctgaattctttgactatctatctggagttgacttcttgttttctttaaaggtggcttcagagatgaagtaggtgttgaggattttcagtaaggtggaagtggtagtcaggagagggatttccagaaggagcaagttgacagttgccctttattggcttgcttaaggagctccctgcaagacagtggagaaaatggtgaaaagggaaggcagtcattagtaaaataccattttgctcgttagaactttaatgttgcaagattcact

SEQ ID NO: 114022 - DNA, 1017 bp, Homo sapiens
agagctgtttattcaatatgagttgagaaatgactactgcccttctgccgttttcctaagtttgaactcatccagcaagtcaagcaattttatcttgactcataactttcataaaagcagaataaatattatatatatatatatagagagagagagagaaataaaaactaaccacacaatccaaacattgtaggatactcactagtataaataataatttacttattaaccatttattaaaggcctcccaagctgcaggccctgtgccaggttttgcacagacattacagcaaaacattatgtaaatcaggtggcagtttacttgcctctgtgttcttcagctaaagcatttgcccacgtcttttacctttcttgggtgaagatcaggatcagcacttgataaggtttgggttcagccagcagtgggatcattcaaacagattgaaggcaaaaagacatgcgtttgtttgagcccaaaagtgattagaaatggactgggtttgaagtgagggatgggagaaatcttagccgcctgtgattaaaagagaaaggaggggctgagacgtgcggatcacgaggtcaggagttcaagcctggccaacatggtgaaaccccgtctttaccaaaaatacaaaaattagccgggcatcgtggcgggtgcctgtaatcccagctacttgggaggctgaggcaggagaattacttgaacccaggaggcgtagtttgcagtgagctgagatcacgccactgcactccagcctgggcgacagaacaagactccatctaaaaaaaaaaaaaaaaaaaaaaaagagagagaaaggaggagaaactgcctgaaaagatgattgctggtatatgacagtcagcagtgaaataatcatccaactgagacaattccaaaccacttcctactctctgtttaacttatatgctatcattctttgatattttttctttctttttctcttttcacagaattgataaaaaaatgtctggaggccagagcgggtatgaact

SEQ ID NO: 114023 - DNA, 1053 bp, Homo sapiens
gtataaagtgtcagtgcaatgactgctcagtaaatggcttgtacaccagtcggggcactgatggggaggagactcacatgcagcttaaggagaatgtgaacgggagaaggccaagccctgccccttctctttggcaatgggggagccttgatggatcaacccctgactccctcccagggtcttgctctgtcacccaggcaggagtgcagtggcgcagttatggctcactgtggcctcaaactcctgggctcaagtgatctcaccttagcctcccaaggagcagggaccacaggcacacacatcaccacacctggctaatttttaaaatctttaaaatatttttggtagagacagggtctcgctatgttgcccaggctggtctcgaactcatggcctcacatgatcgtgctgcttgtcctcccaaagtgtcagattacaggcatgagccactgcacctggcccaactgctttcataccagttggccacaccactgctctctttgctgctctctccttccctgacttactaatgccctagtctctgtccagcctgccctggggttcccattttactagcggacagcatctaaaacacattggaataaaatgtatagtgatggcatctcagacatcattcacctcagtttttttaaagggaaccccccaggcatctttcctgtcacctacacaggcagtcacacgtcagagctggcctctcgtggcgcccagagcactcagcttttgaagcctctgtgtacttggccttcacccttttgtcaggtagctgggtatgctcactcacattttaaagatgggggaaagaagtgggtgacagctgagtgcagagacaggcccagagactggtgtgcaaggctgctgctcccactccggcctctcaccagtagaccacacctctttctggtaaggtcaagttaggaaaatctggacagcatgtcaacaccaaatttggcttaggctgtgtttacctttctcaggagttttaagtatgtgcatacctcttctatctttttttttttagtatggccaacttaa

SEQ ID NO: 114024 - DNA, 1019 bp, Homo sapiens
gctgattaatgaaaaagaagaacttttgaaagagcttcagttcgtcaccccacagaaacgtacccaagatgaattagaacgcctagaagctgaaaggcagcggctggaagaagagttgctgtctgtgaggggaacaccaagcagagctctggccgagaggtttgttttccttctggaaatagggcagcttaactcttgtgggggtgtcttaactggatactattttccctgggtttggaaatctcaattgcatctgttcttagtggactgagaaacagcacaaatggactttctgtagaacaataaagtgcaccatcctaatgcccgacaggataagttctgtgttttaggaacgtgcaaaacctgtgacagatgttgaataactaaggaatgctgacataaaaccaggaatgtacatcattgatgaagtctgataacaatagctataaactattgcactccgataagaaaaattatctagactgttagagcaactgaagcttcctattctgggttttattactcacaggaatgcaaaagtttattgctagtcatttcacgaggaaaagacagcttcctccctgtgataccctaacaggtcacaacgtactcacttgcattttgtttgtcagttgcatccctcccgtgaaacaggtgaaactgtaaaggaaaatactctaggcaattttcccatctttctctgggaaggtgtgagttgattattccatctaaaaaaatccagttctgcaaaacagatcagctggaatgttaagtgaagggacctctgtgtgtcagtttgacatgaacgcatctgcataagagcctgggtccaggccttgatggcagaatgggttggatacctgtttcaggacagaccagagagccgttgagaacgaccgcatgtacatcctttaggccagccagtaaacagcagtgcctgtttcagggtgatgggaaagaaattcacattgatataatttcaagtgacctggaagtaagtttaaaacacccagccataa

SEQ ID NO: 114025 - DNA, 1077 bp, Homo sapiens
tactcagcccaaccaatgagcagacatttgctcttcggctccccagctaatgtgcaggcacttgttgagttggtgcgaaccttcctgacatatatagcaatctttccttaaacccacatgtaaaagccttggcctaaataatgacactgctaaacatgacagctagtatgaaatattcttaaaattgttcttttttttcccaacctcaaaagttattttttgattattaattgtgacaagcagaaaagattttcttctgctgaatcttcggcctcccagggacagtgagctgtgtcttagtaaggctctttaatcaacagcagtgggcttcaggcccactaggttttcattgctgaatctccataattaatattgatatgaaatacaaaataatatgacattcctcagttctgcatttgaattacagtttttctaacggagaaaggcatgttttagaatctagattagacaagcctggaaatgggggtggaggggatagacttagcggtattctcttcctgggatttaaaggaagttacctcacgctctttctaagaattgtgggtcctcatacaatgtgtgctcagaagagtcactttaaggtagtattagaagttattgtttttctataactcttcctctgaattttacaaagcacgggactcttaaaacagtttgtcgtatctcagaatttggagatgctagacagtgatatttttgaaccgttgtttcatctgttttaaattttcttaacaatatgctactgagcctttctttttctctagtaggataatgtattccattcctgggaggtgatcatcagcatctcttgtttaatactcaggatgaggattctgtgagataaagtcaccagtatctacttagtgtgttcccaccttcccaggctcagaaataacttattttggaattggctgtccatggggcaggtgggacgttaaattcgtctgccctacggattttcttcctcttcactttcctatcatgtgcctttgctgcagtctcgtggtgagtggaggctgggccattgcatgctcaggggcgtagtcagctcgggtg

SEQ ID NO: 114026 - DNA, 1061 bp, Homo sapiens
gcacttcagcctgggagtcagagcaagactccatctcaaaaataataacaataatttcacatttacataaaaggcatgcttagtcattaggtcttcgcaaaatggtatctcacaaactaatcccaggattagcttttaggttgggggttatttcttacttagtcacagctgaaaatataacatatccccatgttttaaaaaatccagcaatgctttatgtcaggagaattgtgttttttttaccctaaaacaagctcattcaataatctttattatatcagaacaaatactaatttaaacattttattttctcttccttatttttttttctttgttttctttcacttacataggctggaactcagatcagcctggcagatttaccattttccagtgaggttttcactctatggtataacttgcttccttccaagcaaatgccttgcaaaaagaatgaagaaaatgaggactctgtatttcaaccaaaccagccgttagtagattctatagacttggtgagtcaaaattagagtataatatgaaagtaatgtgaaatacatatatgaaatacatatatgaaagtaatatgaaatatggaatgctacgagaccaacatgcttttatcactttcactgtccttccttttctcctttcacaactttgattttcccagcttcctaaaaaaaaagaaagttaatttccagctttgtttcaaatatggtttataaaaggagcactcttttctgctcacacttccttgtaaaaataaactgacataggggcttcactggttttaagtgatcatggaaaaaaccttttaatttaaatatatacttttcatgtattgtgttcacattgtttgattccactgtcaggttatacatttggcacttttatattttgcagatttgaaattattaagccaaaacagtgtgttagcttttcatttgtaacatcaatagccataagtattttctattaaatagttttgtgaaggccaggcgtggtggctcaggcctgtaatcccagcactttgggaagctgaggcaggcgaattgctt

SEQ ID NO: 114027 - DNA, 1029 bp, Homo sapiens
ctttatcatttcattcagttattttagcatattattcataaaaacttaaatttttctctcaatgcctttagtgtatggatcatctgtgggtttgccttatttagctattgtttttcttgactttcactctttagttcctaatgaaatactggatgttacgtatgagaataactgatatcttcctccagagaggattttctattcttctgaaaggcaaatgacaatatgggtagcttacctgaatcatgtggggatgtgaattccagttttactctccataagactgaatgggacaatggaaatatctgcttactattttagcctgatagcagctgtttttttttttttttttttttttttgctttgtttctcagcttcttgctctgcatataggcagcttaggaatggcaaatgccatgacaggaatatcatgtagaatattgagctcactttacagttcattttctctaacctcttgtgagttgactgccttggtagtcctgaactcaattttagtcttcatatcctactgacactgccactgttctaggcagccacagtctgtttagcccatgtacctcaccactagaattgacaaatacgctaagggaaaagagtggccatggctcaccttattatatttctgttctacctgggatcttggccctctagtcctgattgcctttgttgctcttcattgctttaaaacatctgagaggttttgcttgttttgggttctattttattcagctttcatatttgttttcagcaggagagttgagtcgtctttacagatagaagtgtaaattcccatctgctgagtttttaagtcattttttcaagtatattatgttaattgccgtatgctttacattcttcaggatgcagtgtcagccttacttgcaagaacatcagctgagttgttagctgtggaacaagaattagcacaagaagaagaagaagaatcaggacaagaagagccaaggggcccagatggagactggttaaacacttatttcctttgctgtt

SEQ ID NO: 114028 - DNA, 1262 bp, Homo sapiens
tgagtaattttccgtttcatttttgagagttcttaggttttcagatgtagtaaaattgtcacatattgcctgtgtaattagatttctaaaatgtgattaaaatgaacttaccccaaaatcaacatatgcacagcatgagttggtcatgtgggtgttggctcctgatgggtgataaaaaggacaccagcccactggctgccttgcttgccctcctgactttagtccacaatctttgaagcttcataggatgtctccagggatttctaatcagtgttttgtgtgtttcttacatttttattcccttttccaggctgaacagtccaaagaagagcagaagcaaggtctgaatgcagagaagttgatgaggcaagtctccaaggacgtgtgtcggctccgggagcagagccagaaggtgcctcggcaggtgcagtccttcaggtgaatagccccatccaggacagcttttgggttgccctcacggggtctgattgtgtaggaattcacctcagtgcagtgaaagttaatatgaggatccgagacagaagtcctctgttctctaccttgaatatataattttccatttgcacctgaggtgataaatgtgactggcagagttaaaggctgatgaaagcctaactccccacaagaacccagggtgtccccagctcttagtagctgttagcacatctcactgggctatcttgacacaggatacaaaggtacagaaaactcagacatctttgggattttgttcgctcattttacagacattccttgggcagccccagaaaccttacaccttgtcaggctctgagatgtggaggctaagaacatgtgcattcgttctgctcttctggggggctctaggctgtggcagggataggcgggtaaccaggtcattgcagtgcatgtggaaggagctaactaaagggataggtagggacctgtgagagatgtgggaggagcctcagtcagtatggggcaggtgctggggctgcgggcaccagcagaggagattataagagaacccatcatggaaggatggctgcaagctccttaggcacctaggggtggcagttttgagtgggacattgaggcgggaagaacagcatggacagaggcacagaccttagaagtcagtgccaagctctggcgcatggggagttgccagctggtgagcctgcccaggagaactgggctcaagttgcacaggccttggaagctgtgcagaaggcttccacccgtggtctctgacgggcggc

SEQ ID NO: 114029 - DNA, 1075 bp, Homo sapiens
caaagataagcatcccatccctgccagctgatgatgtgtgattacatgacttaagaaattattttttcatctgttcactttcttagggagggtaaaagactgaagatttgtgtttttgttttggtgtttggttttttttggtaacgtaactgtcaactcttgaagaacttttatttcacatcagattttcaacacattaatttgtaaagtaccttgagtgtaatttttatatgcttaaaaaagaaaaaatcatataagaaagatgggataacctggtacacaaatgttgcccagtatgtgcgcattgccagtggacttcattttgtaaaaatggaatagaggcagtaccccacatgtgtactgttgagccggctgttgagaaacaacttggttcagccggtggttttgcttctcctttgtgttcctgtgagtaggctgtgccgatggcagcagcgccacgtggtatctgtgcgctggcgaggagaggagcgctttccatttggaggcagtgtgagcacacgctggagtgcagcgttccaaagtccgcccgaaatggatgctgcgtccacggccatcacctgtgcgggaacacctggtttccttaagacaatttcctttttgtccttttatatttttctaaagaaaactaagatataaactaccaagtgctcttaagaataaaaataagaataagaatacaaaggagcactactcttggctacacgaaagatcttgggattcatgacactgagggcagggagaagaaagaacaccagccacgcagagatacaaataagctcatcaaatgagcagctggtttgtctcactcagcctgaatttgcattaagtgttcaaaagtgagtttctggcttgcactagtgttttgccctaaatctaaggatggtgcctagtggtggccctgtgttctgaggacagagagagctggaggggtggagggaaatgcatcggcactcatttggtgtaaccaagaagagggggaaagatgtcttgatagaatcaaagttgccaaaaacaaagaagagtttatcaagcagatttctaacatttagtagaa

SEQ ID NO: 114030 - DNA, 1041 bp, Homo sapiens
aactcactcctgcgtttcagaaattcctcaggctacatataccacatggcatatgaagcaatactgaactacagatctagtttatttatctgcatgcctttctgtcaaattcacgcttgtgtgcataaacacttttttttcttatatatgctttctgtgccgaggaaagttcagcatttggactctgcaggttggagtcagcatttctgtttattcaccactaaagtagatatccccatgttagcgatttttcattgaacaaaggaaaggttttattcaaatgacctgacaatatcaggatatcaagaaaaatgtctttggaattgtttttctttttttaatacgaaggttttgagggaaaggatgagagaagagattggccaccattttaaatctgagaggatcacaaggtactgaaaactcttcagcctcataaaatcttgccgcactgagtgcctggtaatatcctaaaaacaaaccacttctgttcaaagaagaaaaaggtcattgttgtggaaataacactttgaggttggcttagcatgtggttttgctaaagtagaacacttaaaattttcagattgttagtttttttctttaggaaacagaaactaaagatcatttctgactaccaacagcaacaacaaaaaaaagaaaaacagaaaaaagctttctaatatgaaatttacacattaaagcttgaaactgactgtattggacagccaccacattaatttcaataaccagatcaatgaagcttgtttcacttctacctgtataatgcttaccataatcattttcttttagataaaagatttttccttcattattcagattttagagggaagtgggtctacctactgtagaaaaatagtgaatgagaaaacgtgagcatcacaggtttagctacaaaacaaagaggtctttgtcatcacagttgatacaggatacatctctggccttgtcggagtcttacacttgaggatctgctgtcccatcttccaggtagggacactgagtttgcatttgcgccactgcata

SEQ ID NO: 114031 - DNA, 2410 bp, Homo sapiens
gatctctggtttccaaaagcacttccttagcaagtgtgtcccagttggcttctaagagtagttctcagactagcacctcacagttgccttctaaaagtacttcacagtcaagtgagagttctgtcaaattctcttgcaagttaaccaatgaagatgtgaaacagaagcaaccttttttcaatagactatataaaacggtggcatggaagttggtagctgttggtggctttagtcccaatgtgaatcatggagagctcctaaatgcagctattgaggctctgaaagcaacactggatgtattttttgtcccactaaaagaattggcagatctgcctcaaaataagagctctcaagaaagtattgtttgtgaattgaggtgcaagtctgtgtatttgggcactggctgtggaaaaagcaaagaaaatgcaaaagcagttgcatcaagagaagcattgaagttatttctcaagaaaaaggtggtggtaaaaatatgtaaaaggaaatacagaggcagtgaaatagaagatctagtactccttgatgaagaatcgaggcctgtaaacttacctccagcactaaaacatcctcaagaattactataatgtgtccaaaatatcactgcatacaatatctggtatttgaagagaaaaactgacttttgtatagtataaaacacaggctttcacaaattttgtattgctttttttccagttttgcagaaaatttacattctagttctcttcacacagtagcagttgtaaataatttatgaatgacagtacacattaaaaggtatgcattagcagcatattagtatgctgttttatttgctgaagaaaatactgtcttctatttttaatgatacattaggtacgatgtgtagttcggtagagtcctaaaatttttgtactactttcaatttggtgaaaatgtattaagttgtctaccatgttttcttttctagctgaataaaccacatcaaaggaaagggaccacagtatttgaatgtttgaaagtctgtaaagcttaaggttttaaaaatgttgcccgtaatgttgaacgtgtctgttaaaaaataaaagaaaaaatagttgcttcaaactatttttatgagaagttgtaagcattttttagatataaagcagtataaagtacttgttattttactctgaagttgtttaaaattcaccatgactttgaccgctgaagattctttaagcgggttaatttatgttttgaggtggaatacaatttacacttttttcttaaaaacatgaatgtgggtttctatattaagcatattttgtgactactattaacagattgatttgtttagatattaaatgctttaagctattttaccttttcaagaagttgtgttttttttctccaagtcagaaccaattcctgcaaataggcttcccatgacttgtcattataaattagacaaccaggtaattgtgtgatatacatctttatttaatttttttttttacagcaatcccctgagccagaatagattaaaagcgattcccttcaattttcaaatctagaactggatggtttttgtgtttatgcatcttttagaataccggaaagaacagagagccgtgttcagctcttgataatgagcctattcaatttaactacattcgttaaaatgaagtggaattttgttttcgtcttaggtgattctgcctgtttgtctgtcattgtatattctgtttactttgcttcaaactggccccaagatgttatttttgtggtttctggctttctagattctatttttagatactgcccattgagcaataatggtgataatatagagagaaaagaaagacctttcatgggccagttgtgttggaataggaaaatcaaacgtaagcacaatttaagtatgtagcagttattcctattttgtattctaggaataaaaagatactttaattttttatgctagaattacataattacataatcagatgttttaattttaccatataacctttaaaaatgattcatttttgaggatatttaattggataccaaagctaaaatccatatactgtaagtgggttgcctttatagattgcgggacacaataacatgaatgtattgtgaaagcacttttagttacctcactttcctcagtcttggaatgtgtattttgtgggataatgattatcagaaaagcaaaaaattacaacgaacaaataaatttatataatatatccaattaggtggtttggtaatttcctaaattggcttgtttcaagttactatgaaggttattgagaatgttttatagtgacttttgatgtggaggaagttgtttagtgtacatttatgataatcctatttaaaaacctagaaaaatgctcttggttaataacatttaaagaatcct

SEQ ID NO: 114032 - DNA, 1036 bp, Homo sapiens
ttagtgtctgtatttagaggatgggagagaagaggtatcatctagggttttggcttgggccacaggtagatcttgttaaggctgtacgaaatagaaaatccaggaggtaacgcaggtgtgtgggggaaatgatacaaatgtaaatcatacaaggatatgaaccctgtagattttacaactttgagctctatccttcttaggccttctcttctaagcagcataaactactgctgcctacatgttgcctgttcataaaggctgaggcaggggagtcgcttgaactcgggaggcggaggttgcagtgagccgagatcatgccatttccctccagcctggcgacagagcaagactccatctcaaaaaaaagaaaagagaagaaaaaaacaaagaactttatgcaccttctggaataacaaaatgcaaatgtaatgttatctaccaggatagaaattggaggctagaatatgttgggtagggtagagagactagagggaatgatttagcaataaaataggtttaaatatcttctcacgtgcccagacttaattagctttgtattattcctattagtaagccaggaattagtactaggtgataagcaaggatgtgcagggccttgtgaggaaaagagttactgtagcagttctggatgcttaccccttgcatgtctccaggggaaccatctttgaccttggccaacccctggattgcaatccttggagtgttctttatgttagtgatgatgattttgttgtatacacctggagcattggaccattccatactggctcgccaggttgcgttgcacaaacaccaagactgataaataggcacctggttttattattgggcccctgagttttggttgccgtagccaattccatagcagagtatgagtacatgaacagcctcccacaaaagccttaaaccctgagactcaagtgggattctgtgggcagagacattccacacgtgtctatagtttgctgagagagagacagaattcctgtgtagctgcagacaaaggacaacagaa

SEQ ID NO: 114033 - DNA, 1108 bp, Homo sapiens
aattttttaatgctgaagttatcttagatcaacgatttctccaaaggaaggaagagcaggcaacaggcagctcaactgggtagctggaggagccagtgttgctgatggtagtttatcctaaccatcatctatgtaaggatggggaagaggatggagatcactattacagatcacctacagaccagcttttttacaggtgatagtattgggacgcagagaagttagcttgcccagtgtcatataacaatccataaaataagtatatacctaaaagtttaagagttaaacaaataattatcttttttctggctgacaattattgaggggagaagcaggcccatgggaaaaaattaagaactcggatatcataaaatatttttctgtgaagtctcgcagcaaatttaacatctctgaaggaaaattagaatttcctggagaataatgtttcaagtaaccacccagtcaaaagtactagaaactgtgtatcctttattcttattttaaaggatcaatgccttatgctttcagcactagctaaagaatagtcttttaaaaatgaaactaatgctgtcggctaggtgctttttgctaaatctattgtttatttgaagtacttgattatttaatgaggtcttattggagctattgttacattaattgctcttagcatggttaatccaatatttgataggtattgattatctttcatgggtaacagattttttttttttttttgagacgagtctcgctctgtcaccagggtggagtgcagtagtgtgatctcagctcactgcaacctctgcctcctgggttgaagcaatactcctgcctcagcctcccaagtagctgggactacaggcgcacgccaccacacccagctaatttttgcattttttagtagagatgggttttcaccatgttgggcaggttggtctcgatctcttgacctcatgatctgcccgcctcagcctcccaaagtgctgggattataggcatgagccaccatgcccagtaagggtaacagatatttaaaaattatttatttccataaattgacattctctgactgttttatacatgaaaccagtatatctcactttacacaata

SEQ ID NO: 114034 - DNA, 1056 bp, Homo sapiens
tacaggcgcccgccactgcgcccggctaattttttttgtatttttagtagagacggggtttcaccgtggtctcgatctcctgacctcgtgatccacccgcctcggcctcccaaagtgctgggattacaagcgtgagccaccgcgcctggcctttttttttttttttttgagatggagttttgctctgtcgcccagaccggagtgcagcggtgcgatctcggctcacggcaacctccgccttccgggttcaagcagttctctgcctcagcctcccaagtagctgaaatgatgaggggcgcctgccaccatgcccggctaatttttgcatttttagtagagacagggtttcactatcttggccaggttggtcttgaactcctgacctcaggtgatccacctgcctcggcttcccaaagtgctgggattacaggcgtgagccaccgcgcccagcctctttttaatatagattaatgagtattagttttgtgttctttcttttcattactttatttctaactatactttcatattagataatgtggtctttgtatgaaatagtttttaatgtatatgtaccaaagaggagtatggtttcatggtttgagttctaatttcaattctgtaaaaaataactaccttggaaatgttgtgtctgctaacacatgataacgttctcatttttcttttcctttttttagaaacgttaaaggaaattgatgatgtctacgaaaaatataagaaagaagatgatttaaaccagaagaaacgtctacagcagcttctccagagagcactaattaatagtcaagaattgggagatgaaaaaatacagattgttacacaaatgctcgaattggtggaaaatcgggcaagacaaatggagttacactcacagtgtttccaagatcctgctgaaagtgaacgagcctcagataaagcaaagatggattccagccaaccagaaagatcttcaagaagaccccgcaggcagcggaccagtgaaagccgtgatttatgtcacatggcaaatgggattgaagactgtgatgatcagcc

SEQ ID NO: 114035 - DNA, 2460 bp, Homo sapiens
attgaatggtttcacttttcatgtgtttcacttacctataaaccaaaggggaaatggtattgcccaaagtgcaggggagataatgagaaaacaatggacaaaagtactgaaaagacaaaaaaggatagaagatcgaggtagtaaaggccatccacattttaaagggttatttgtcttttatataattcgtttgctttcagaaaatgttttagggtaaatgcataagactatgcaataatttttaatcattagtattaatggtgtattaaaagttgttgtactttgtctgtgaccttaattttctgcactgagttaccaaatatttccaaccaggtagtcttcagatcacctgatgaaaggagcagggaacaggaagagggtggtgtaaacattataaaaatttcacaaaccatgcctatttcattttcacttaaaactgcaatgttattttttgggtaaacacaaaagtttcactagcattttagttatacatgcttaaaaaaatgttagatgtagtgggatttctcttaagcatcaaatgatcttgggtactttaaaatacagacactatgccatttgagctgctttttccctagtcctatttatacgttggcttgttcatctctagtcttctaggagtttaaggaactggagataagagtaatttgggattccatgtggaataatgtgctcttatgagagtacgtgctgctgtcttttgcttagtagcattttgatccactgtcagtagcccatttgtcaatgccttgctgctgctttgtagatatacttagtctagtgcttaataagggagttgttttgtgttttcttttaattgggacaggtaagagtagttagcataccaaaaatatacattggcttacattggcaaactttgggttatatagtatcacggctcaaggttgaacaatttaaaaatacatcttaattaatagtattttccatgtgacctgctgccaggatgcgtagccacaggcctatcagtggaaaggggcatatagtagtctttaaatattgcctttatgtcagagagttgttttaaatggttttgctagtggttattgttcatttctgtcccaatcagtgactattttaaataatagtgtatttactgtcttaacttctagtattggtgctgtttgatgttttcacatttaattaacttatttcatcatcataatgcaattaatgtatttgtaaattgaattttccaagattctgatatttgaagggtaagcatcttgatggatatatgtccatatgtttagagaaggttttggttttgggggcagcagattgactagttctttaaatctgtgtgtaacgtatgttttattcctcatttcttcctaatctgatgatcttgattctttttgattaacatgaaaaatcctgtctgcttgttttgggaaaaaaaaatgctttttttctcttctagctctcctgtgtgacttttaggcatgtcatttcaccttgtctgggtgtcaggtcattcacctgtaaaatgagttggcttaaatatctccgagattccttggaaatttctactatttgcactatagtgaggattttaataatgacatgacttctcttttcattaattttgtccttcattctgaggtataaagatagtttaaaggtgagtttggagatgggtaaatgtgcaatatttgttagcttctgtcctaagaatatttggattcatgactagagctagttgattctattaccttttgagtgagaaatgttagacagcatgattaagaatttagcaaatcctttctcatcaccataacttagctgagttgtaaggaaatccttttgagaatatggcattttgttttagtgattacaaccttgttaccagaatggagctttttacttgacaccattaaaaatatcagtatggacaaaacccccaaagccttcagatgcgacttacatagaagtcaccactttttcatacgtaaatctgccttggcagatgggagaaaagaaacgacttcctaatagaaatgccaaagtttggattagacttgacgggaaaacgaacctggaaaatcctggaaggtgtgctctctttaagacctaatatctgaaacagttttatgacttttttgttttgttttctacacatcttggaaatagaagtcttaagcatgcgtagcattaggactggaatttcttttgttgagtattctggatctcatatcatggttaccaactcatactgtatacaccagtggttcccaaacttaacgttggaattacctgggagtttcaacaaatactgatatctgtgccccaccctcagcaattgtgatctaaattcatttggaatgtggcttaagcattagaatttttaaaagatccccattataatatatggaaatgttttggaaccactgccacatttcacagttttcaacttattgaaag

SEQ ID NO: 114036 - DNA, 1096 bp, Homo sapiens
gtggagcatcacctgggagagtaggagagtgaatggccccggaatgccaggactgtggccaagctgcaggtttgggtcaaaacttcacatgagctgactactcattttgttgcctggatgcagacatgaaaaaataaacaaaaaataacaaattttcgaaatctctacagtacaccagaaaaattgcatctccccagtccttttcatatacctattaggtggcttcctctggggttctgtcctcattccccctcctgaaatggaaggagcaaattttcaaggagcagttaatgtaagtaagctagacggctagacggctcttcagcgctgtctgaatcaagtacttagtagttttatgttgttcaaaatacattttaagtgaagttagttattttgggacttcctttactatattgcctaaactacatcaatcagagaaaccacagctccttcatcgtctcctatttcaatgcgagggaagtggtctggaccaagattccagagatgtggactcaacctgtgatcttggacaggtcacttgtcctctttggcctgcagtttgttcagctggaaaatggctgatttaatatatggttacctaaaagtgtggctgttattcatgtcttaacattagtccgaggaaagaggtctcctggtcacaaacttactaattgggtagtttataaaataacagctttaattcacgtgcgttgtaagtacactttaaagcagggctttctaaacttcagacaccacagacagatcttgatggattttgccatttctgcacaccattctaattttatatttaaaactactatgtgcttagtacttttaaagtcaactcactgtttgatgtaaatttattttaaaaaggaagcatatcactttggcaaatggaaaattagtatcactttctgcaactagaagactaccttaaaatgtaataaaaacagtgttattaaacactagctatgcagtatggccagtgaagagagcccaaagtctatcctttttttaattaaaaggtgtgataagtaagtaacgttaggtaagggtaaaagacacgtaaacaccaaattgagtctttctgcat

SEQ ID NO: 114037 - DNA, 1932 bp, Homo sapiens
atttgcagccatgcttagacctagtaagcattttacattttagctatcatataccctgactgcattaacccatgtgtcttaaaatttttcttccgggaaccaggatgttctaggtaggcacacgtgatttttctaaagacgtgtttaaattgtcaagtgttcacattgagaaaagctctgtaaagaaaaaaaaaggttttaattaaatttccaaataatagcaagttaactgaattgtaaacctaccttggaacctcagatcttcaacataaggctgataatcagatcttccttcccaggattttggttataacaattgaactaatattacgtcctttgatctgaacttttaaaagagtaaaaccaataatgtgttaagggcacttgattttaaaaatgaatcataataatataggattcttttatttcataagtgtaaaaattatcaacccacttcaggatatagctgtatttagtgtaacacaagttgtaaggtatgaggctgagaattatttctttttttttttagacatcgataagcaatatcatctcaattgaaactcctaatacagccccatcaagtaagaaaaaagacaaaaaagaacaactttcaaaagcccagaagcgtaagctggcagacaaaacaggtttgtgtgtgtttcttttcttttcttttcttttttttgacagagtctcactcttgttgcccaggctggagtgcagtggcatgatctcagctcactgcagcctccacctcccaggctcatgcgattctcctgcctcagcctcccgagtagttgggattataggcgcatgccaccacacctggctaatttttgtatttttagtagagacggggtttcaccatgttggccaggctggtctcgaactcctgacctcaggtgatccacctgcctctgcctcccaaagtgctgggattacaggcgtgagccaccacgcccagccgtttttttttcttttataacccagataaatggattgcttcttagtgtgatatggtggatatatttagattaattcttactctttcttcttggaacatttgggccagtgaacttttgggtcactgaccttttgggtcacatatgtatactgaaaatatttcgagaggctgaggcaggagaattgcttgaacccaggaggcagccgttgcagcaagccgagactgtgccactgcacttcagcctgggcaacaacagcaaaactctgtctcaaaaaaagaaaaaaaaaagaaaatatttactactacttcatcacaagaggtcaccatttgaaaaaaaaaggtaaccgagtggcaaagtaactataaatgagtctagagattgaggagcatttaaatagtctacaaaaacatgttctacctggagctctaacatgtttgggatttgtttacctctttagtagctgtgtgttattaaaaattttttgaaatacagttttcatttgaaatggataccagtataccattaggtcttagtgtgataagtaatttaacatttttgcctgtagttaattatacaacaataatatttaagaatagaattctcatatgttctaaacaagagttctttagaagaagataataaactctagctcatatcaacaataatatttgattgcttttctttatttaacctgaaaacttgcaaattgataacagtctgtaaactttttcacagttagggaaaatgaggacgtcatttgtgtacttgcacatttacacttatgtatgtatctatgcgtgtgctactatgtcaggttaaaaagtttctctttattgagaagaaccgacccttttattttggtgagggcctttttttttttttttcttttttcttttgagacggagtctcgctctgttgcccaggctggagtgcagtggcgcgatcactgcaacctccgcctcctggg

SEQ ID NO: 114038 - DNA, 1479 bp, Homo sapiens
atggtctcgatctcctgacctcgtgatctgcccaccttggcctcccaaagtgctgggattacaggcgtgagccaccgtgccaggcctacatgattatttttctttagtgtcatgtttgtgtcaagaaggcagggagcccagcacaagccctcttttctcttaatgctcgaattcaagctgcttttcatttctctattcccagcttttggctgagtccccatgttattttgtgtcagacttccttattgacctcatctttccttgctggaggtagacattggatcaccatgaagtggagtagtctgagccagcacagctgatttggaaggaatgtgaggtttcaactgcatccctcagggctaacactcaaatctacagcatcctcttcccactctgtggcactcagtgcccagactcaagtggctgctgtgaagcttctgtttaagaattgttctctgctttgtacttcatctacaagtgaggtgaaatgcatcacagcaatatgtctttgaaataaacaaagcctattggattttagataatattttatttgagcagttttacaagaacagaagctggaatggtgaagaatataagtagaatttacctggaaatgggctacttttttttttttttttttctttagcaaagtatttgagacccttgacatcattagacatgcatcatcgttttatgcattcagttatggggctgatagaaactctttggcttcagtcattctttaaatgggaagtatagcttctccagggttgagattccaccttcaacacttactagttcttactgaatctgtaagcctgagtttcctaatcaaaaatgggaggtgtgtatattgaatgagatcaatgcacataaagtgcttggcactcagtaacaggtggtttctgctcctgtcaggtaacttttcaatttctgccaatgtttgcagagaacttcatatgagtggtacattcctaaagggatcttaaagactggctggatgaataagcatctgaatctggtgccagccctggtggttgtgttctatgaactggactgggatgagcctcagtggaaagaaaagcagtctgagtgcgccaccagagtggaaatagtcaggtatgatcttctgtgtcagggcagctatgtcagtttgcacatgtgtgttattcactaacattccttgaaggcaatggagtaccgttcagactgcagtggtcactttgcggattgacctccagtgaatcttgttcacttcctcacaggtagcataattattgactgtatataatgctgggtacgtgaagaaatttagaagactaattggtctgaatttccaaatgtttttcttgtattatcttttttggagacatagtaatttactgtttagtctcttaaaacgctttgctttatcactgtttaagtttcaaataattaattcttttggatgactactctgcagtgtatcaccataaagaa

SEQ ID NO: 114039 - DNA, 1059 bp, Homo sapiens
ccacctcagcctctcaaagtgctgggattacaggtgtgagccaccgtgcctggctgacctgtgctgtcttgataccacctttgctaataaaatttctatttgtttgagagcttgtaatggtactttaaaatacttatgttttttaacagaatgctgatttttctggacagttgtccaatttccttttttaagttatctgtttgttactgacagatgttaatgacaggaagaacaacgcacatgtcatggttctgttctttatgaaatcattgattcctctcatatatttaataactaatggctcatttatcaggaaatcagagattgacattattgagctgttgagcactaaaatgttgagtaaatattctttgttatttctagtgatttggttcttagaaatcgtttattaaactaatttatatcattaaccaccctcctcatttaggaattataggaccgcctataatcttgtacacgaattgagagcccatgaaactaatattctggaaattaagactatggcaggatttataaactacaaggtaataattctgcttccaaatacagggaatttgtgtttcaatattaaattatctttttaaaatttgaacatcaaaattaatttcttgctctgaaaagttagtatttgattaattatgatctccccttttatatcctttttctcagaagggcatcgattcttagcaggctatttatagtagttgtattttgaattgataagttctagaggttttaaaagtttggagggttttttggtttttgttttgtttttcagtgggagcaaggaggagttgagaagaaagctgcctgtattactgagttttaaaggataaaattattagaactatgtgacttcttcttggtttaatggcacagaaaagaagtgtctattcaccttagaggaaactttttttttttttttttgagacggagttttgctctgttgccaggctggagtgcagtggtgggatctcggctcactggaacctctgcctcctgggttcaagcaattcttctgcctcagccttctgagta

SEQ ID NO: 114040 - DNA, 1051 bp, Homo sapiens
cattcttaacagtgggagttggtagtaggtttataagtaatttagattttcatccttttggatgttttctgcatttttcatgtattacgttttggtttcagagggaaaagttaaaaagaagaaaaagcactgtaaatctgtcagttctggtgccaaaaatattcccccacaatagcaagatttaatacagaagtgataaagaaggaaaatagtgtcttctttgtagaactccttgtaacattgttttcatttacacaaagagcatgtatgcatgcggaataaatatagagcataatttgtaatatatttttactggtttattagagcaaagattaaaaaagtgaagaaattactgtgaaatcatttgtcagaatcagattgatttttatgagactacctaaatatgaaacatttttagcttaatttttgttaaaatttatgttaaaatattcacaaatttgataattgaatatatatttggtggttgtatttatgaaaacttttttgttcagtcaaaggttgggcaagagttgatttgcgatgagttccataaactattatttaggtttgtgttttaatttacaggcttctgtaatgtatcccaatcctgatcccttagaaacacaaacaggcgttcttgacttttatggacaaagatcatggcgacaaggaatactaagtaaataatttttccctctgtcctttcctctcaacctcaaaaggcaacaatagctataatagattttccattggctgcacatgcataagaaattatgttgaagtaaaaatgtgtgctttttaaacattgtttttgtttttagaatgctttgtatgtatcactgcatcttagagtgacttataattaaagttgctgttgtgattaaaacatgtatctgggtgtggtggcacatgcctgtagtcccagctacttgggagactgaggtggaaggatcacacctgtgaacagccactgcactccagcctgggcagcatagtgagacctcatctcaaaaaaaaaaaaaaaatacaacatttggacatctgttgtttt

SEQ ID NO: 114041 - DNA, 1087 bp, Homo sapiens
acctccacctcctgggttcaagtgattcttgtgcctcagcctccctagtagctgggattataggtgcacaccaccatgcccggctaatttttgtatttttagtatagataaggtttcaccgtgttggccaggctggtctcaaactcctgacctcaagtgatccgcctggcttggcctccccaagtgttgggattacaggcgtgagccactgtgctcagcctaaattttatttttataataaaaagttagctcatttgtctcttgaagtgccttaagtgcagaagtcagtaagaatggtcagtgcagatgtgtctttctgaagaatcaatttggttaacaggatgtgtgtgggtcgtgggtatctggttgtgcataacacagcccttttgttttatttctagtgcagtgcaaagccaagtttcatgccccaagttttcatgttgatgttcctgttcagtttgatatttatctgaaggctgattgtccacatcccattaggttttccaagctctgtgtcagctttaataatcaggtaatgatgccatgtcatgtgtttttaccacgtttatcttattgtagcttatgttaaactagataaaatgagcttagtgaattttatgtcttaatggtttcatagtaacaaatgaactttggtaaggtctattcaaaaatatatctccagggccgggcacagtggctcacgcctgtaatctcagcactttgggaggccgaggcaggcagatcacaaggtcaagagatcgagaccagcctggccaacatggtgaaaccccgtctctactaaaaatacaaaaaaatctgctgggtgtggtggcacgtgcctgtagtcccagctacttgggaggctgaggcaggagaatcacttgaactcgggagatggaggttgcagtgagctgagatcgtgccactgcactccagcctggtgacagagcaagatctgtgtcaaaaaatatatatatatatatgtttctaaacttctagcaattcaagtttacactttgcttactccaatttttgttttcactccatgtttataaagtcttaagaattctctgtgtgtgtgtgtata

SEQ ID NO: 114042 - DNA, 1342 bp, Homo sapiens
ttaaattttttttataatgtatacttgaattccaaataaggtatattcagaatgaatagaattaaaaaaacatttggtttatattttacttcaacattattagttaatgttattagtttatgattatggaactaatttatgtttgacatttaaaaaattgaaatggaatagatggatataatgtgaaaagtaaatgtgtgtcttctttcttctccattctcccacacaccctctacgttaacttcttgaataacctagacattttctgcacatgaatatataagcaactttttttcttgcagaattgggatcatatttcctgcatttgaatatatttgaagcattatatagtatatagtcaagtacttcattacaactctattataaactcacttagtagataatcatcttttgattacccagaaagtatagtgagtctttcaccaacaagcatttattgagagttacgatattcttaacatgctgaatctgagtatagcatatgtcgacctcattaaaatttaggcattttggggacaagggccaggacagaatcaaagattgcccaaataggtaatgaagactaaattacgtagtgtaggctagaaagagggacagctgtagtaggcatgccagaaaaaagggagggagttccaagaatgaagatgaaattacgataggtcgaaaagatggagggggagaacatgtttggcaatgagaaaacactgcatggaaacagaagcgcacaatctgtgtttctgggaaagtcacacctcactagaacagagggtttataatgctgggtggtgggaaataaggccaggtggcttaaaggaacctggaagagttaagcggggataggctagtaaacagatgtctttgaagatttatttgttcttttgtctgtgttctatttattggatggtgataaagaaacgttatctgttttattaggatttgattcataagaaaagagaaatatctctgtaatagaaatgattagatgaagctgggtcacctgaagatcagtatgttctattcaacttcagacccttgcccagggatttcctctaatccgtttgagaattttattttagtgtgtgtgcgtgtgtgtgtgtgtgtttgtgtgtgttttgagacaaggctgcactctatctcccaggctggagtgcagtggcaccatcttgagttactgcagccttagtctcccaggctcaagtgatcctcccacctcagcctcctctgagtagctgggactacaggcacatgccaccatgcccagctaatttttgtatttttttatagagatggagtgttgctcaggctggtcttgaactgctgg

SEQ ID NO: 114043 - DNA, 1328 bp, Homo sapiens
aggcgctacccttgccttccccagtagttgggactacagccaggtgccaccatgcctgactaatttttgtattttttctagagatgagggtcttactatgctgcccagccttgtttcaaactcctgggctcaagcgatcctcctgcctcagtctcccaaaatgctgggattacaggcctgagcctctgcacccagcctcttatttcttttaaatactttatttgaataatttatttgctttttttttgatcagttacttagctaaggtttcttttcaaaggatcatatccagagtcccaaacatttctgtacatctgctacatgaaccccctgcactgactaatgaaatgtattgtttggttgtgactgttcagtcccatgaaaagacccaaatcagagatgtgaagctcaccgctggcttaaaaccaggtaagcattcctttttgtaagtttgatcagtattaatccaacattaaataagcatcagtgatgtcaactctaggacttttgtttacaagagggtatggcatagtgctcttcacacagtattgattattgggataatgtttgaattctttgttttgaagaaccaatattaactcttttaggacaggatgccaatttaactcagaagactcacgtgactcttcatggaacagaactgtgtgatgaatcctacccggctttactcactgacattcctgttggagacttacatccaggggaacaggtaaacttggtcaactgggattgaagaggaaatcaattagtttgtagttttaaatatatagtgagtttttaacagttcagagcgttttaacgcatattctaggactgaaaaagtgatttaactaatgaacatttcatacacattttacatacgtaaatgtgtaaaatgtcttaagcagtttttctacaagggaatttagaaaacatgcttaacatgaattagtgggctaataaaatacccattgtttgtaacttagtgcagttaacttctcagtcaacttctgcttccaaactagatagaaaaatattttggaagttaaagaacaataatttctaaaagatgcagtagtaatgatcccacccttatactgtggccacagtgtaatcagagtactctactacagtgggagcattgatgagttacattgtaacattctgtaaaagtgataaagaatttagccagttggtataaataaactctagaaggtgggaacattatcctagaatatatatcaagaagaaatgtctgtaatactaattaaattacaacatttattttgttacagctggaaaaaatgttgtatgttcgctgtggaaca

SEQ ID NO: 114044 - DNA, 1053 bp, Homo sapiens
taattaatatatatgagaacatatgaaatagctcagtgctcattttctaacagctcaataaaagcttgttatttgtccattcttgctgattccttttctttcagtgttggtcatttccagtatcctgacgttggttctcttgttctttctctacaagtcttcagctgccacacgaccttaggctgcctgcattccctcgtccagttggaggggttgtctggttgtaagggttgttgtacgtacacttgatccaagctggaaactgcagagaaaaactacactccttcacacgcacatctatccttcacacccacatccaaacatttttttaatccagcttttcatctccatcctcagtgccatcctcaccatttctctcacctggtctatagaagtaggtccttaactgttttcttccttggcagtcattctcttccctatcctgcctttcatattgccactagactttgtgacacactggacctcacctggtcaggctctggctgaccttcccagctgcctctaccccaggctgtctactgccctttgctctctcccaggtttcaaccaagacaaacttagggcattcatccaacattgcccccagctacttttgaacatatctttggaacttttgtgtaaaaccttcatctttttcaacctgttgaactctggcttgctcttcagggctcttgtaaacttgaacttcttgttcctcccaagcaggactaagtactcttccttctttattcccatggtgttttgtacacacctacattgtaacacttaccatattatattgcaatttcgtatttgtaaatatggctcccttactagactgtgtgttcccttagaacctgagttgtgtcttattcatcttcatatcgctagcatcatagtacttagctaataagtgtttactaaattaaggaataatctgtggcttgaacttctagtatattagtttcttactgctgctgtaacaaactaccacaaagttagtggcttaaaatgacacagattcaactgtattaaagttctacaggttagaag

SEQ ID NO: 114045 - DNA, 1027 bp, Homo sapiens
tttatttttttgtttgtaggtgtcaaaatagcattttaaaggcactgctgaattattccatcatactacagtatgaatttgtgcttgtcataatttgtgacttatatgctattgaaattttagccaaactaaatctgtacacaaagggtgtgtgtataagaatgttcatgggctgggcacagtggctcacacctgtaatcccagcactttcatagacctaggtgggaggatcgctggagctcaggaggtatattcatttcttattgatgagggcttagatgctttgcctgttgcttttgctctgtgatagtttgcacatcatgtcagctgctccacccttaggctcaaaagggatttccctggcaccacccttatagttcccactttagctgtaccacagggaaaatatttaacagtttcataatgttacttcagctccataaatattggaacaccactatgtttgttgatagtaaaatacttttagttcttcagtttctactgtatacgtgtagtgagttacaatagtgctcttcaaagtggtctggggcccacctgtaaaccatcctcagtgagttaaggaatttatgtcatgatgtaaatcactgcactgttcctgaattgagaaagtcttgctaccaaaacactgtattaaatcgtgtgcatcatgattgacagtctgacacacctcctcacttatcccccactggtaacatgcagcagccctgggttataacagtttgttaattggaaatactcagaagtgtgattttaaaagctcttaacttcacaaaatatttccattaataatgttttgggaggcctggtgcggtggctcacgcctgtaatcccagcactttgggaagctgaggcaggtggatcacctgaggtcaggagtttgagaccagcctggccaacatggcagaacctcgtctctgctaaaaatacaaaaattagctgggcgtggcttcacgcgcctgtaatcccagctactcgggaggctgaggcaggagaatcacttgaaccc

SEQ ID NO: 114046 - DNA, 1020 bp, Homo sapiens
gcattttggtgcctgtaattccaaaagtatatggttctaaccaactgtaaaacttcaggtgagggttggacaacaaggagataattactggattcaacaagaagcagggtgttaagccactcaaaggaaaagtggttttgacttggcatcttccaattcactacttagaaataacctactagaatttgcaagtccattcttagaaataacctactgtgggcatatagaaaaaaagtttggacttttgattttcagaacccttcaaagggtatacaggatgctggtaatgttttaaaattgtgctatgtattttgagtaaatcacagtaaattaaagcccatacatgtttattgagtgctttctagcgccagcctctgtgtcactcctgcaaataggaagactgatgggacatgccatcttttggggtattctgacataagaaattgagagtgtgctaaatgctttgaggactctttgttttgagtgaacgagaagcagttacttctgtcttgtgagctggtaggggaggtttcccaggtatgaggcttgaacttgatcttgtgcagatggagatgggggtggggcgggagttcctgcagagcaggagaactttccctgctggggaaggaggtgcccggagcttgagtgaaggcttggggttggagagttcctgatgtgtttggaaactggctggggtgataagacaatggaaaggtgggagagggccagatgtgaagatctagaagccactggaggcttctaagcaagggtgggaatgaagtgatttgatctgtgttacaatgagaattccatgccagtgagggtgaagggtgggactgggaggggattagaaagaaataggagcactagctaggcctattgaaacagagggagaaatgccaagtgcttctttagagtgtttgctctccttcggtacacttgcacaggccacggttagtacccgaagaaagacaccattagtctggttgaggctggagggccttctagcctcggccacaa

SEQ ID NO: 114047 - DNA, 1079 bp, Homo sapiens
cttggcagtctgtatgagaaagccatctaaatgttcatatagtttgatgtagtaattttatttctggggctatctctaagataatattgcaaaattttggaatatttgtaatattgtcttagagatagtcctagaaatagagttactgcatcttacattttgtagagagctatatgtaggaagctattcattacacaatttttaaggaagaaaaattgcatataatctaaatgccacgaatggaaaatattaggtaaattatggttctttatattggatggaatagtatatagccgttaaaatatctatgaaggttatgaagcaacatagaaaagtgcttatgatatataatgtcacttagaaacacatggaatatttcacaacaatacaaattagaacagaatcttaaaccagatgcttagggaagatgggaaagaataacaataattactgtatattgagtaattattatgttttagggactttgccgagtaattttctcacttaatttttataaatggctcttggtttgttcattttgcggacaaagacactgagcttagagaggttgtgtaatcttgctcagccatgttgagtgatgggactgcatcgggaccaggtctgcctgtgggatccagggtccgtgcttgaaactggtaatttgcaaatttttctgtgtgtcagaatcatctgagaactttaaatagataaatgagtgagcaaacaaatacatgccccgtggcccacctcctgaattagtcacctggcagacaaccagagcctggcacggtttacaccaagccagggtctagtgccagcctgtggccagcatttaggaccctctgcacattccgtttgttgggtacaacacaaatattaaaatacatacaaaaatacacaaatattaatactgtgaatattaatagtggttggatttgggttagagaactaagtgattttagtcttttttcttcattttcagattttctttagcgataaatgatgttactttgagtataaagatttagtaaaaagaaaattgaataaaagatttgatttagagtccttcttttgggggg

SEQ ID NO: 114048 - DNA, 1054 bp, Homo sapiens
actggtgggattgtgagttgcagtagtagcagaaagaaaagacagaacgtggaaaaaagccgtttcctttctctttttgttgcaacttctagtcccttgtcatttgtttgtctttgtcacacttgcaggcctttccaacccccagaatctagggtactgttatacataactagaagacttctatgcgccagattatttaatgctcctcattccctttgcatttggtggcacgtctccctcatgtctttgtattaaactgtcagtcaccagcataggtaacacagtacactttaaatttcttgtgaaaatcagcccttggtcacattgtcttagccatgggccaaggccttcaattccagccccacctcaggagttcacagatagtgagtcaatacgttccctgtaattttaagccagctcgacttgcggtttctgttacttgcaaccagatgcacctaatggatcctgattgtaatgaactttataattagattttctgttatgtgttggaaatgaaacagagtaattctcctctcctggccaaggaacttacactcccaaagagacacgaagaaaagtgaacacttactgagcatctgctgtgtgtgctgggtgtttcagagacatttcctcatggaatgctgaagatggccattactgggcctgctccctcttcttgcaggtatgagtgatggggtagaatcggcgaatcctttagatctttactgcattgttgctgaagttatgctgattgtgactatttctgggctgtcaatggatttttatgtggccctgagcacagtgtctcagggaggtagggctatttccagtgtctgagcagaactaatttcacatcccccccaacaaggtatctagggtcacctggtgcgttgttacttgcttttctgctaacctgctttccttgcacacagtagaaaattgggctaggagtaacatactgttctaactataattaaaagaattccccctcattggccaagtgcaagcacatggggtttttacactctcagtcgactgaattacattctaggtg

SEQ ID NO: 114049 - DNA, 1051 bp, Homo sapiens
tggaggcaaattattacaatagaaagaacactagaattggctctgccaccagcctactgtgtgactccagggatgcagagctagtcacacctccctgtagacctcctgtgggatctgtgaggggaaagatctgggttgacttgtttccagtttttggctattaagagtaatgcagctacaaacattccctacaagtctttgtgtgacatatgttttcatttctcttgggtatacacctaggagtggaattgctgggtcgtatggtaactccatgtttaaccttctgaaggacttccaggctgttctcacatggctgtaccattttacaatctcaccagcattgtgtaagggttctgattcctctccatcctcaccaacacttgttactgccatttttttttttatctgagccatcctagtgggtggaaagtggtatccactgcagttttgatttgcgatctcctggtgactaatgatgttgaacgtcttttcatgtgctttttggctgtttatcatagcctttggagaaatgtctgttcaaatcctttgcccattgtgagagtcattgactttggtatttgttgtttggactctccttctcctggcttgtggagattgctttatcctctgaggttgcaccgcagatcctcttctgcaagtcaatgggtatggttgtggtgtagcgggtttcagcagcaacagtggtctgaggaccactaaaaataaacataaggagtgtcactacgttagcagcataggctgttttatgctgaaataacgtctcagtggcttaacacattaagcctcatttcttcttctgcaaagtctatgctccaggctgctgcaatcttagggcacgactctactttctatgaatgtgaacaatgtgaggggactcaggggctttttgatgcctcagccattatccagaccccatcacatggccccatacaatgggaagggatctgggaagtgcagtcttccatgtcctgggaaggggtgacctggtattagtgagcatcagcagtgtccatcgcagtcaccgtctccc

SEQ ID NO: 114050 - DNA, 1002 bp, Homo sapiens
cactctgggcatgtacacagtcttgcaggggctagtagattccaagcatcaaactagagatgggagaaggacaatttagggccaagtggggaaattggcaagagtcccaggcccaggagcagccagatttcctgggcagttaccaaaattggagcttggaaacaaggcttaagaggtgaaactctgttatttagggttggaggcaggctggagttggggaattaggagctctttgactaaaattgagactttagggtggaactagcagccactgctactgggtgcaagaccccagagtgggctgaagtcaaaggcctcatgcctcagtatgggcttgatcctgagcattggaaattagcctcagcctactacatatggatcaggggtttcctgttggggtgggagaaggaaggatgtagcttcgtaggagatacatacaagaactcttttggagatagcatttacagggcttggaaagaagacaatgctggagggtgagcctagctggctggctttatctaaaatgtggaatacagaaatagtaataattgttgacgttaaacgtctgagcctatgagtacatagggcatctagggagagatgtcagtaattgattatatgagattgggatgtgggagatctctaccaagatctctacagccagaaataaagactggagccatccacacatcgggatcaggatggagtgagattgcgaagggagagggcgttgggagttcggcacatcgtttttgtgtatgcaccatgaaggagaagccactccaagggttgtatttatttccatttcattttattgccccatgatttttttcccagattcctccaatttctggttgattcttctttcctaatgtttttcagatataaccagtttctcccaaatagctgcattttcttttttcttttctttttctttctttctttttttttgagatggagtttcactcttgttgtccaggctgtagtgcagtggcaagatct

SEQ ID NO: 114051 - DNA, 2408 bp, Homo sapiens
ggtgtgttgttagatggaggaaactcagaaattggtctgaatttttaaacacaatgcttcataaaacctgactattctgttctggcgatgttagaacttgtctataatctgaaacagcagatttatttggaggggttatttgcatgtctcatgtgggatatcccattgtttcaaacctttactataccaggccttcatacttccacgatttctctgtaaatgtagaattatctgtaaattgctctctgatttcagattgttcttatgtgatgggttgtgtgttctttcctgaagcttgtggaaaggtcatcgtcaaacacatataagtgtcttgaataatgaattggttcatcactaccatagatcacttagcttggacttttctattattcttgagaaggtactttctcatgaacctccattaaatatcagtagaagaaggttttgcccagtgtttatttgacattataacttgggccaatggttagattctctgcagttgaaactcatagatagagactaaacataaaacatgcaagtttcacatcagatgtttttgtgtgtgtctgtgtgttttaatcagggcttatatttgctcagagatattagacctgaactcctaaactctagcccttgaaaaactagattcatggcagggggcaggggggatggtgagtttattattttttataaaaagtaaaagtgttttaaaatagcaagtagtgaataagagaggcccatttacctaaaatgtttacataaaaatagagttacatccatgtaaatgggactgttaggtaaattatttgacatctcatggagaaatagaaactttctcataaatgattttgatatagagcactgaaaatacaatttaatggaatcatttcaacttaaaaatgacaattaatgacagattggagaagtcagccaattatcgcttagtgcttttctatccaacacatatggaagattgcttataaacagggaatgttttttttaacatgcatatgaatttagtataatatttgtcaattcttagctagtttggcaacattaaaatcttagatctttgatacttagactagtgtcccgaatatgaaatgttccatggatagatttgttcattctttgcaacccctgaaatattaatgtttaagcaagaaactcttcaccccaatatttttctttggtaacctaagattcacagagtgatgtaatagagtatttggccaaattaaaatgagggaaggtgcaaataacagaattaattcccacagctgtcgaatacgaggttagcaagtaagtgaaatcacacgcattactttgggtgtttaattctgaaaactactcatccaagtgttcactttgaaatttaattgtgtgtatttgtgtctcttctcctgaagggtgctcttctgttagggcagcccatgccgttttttaaattaatggtgcagattcttttagttcataggctcgtcttgggggagtaatgcaggcatgtgtgaaaggggccgtgagcctttctggactcttgggtcctatctgataaatgattgcttcaatacactaaatgggccccagtgtcctagaaacgttcatatcatttccacatgttcacttccttttcctggaaagtgtaacttatgacaagggtaacttggaaatccaagctcattattggagaaaaacgaatggtcgtctatttggcatatgttttgaaaataacctcagtgtgggaaaatcttttgtgaagtttattatgaatctgtttatagtatacttttcaaaatgtgtatgtaagcatcttaaggcttaagaaaagaaagcgctaagtaggcatagttgatttctcctattgcaaaaatacaagtgagcaaggaagaagactatgcagcggaaggtatggttggaatgatgtgttgaggaatgttaatgattcgtctggaagcgtgcaaatgtggggcaagtgcaggcccttcacttccatcctggcttctttttgaagtgacatttggcattttagctgcctcacgatgctactctgataggaatcttctgcctatggtgcacattcggagaatgctctggccacagctgctctggtttgggtcaggagtagggcaagctttgctgaaggtggcagctgccctggcctgtctcctctgagttcgcttccagcctaggtctcattcctggcctggtggtagcatcttgctgcagggatggacctctcagaaacatcctaagtgcgcaccctggggtctcgaataggctggtcacagatttctaggacactgaggcccatttagtgtattgaagcaatcatttatcagataggacccaagagtccagaaaggctcacggcccctttcacacatgtcgacattactcccccaagacga

SEQ ID NO: 114052 - DNA, 1051 bp, Homo sapiens
tttcccttcagatccttacccagtcagccacccacccggcagctcttctgctgtcgttgcgctcagctctgcttccgactttccattcctgttgcctctgcccacggccggagcctccctgcctcattcgtgcactgtttcgtatttatagatggggtatttacttcctcagagatttaaaaaagttacccaagtggttcatgttcatggtggaaaataattagaaaatagagaaaaagagaaagaaggaaggaaggaaggaaggaaggaagggagggacgggaaaaccacacatttcaccattcagataatgtccctattgagctgtgatagttatccctctagactttttcccgtgtatctatcaaaatatcctcatctatccaaatgtgaaacatgtcttacaaatcatgattatgttatctatattgttttgtagtcgacttctttatacttagcttctatgattgcttttctggatctagaaatataatacttttttttcatggctgtataattattggaagcaatttgccccttcatctctacgtcatttcagtgtactgtacacaccgcccctaagtcattctcacacttgattggtcttgctgcccttctgctgaaaagcacaggcagcttcctatggccctctgccacccgccccacattcctcttctataggaaaggttttatgcctttctcagtcttcaggattctttctctcctctgaataagatctattatttggaccaagcttggtggctgtcataggctacaccttgggattaggaggggcagttcctgggatcccacggtgccttgctcatcgctgtgcccctgctctggcccattctctctctccctcttcccagtgttgtagggtgtcacatgctgccaggtcttgggactgaagaggtgaccaaagtgcctccgaactccagctcctaccgcagtagggcagatacagccatgaaaacagacaaatgcaacagggcaagatcacgacgctggggaggaagaaagggtgtccatcgggtgacattggagctgg

SEQ ID NO: 114053 - DNA, 1821 bp, Homo sapiens
agggacttctcactgggtccagcctcatcattatacagaaaaggaaacgggccctcaaaagtgaagcaatttgcctaaaatgacgtagctaattagtggcccagccaaaaccccaatccaggacttctggctttcagtgctgtgaccttcccactattccatgctgccagctggcttaaaacaaaacaaaacaaacaaaaaacaaaaaacaaaaaaaaaaaaaaaagaagaaaaagaagaaaaaattggagaattgagttgacacattgcttgaattcccctacctctttatagagtgtgaaaaatcctgatatgctttaaaagaaacacttaaaaatgtatcgggacttgtaaagaaaatcaggaatatttgtgatatgctaattagaaagtatctcattatgcgagagacaggaaacgtggcagagggagatgctattcagagtaacttaaggaaacttcaaaggtaagacaaaaggccgttctttttatttatttgataatgtttgtggctgtcatcaaagttctgatggggcctgacacctttatgaaaaaccccctgtatgaaaaacactgggggaatctctcagacacacggaaggaaaagcaaacgattccatttccatccgagtttccgtaggtggaagacagcctttcccacagtgctcgcctgccaagcatcttcctgtaggaacttgtcagtgccgccattagttgtttgcaaagggattacgctttggcagccatgctaatcgctccaaggtgaccctttatttggagaaacaaatccttttcagttgttgttacggtacactaatccaaccatgcaagtagctgtttgggaaaaaaattatcaaagtgcattttctccccactacttctttctctccagatcgctcctaactaaaagtgctgtttcttccaaagaagttcaaaatgacagggagaaaaacacagaacctggtcagatttcaaattcaggagcagacaggaccccctagatctcagaaggagctgccccccaccactgaggttcaacaaaacccccaggtgggagtggactgtcccgttaccttgggggggtcctcaccctgctgcagtggggcccctgtctttgtctggccattgctgctgtttgccgccatggtgaagtttgttgcactgtaatgttcatagatacccaggaagagggagaaccggggagctttcagcctctcagcctgcgagagcctctagggagagacaaggacacctcaaaataccagttctgacgtgagaagcgactttcaggcagggttttgtagatcgtgtggattttggagttggaacacactggcttgggattgcagttttgcatcttagctgtgtgaccgtgaacaagtcacctggtccctgggcgccgcagcttcttcatctgtaaaatgggttgtggtgattaccggtagggatgtttggaagacacaatgcgacaatatatgtaaagtgcctcgcagggcgtagggctcattgtgggtcctcaaaaatagtagcagttatcatttttcctatatttatgattatctaaacgctaatataccaacaactattttagtttaaattaggacccggaagagcccaaatattaatttacagctcagtggatgattcaaagtgcaaagccccacgtaaccaccatccaggtggtaactagaacattacaggatcacaggagcctcatccctccccgtccacacgatttccccttcccttcttaccgaatgtagccattttcctaaacttctaacactcaacagatacttcgtgagggtttcctagatccca

SEQ ID NO: 114054 - DNA, 1010 bp, Homo sapiens
agtagctgggattacaggcgcccaccaccatgcctggctaatttttgtatttttagtagagatggggtttctccatgttggccaggctggtctcgaactcctgacctcaagtgatccatgcacctctgcctcccaacgtgctgggattacagacaagagccactgcgcccggccaaatggactctttttatgtaaatatatatccttgtagataacaatccaaatccaagtaggattgatgctgaagtaagatcaaacccaaacctctcaacttggattttcctcaaccactcctctagcaatgtgtcccactaccacttcacttatccgtcccagcaaaactaattgttttataatcttcccaaaaaacttcaggtttctctacttttaaatctcttcttatgatactctctttctctcctccattcttacccagcaaatctaaaatgcttttctttcttctgctccggtatgaaagatcacagttctccaaatcccagttaccctgggaacaccttcctgaccatcacaatccacaaagaatctctcttagagctgttatcatctgtaccctgccttagcccgtattatgaatatttgctgcctatggtttatcacatatgtactgtctctgctacttgaggctcacacctgtatgtgcatttgtgtgcccatgtgtttaatccttgttaggctttgtacacagcacaaactccattgaatgaaaaaaatagtttatattttgttttgaaatctgattatttattctctctcttcttagatactcggttttaaagtgactggggtgggtgggattgctgttttacctgtcttttggttcatgagttaggcagagactatagaaaaggcatgaacaattactatagaaactgccacaaacatattaagcacatagagggtgtcagcatctatgaataaaaagcccgtattttctctaaatgagcttacggtctgtttggggagataagtattataatacaatttaataa

SEQ ID NO: 114055 - DNA, 1240 bp, Homo sapiens
tcacttttagtctattagtattaatcgtgctcccttgctgctccaggctctgtgctgggctcaagagacacaaaggttgagtagcttctcctgaaaggtacctcacagccccaagggggaagcagacaggaatgcaattcactacaagtgccaagagctagaatagagcaccggtatggctcaggggatgcagaagaaggaagaactgattgctggggacagtcagaattttccctctgcttttttattcctgtagtgtaaaatttgcataataaagaagcaagttaacatgttgtgtcaacctatgcctctcgaacattagagtgtgttctggatctggggcttgaccacttgctcagcaagtctgtaattgtcctgaaagcctttctgaagccatgactgaagcctctcggtggcatctgaggagaaatgttaggaaaacatttagatggcagttcagtggatcatagaaactactttgctaatacagtttagtgacatttttagaaaggaggccagaataccagagagccatggacaaccatttctttacattgtttctagggccagcactgtggctcacacctgtaaccgcagcactgtgggaggccgaggagggaggattgcttgagctcaggaggttgagcctgcagtgagctatgattgtgccattgcacttcagcctgggcaacagatggagactcagtttctttaaaaaagaaaaaaaaattgtttctctatgtatgagttggataatggaagttacctagatcttcctcaggtcatctgggcatgctggtgaggtggcagaacctgccccaaagacgaatgtcccgacttgagtgaaggttgctcaggtggacttgaaaagtctggggaaaccaggaacagctgattaagcccgaggaggcataatatagcagcactgtgaccctgacggctggaaaaatttagatgctcagtttttctcctgagtgcaacaattctcatgtcttactcgaattcaagacttcatggaatgcagcaagctgtgtatagctcctcgtagcaaaacctcaaatgggtggaaataagatgtccggcttaactgaatgttctagtttattaaaagtaaacccttctgttaagagtaagcccttttattaaaaaagaaaaagggtaagtcactccccacttttcttttgataaaaatatgtctttaatacaatacagtgagtatatccttgaacctttttggttt

SEQ ID NO: 114056 - DNA, 1100 bp, Homo sapiens
ttgatccccatgagttctccaagaggtgcagatctcttgatgacccaagctctgcgtcttgcagacacctgaaccctgtgtctggcccacacagttctctgacagagactgtctacaatttgaacttcaaggggcgactcccaggcggtctgatgcattacccctgacttggccaggtcccaagctcttggcagcctcccagactgcaaaggctgtgcgtaatggctttccagagagtgtgcagcaggcccgggaggcctgggctcctttcctttgggggagatgccagctttggctcagcctcctggttggctctgaccaggaggtcagataagtggatgacgtaagtggatgacggataggcttcttggtattccttgtttatggtattaataaccagacatggaactgcaccagaaaggaggtttttaaaagtgaaagtagttagtcatgttgagccgggatggcaaggagaggttgccagcgccagtggtttgaaaggtgctgaggccccacctgtatggaggcagccgctcagggtgcctgctgagctgtcagtagttctcattgtcccgtaggggacccagcacctcccctcctctctgctgcccagccctgtggcctgagccaagtcgttcacggctgcgcctcccactttcttgtctgcagagcgagtggggttgccaggaaggtcatgtaaaccagtgaagtgggccaagcgggcattctattctgacgtttcttgaaacgtgcacaaagccctgtgagttccattgtgagtgcgaatggagaagcgttttctagactgagaacggttgacagtagttcctgcatcctggaacatggccgtgccgttcagtctttgtgttggggagggtcttggagaatgtgtggcccctctatagggccaccactcggcttcaggaaaaaaggcccatactatgagactgtgttttttgggtttttttaatgctataaatctgtaaaacttacccaatttcaaaaaatatgatgaggaccaaaactaaaaaaattatatgtgggcagaatttgctgagtcttccatctttgggataaaaacaatctcttttagctctaag

SEQ ID NO: 114057 - DNA, 1030 bp, Homo sapiens
aacgacctcttcaatttagtatttaacatttcaaaggactttgaaggactctgccttctcaaaagttgtcaaagattttagctattgtcatcattagacttcaaagcagaaactgcaggctattttaatgccaatgcttttaatcctaacctttgtattgagattaggagcacaaaggatggcccgtaaggggtgagctgagtttttctattttgttttctttttcttttccctaaagatttacagtgaaagctctgctctctagaattgttctttactcatggatagtttttttttttttttaggtctaaactattttgaaatctgcacaatggtgtctgttattaaaaaagaacagccacagtaatgaaaggacttggcacttacagatcaatttcatgtgcccacagcctgtttctgtaaaagatcaagagccataaatctctcccaaattatctgtgtttgttattattttagtgtttgaagattagacgtgtgtatggggtgaaggagttggtgagaattatgtgtagagaccccaggcagcctcaggccagcctcgcgaaggcatgtccccgggctcactgccaccctctctctcaccatctcatccttcttcacctccatgagccctacacacatcccttgtacgcctttctgctctcggcccatacatcaagcatggacatatttgtgcagtgtcctcacggagcaaaaacagaagcacacggtggctctatgctggcctcactctggaggaaaccacagagctccggcaatgaatagtttctcgggtgtttgtgcatcgcacgagttcacaatgcggctgggcgctgggatacagtgagtgactttctcttctcatgggccctaacatcaggtaggcttgtgtagccgtaagttaagtgagccgcatctccatgatctcttctgtccctggcaatgtcagatgcctcgcgttggtgtggcacctttcaccatttctccacggacaactccatctattaatttcttggagaaatctggagcc

SEQ ID NO: 114058 - DNA, 1044 bp, Homo sapiens
ctttactagagatgcaaattgaaaaatcaaaatttccttaaggttttacattcaatttattctatttgtaaattttgtatttttaagtaaaaaataaaaaccataactcttggggtctttgaaaatcatttgatcaacttgaatggaagactaaatcccttttacttaacaattagccctacttagaaacatctttaaatacattcccttaaacatttaaagtgcatctataaatttcatttatttaatttttaaaatttattactatttttattgaggtaaaatacacataacgtaaaatttaccatcttaatcatttttaagtgtatatagtccagttaagttaaatacatatataacattatgcatccattacgaccatctatctccgtaattcttttccttttgtaaaatggaaactctctaccaattaaacaacaactcaaacaacaacccctcctttcacctttcctccagcccctggccaccaccattctcctttgtgtcattatgattttgactattctaagtactttgtataagtggaattatgcattatttttctttctgtgactgacttctttcacttagcattctgttttcaaggttcatccctgttgtagcattggacaagatttcctctctttagaatgctgaatagattccattatatgtatatattgcattttgcttatccactcatccctcaatgggtacttgggttgcgcccatgttttaactattgtgaataatgttgctatgaacatgggggtggtccagatatctcttcgagtccctgctttcacttcttttcgggtatatctagaagtggaattgctggatcatatggtaactctatttttaagtttttgaggagttgccatactgttttccacagtagctgtaccattttgcttgcctaccaacagtgcacaaaggttccagtttctccacataattgccaatgtttgttattttctggtttttgggtattttttttttttttttgatagtagccgtcctaatgggtgtgagttggtatct

SEQ ID NO: 114059 - DNA, 1039 bp, Homo sapiens
ggagttctctgcatactctggatatcaatcccttatcagatatatgctttataaatattttctcccattctgtggattgtcttttctctgttgacagtgtcttctgatgcacacattttaaaaatttcatgaagtcagtttttctgttttttcttttgtggcttgtgtctttgatgtcatatacttggtacacttgatttttaaaaagtagttaatatatctgacgaggaaggcttcaacccaaattttccccagtactctattgggcctttagtagtcatcaaatatgtgccaaccattgctagccattggggatatagctctgaacaaaacagaacaatgagcaacaatgaataagacagaaaatatccctcatccttatggagtttacattcttctaactctaaattcattcaactgtagcaaagctgataaactaaagttttaaatgaagaggatttcaagtcaaaatttgtatacctttcaatttaagattacaagtctaaaatcaattatacatttgaattagagtcacaaagcaaatctgtgtaattagtgtctctaatctgtctgatatgaaaataccaaatatacacattttaaaagcccgattaaataatactaatgctataaaatcgatttgctttatcattcatttaattctaactttcctaatattgaatactggcttacaaaaccgagcttgcttgatggacaactcatgacccaggtacatgattgtctgaggtaggtttagagatctgaaactgggcccagggacataggggttgtatatgaccagagtgactctttccatcataacacagatggacagactgagtctgattttaatagtggctatagtaacagggaactccatttttcttcagattggactggtttcacaatacgctgtttgctagatttaagccttcccttcatagcactattcagcattgtccccagtttggatggataaattactacaccacccatacctactttgccatctgatccgattcagctaactcagcctatg

SEQ ID NO: 114060 - DNA, 1040 bp, Homo sapiens
aaatatgtaaatatccaagcgctggctccaggctggggcagctgccaaggtccccgcgccgccgccgggtgttttacatgaaaatgagaagcctgatgggaaccgcgttctaacttaaggcagcctggtgattagcatgagactgggcggctgtcctgcttcctgcccttcaatagccgttccgcgcgctcgcgccggagcagcgctgccgccgcgcgggggtcgatcgcaggctcggcgtccttggcagccatggctccggcgccgcctcggccagtaagtaggagcatgcatgtgtagggggcacatgcgtgtcggcgcacccacccagccatccacccgcgcgcacgcacagcgcccggagcctcggcaaggggaagattgacgaggcgctgcagtcgcggggacgacgcgggctcttcctggattccgcaggagcccgcccgccgcagctgctgtctgcagagcctgctcggatcctgtgcacacgcgccccccgctcgagcctctgtgatgaagactgtctcccggggactgcagcggaggcagagccagccagcgccggggactgcgggccgtgcggctgataggcccgcggggacacgactcggacactgtcatccccacgcctcgcgctgagctgcccggcgcggagggtctgccgccgcccctccggcctcccgcacgcccgatcccgggtcagccccggaggcctcggctgcctcatttgtttgggtcttttgtgccgtggctcccagttggccaagcactcctgcgctgaatcgggccattgtctgcgctcccattgccttcacgctgcaagtctcggcgcccccaccccgcccgccccctccccgcctcctcccggccggggagcctcctaacgtgcctttccccccaggaatctggaagctataagccgggcggattgcaaatgaagtgtaatgcattgtgggacgtgtgtaaaatcggagccttcgccgtgggggtgtgggggggcgtggggagggccggacccgccgctggcggtgtagacgccg

SEQ ID NO: 114061 - DNA, 2055 bp, Homo sapiens
tcggtacgccgcggcccgggtgcttggaggagaggacgggcagtgatggatgcgataagttatggggaaagcaggaaaaaattagctcccatccaccattttgtacctcccaagatccacagcaggccctctcaatatggggttggagagctattagttaggtaaaacgagggaggggggacgagccgggcgttttggctgcagggagataaatgactgcaagccccggcgctgcagcctcctcgagctttgtggaggatcctgcgcccagggttgcctgcagtgccaggcttgctggctgctgcattgtggccggttatctgagtgggtatttccagcagccccctgttctccaaaaggaacaggttccatgcgcagctctggatgggctgagtcaggggagagtcctgcagacatcccaggctggtctgatttgcacgcagagaactgtgttggagcttactgaacgcgttctgtgggggtaatggtgtggatgcggattgaatgctcacatgattctgtgtggatttaacatatgttgctttgaattaggctgtatggaaagaatggaggctgtatcatgtgtttgcatgtcagacaggagggacaaacaaaacggtaaatggaaagggaaggcttcaaaaaagatttccgcttaaaatgcagtgctgtgaaaagccttcctgaaggagccagttctttttttggaaatacaacggaatggctttggtttgatttgggaacccagggatgaaattcttgagggaaatgctgaaggaggaaaagcctggaaaccttccgttgccttctccttacttctccttaaccacttggatgtaatgatgtgtaaggcatcggttcttatttatttttcattcagagaaaaatttagattttcttctaagcacactgtaatggaagaaccgagattttattttaaaccacatactgtaccaaatcactctgagccctgtcttaactgggaagatcattttaagcttgtggttggtacttacagtctagctttactctttttctcctaaaacagcaagtcctttttaactggggtcagcatctcatgcttcaaaaatgccttgcgaccgcatttccacgaacataaagccgaaataaaagaaccatcttttttattgcaaagtcaggcgacataaggatgttgtactattttggcaataaggctcccttgattttccctttcatgaaaagccaaattcgtaaagaaagtgacaactacagtttatacttcagtcatttaagtcgctgctgtggttgctacactcttcagacttgtggcagtaaattttgaaacacacctaaatgcaaacctaacctcaaaacacatatgtacataaacccattgctgcactaagtgttcagataatcctgggtttcatgtacttagggtttgaatgtcttcattccacacttcacagttcccctttcttatgcctcctaaggaaccggtcctgacaccaactgtgaagctataggagggttggtggccatcatttcatcgacaaacctgcaacactctgtttcatgattcaggcacatttccaggcagccagttttttttttttttttttttaatctatcttggcattacctcattatcacatttgcattctttgcaaaagaacttgtctgctattgcaggtgctgcgaggcgtttttgagggcttgaggaagaagcttttaattgtacttgattcccttattttatttcttgatctacaaatggtaagatggtcctatggtgataatgaaggataacctgtttcaggttggcggttttctgttcagattcaatgttaggttactgctgagaaacctgaagaccaaaagatggaagaaaagtgctgtcattcattcagcatttttatggcgtgcccccaaagagcgaagtgccttgctggattctcatggggttatagggttggatataatacggttcttgcccagggagggaggcttatcatttattctttattttaactgttagctaatacatggaataagaagcaggtgttgctgcta

SEQ ID NO: 114062 - DNA, 1479 bp, Homo sapiens
tagagaatgctgaaactttaagtctcgaagactatgccttatgtgactgtttaagctcccaactcatgctaccaaatctgaagaaatcctaagaattcatgagcttcctagcaaccagtaagttcacaggccatgagatgacttcattgttcatcttgaatattaatttcccagtggtggtttctgggcagaaaggggaagatcttgccttttgttcaaatcaagatgaataataaaaagtgcatggcgttatcttaagaagaaaagggattggaccaaatggatgtgggatcattcttgggcattttctaaaagtagaagttacgatattaatgaactagagataaaagcaaaactccccacaaaggagcaaatctgtataatgaacgcttagtactttatgtatgaaaacatgctcatttgtctctgtgaaatgattttcaaggccccaaaccttttgttgatgaagttgtgagagctttctctgttagaattatgtgaactgtaagctcttcacacgaatgatgctgctaacttttaatttccttccctctcccctcccccagccctggggatgggcgcctctttatattccatgtataatgccagcaaagttttgggggacatccttattgatcaagcatggaaagtaattttttcattatacaggttctacagcacatgatccttaaaagctttgtttctgcatgagaaagcgaagtcctggcccatttgagtttgatgcttatcattttgataacatctttaaggagtaaagcgtgcgtttttaatactacggttttaaagcctttgaaaagaaagataaaacaaaagccctaaactgacattgcaagaaatttgaaagcagttttgtctgctggggaagaatggccagctcatcaccttgattagtttattagttttcattttatagaaactaattctggggcacgtttgactgtgtgttccagttccttatgttctgttattttaagagacatgagggttttctgggagtgaaggatggacactggaggttccaatctgggcctgccacaaaccagctgtgtccctggcgagtaatatgacctccctccatctgtaatgagtcccccacttccatgctgccattacagaattgggctgtgcagtggctctgtcttgagcaagtgcaagacttctgaacacttacacataaattgttagacaaaacttctctgccctcttctactttttggagtcaggtgcctcctgtttgtgggaatagtgctcattttgcgatacaatcctattccctatcatcctgaaatgttacattaaaggtatgcgttttaggactcgccctgatgaccagagtaatgaggggggaagaaataaatgaagacctggcaagttataatcatatgcaagttttaataaagagcgtcctgtcacgtccctttccctctttgccgagatccattttcagcctagccgctc

SEQ ID NO: 114063 - DNA, 1703 bp, Homo sapiens
gaagtaggaaaaggctagtcttctttaacatcagaaggcgtgtgcaaccagtcagtcagaagattctatttgttcctcccacttaaatatttctaaaacctgtctcttcctcttcatctctgttgctgaacccttcttctgttctattacactatctaccaaacagacctctcttctggttccatctatcctccttatgtccccagagggctttgatggttttgttttggttttgttattttaaaatctctcctaaagcaaaatcacttgtgttgcttcccttcccagtgttcccatccatcacgcctgtggatgaaatcatagaccagggcacatcacagtataacctccctcacttttccacctcttcttctctttcccccactgttcacctcaccctgtgctctgggctctgggagctctttacctgcatcagcgcctgtcaccttgtgtacctgttgtagtttatgtgactttgcccagaatgcgttctccatccttacaggtctgatagaatcctctttagccttccagaaccagctcctatgcccccttctcttgcatcgtctctcagatcctttccagagtgattcgctcccacgacgtttgttttgtacttgtgttacagcaacacggtcacattgtgccacatcacgagtttacaacccatgtgtgtctccggtctggatggtgaaatcctcactgatagtacctgccttattcacatctctattttgccagcaaccacagagcttggcatgtatccggcacacagtaaatgtgtatgggatgagtgactaaaacatgacttcttagaaagttgaatgaggtctcgaagtcctaatgtgagtcacctttttgtaactgcagaaattataagtatgtatgctaagatcctacttttgaaaagatctcccattgtgattggtagacaggaccaacaagctatgagtggatgattagaaagtactaaataataggatacaatcaagagtcaagttggggtggttgatgtggttgctgcaagtgaaactggagttccgagaacagaaggacgttgcttagaaaaggctgcctggagggaggacttacttgggtcttgaagaagtgggtcgatttgaagagatggagaaggagaaggatttggggaaggttgaggaagcggtacaaaccaaggcatgaagctggaaatgaaaatgggtgtgtgaaatttgtcttactgtaactctgggatgtaaccagaaataatgtgtgggatcttgaaatttgggcggattcagagtttatggggtaggtaacacatttgtgatttggggagagaaatggtggaagcagcctttttaaagaggtgtcagatcgtggcttgcaggatagatgcatgttgtgaacgtctagaggctgggagaccagaggggaggtgtgtgggggttgatgtggtgatcaagcagtaagacgacggccatagaacagtgtgtcctgggccaggcgtggtggttcgcgcctataatcccagcactttgggagggcgaggcgggcagattacagagccaagagttcgagaccagcctggacaacatggtgaaaccccgtctctactaagaatacaaaaattagctgggcatggtggcgcgtgcctgtaatcccagctactcgggaggctgaggcaggagaatctcttgaaccctggaggtggaggttgcagt

SEQ ID NO: 114064 - DNA, 1008 bp, Homo sapiens
ggatgggacaaggtggaaagggttatgaagaggaaagggagaatctgggagaacaaaggaactggccgttctttgtaagtggttgggtttaagaggtggaagaaaataaaggtgaacatggcgaaaccccgtctctacaaaagatacaaaaattagccacacttgatggcatgtgcctgtagtcccagctactcgggaggctgagcggaaggatcacctgagcctggggaggttgaggcctcagcgagccgagattgtgccactgcactccagcctggttgacagaaggagaccttgtctcaaaaataaaaataaaaataaaaattaaaaagctgcaactgattttgttgttgttggaagaatgcagtaaatgaccaggaacctgcagaaagtgagcagagaatgagttccattttgggctaatggtttggtattccaactacagagggctttcaggtgaacaataaaggcgtataagttgcaggtcatttgtgcggcagtgttcgttgtgaacacgagaatagcttggctttctgtgctttctgttccccttcttggaggggagcaggtgactgatttttatttccagcagaaggaggttcagttggattccatgaactcagagccctccttgggtttctgaaacctggaaactcgaggttaggattgcttggagattgtccgctttcctgttcctgaaagtaaagtgccctttaattcttggatttgttttattagtgttctcatctattcagaagccattgcattgttgatagaagggatatgtttttgatgtctatagtcaggtctgaaaacagagctctgcaagtagccgcacaaaagactaggccagctatgtaaataatgtatatttcaaacatctgtcatatacctatcccgttgaaaaattacggcttaggtaactcatacacacagtcaaagtctccatttatctttctactttaatccgtgatggcccctccaggccaagttttctttttctgaaga

SEQ ID NO: 114065 - DNA, 1572 bp, Homo sapiens
agaaatcacttattttctcaggacctcggcttccttacctgcaacatgggaataataatggtacctaccccttgggctttgggtgaattaatatgtgtaaagctcttagaaccaagcttggtacaatggaagcattatatccctatgactgattttgtcattaaaagtaatggccaaaactgcaatgacttttgcaccaacgtaatattaaaagagccagcatgggtataaaactgtagaatcccatcagacacatatatagaatcacaacaggatctcgatcgttgtcacttcaaagtattgatataaagagtgacttgcacagaagctacacaaaaaagtacagttgagttttactttgcaaccgtgtcgtcttcctacggtgacctttccagaacgcttttgttttcccctttccaataacaccctcttccctctacttcctatctgcttcctcctagagtttagaacttagttccttgaggaaacctgatggagtgtgaccgagccgctccttctctgtgctccggcagcacttcttgcgcacctctgaaataaccgacacatctgccattttcttgtctgaccctctgtctagactggaagctctttcaggccgtggctcgggtctgacgtggctttgtactcccagtgtctagcgagtgccagatgtgtagcaggtacacagcagtttaaatgtatagatacggggacacatggtcttgctggcattcccagtggcttcagtggactctgtatttcacatctttctctaaccatatgcgtggttgatgccccaggggttgatggaaggaagccaccagggtgattgtggtggatcggtaatcgtgacccactcacaggggcccgaaggagcaaactgaaggaaactggggtagtttagctgtaaccaccgggttgtagagatgtgaactttggttttaggatttttaagaattccggcatggatctttggtgaaattataaaacagtgtcttctgaattcaccaaacgtctaagataaaacttccatttagattagatgctagagcttgtgattggaatgtgcgttctgttaacctagtgaactcatttggattttcatttccattggttttcaaataactgaaagaagtatttggacatattttccccacacttgcaaactggctgtttataatgtagacaaggggcagatgtggataactttttaacagtgcttttaaaaagactgcttagccagagagtgaacacgtcccagagagcagaacagtgaagatggccatagtgtcaagtggatttttccttatttgtgagagtggcttctgtctatgttcatcaaatgcctttatgtggtaaggcagcgctgtgatttagggctgtgaaatcagacattcatacattggtgctggcacccacttgctggctgtgaaatcctaacaatctatgttatcagtctatcctctgttttcttatatttaagatgaggataaaatagtatctaatttatagttgttaaacgtggattaaatgagcaaatgcaatcaaaataattagcatagtgcctgacac

SEQ ID NO: 114066 - DNA, 1030 bp, Homo sapiens
tacctgtgtaagtgtcaccttgtttagtcctcacagcaatcctgcaagggtgccactgattaatattttagcaacacaaatgtaaaaaaatttcagaaaactgagatttcacatactcatcggtatacttttaatcatgttcagtgttagtaaaataacttcttatttttatttatttttatttttattttgagacagggtcttgctctgtcacccaggctggagcacagtggcaccatctcggctcactgcaacctccgcctcctgggttcaagcaattctcctgcctccgcctcctgagtagctgggatggcctgccaccacggccagctaatttttgtatttttagtagagatgatttcaccatattggccaggctgatcttgaactcctgacctcaagtgatctgcccgccttggcctcccgaagtgctgggattacaggtgtgagtcaccagacccagccttcttatttttaagtaaagtattgaatactgtttcattcccccagtggttcatcttgcacttcctctaagtggaccccactgtagaagcctgtgctgtaatgagagagcagattttagggctccttgcatattctaacaagtctaaccctaaatatttgggtatgttatttaaaaataatctcttcttagccagctgaggttcttctgagaattatcttgccttacccaaagaacaataaagcctcctaagatctggtaaggggcaggctgggggatttgctgagtgtttccctgctgctatttcttcctcttcctctttttagcaccttagagtgggtttcaaatgccattgtaatgccgttgtgagctccttagtcgtcttaattggcttagtgttatcatgagctgccaatcatgtagtgaacatccctgattcctggagaagatgagatagctgggaccaaacaactcctaggtcttaacgcatttagtgcaaaggtacctgacaacaaaatttgaaacatcaaatgaaaagaagtctcaaacataaacataatttcgttc

SEQ ID NO: 114067 - DNA, 1518 bp, Homo sapiens
atgtgtgttcttagtcatgtatgttatgaagtacactcatagctccatgctgtggatgatctgtcttctctgagaagttagaagaaaactggagtgatctctgtgttgtctgctgcacagagaaacatgatcagctggagtctttcttagaaggccgctgtcacttgattaataaccaacacggaaggcagaggcagagcagaccaacaaacgtgctcctggtttcttgtgcttgtatttgaatactgttttcttatttttttccaagcgagggaaatatttaaacacaggcaaagtacacttgtgattctttaagttttatccctgtttgcagtgtgtgctatgaggtagtgctgtgggatgtaaccatatgggcccttcccaagttgcttaaaatgtagtgaagagcttagaatatctttaggggtgagctgcagaaagtgaggtgtcagatgagtccttacctggggctgtgaggggtgtggcatggagttgtcaggctgcattcggcagggtcagcattgagttgactctgtccttgtgttctagatataccctccggaaggtaggaacactctgtagactgtggttcctagacaccatctgtggaccagcattgagttggttccttctgcagaatcatctggggaacttaagcagatacacatgttagcctcattccaaagtatttgtagcttgggatggggtccagaactttatattttcaaagctctcgaggtgattctgatgtacagttaggtttggtagccactgatttggaattgcctgtccaggacagcagcctctcagctccttccttcaaatcctcactgcttcctcacaccttcagcaaaccagcgttgcctgttcgtgtcagggccttgacacgtatgcttgtcttattaaagagtcaggatccattcttgccttgaaggcccccacagttggctggagatatacaggaaaccactgcgggacagtgggatgagggtgatgatgggggctgagtaaggggggctggacccccacagagactaggacatgggaaaggacttctgaggaggcacaggagccccgtgtctgcccttggaggggcaggcagcccagcaggaaaggacaagagaggctggagacaggaggagtcccccaggcagtgccctctctctggaggccagcagatgagagagacaaggcaagagagaggaggggctgggacccaggaggaccttatgtttcgagctgaggagctgtcgggttattctgagcttaatgagtcccagacagacttgaggtaggggagtgacatgttgggatttgcatgagagggagatcgccctggctcagggtggaaaatggattgtagggcctagaggaagaaactgataggccggcagtggatagagataggctcgcaagggtgacagggccagaatgttgaggaattccatgcctggcggtgcctgtctctaccttgaagcaggaagttggctgcaagagttggaagaggtcatgggcaag

SEQ ID NO: 114068 - DNA, 1049 bp, Homo sapiens
gtggaagatgtgggtgtttctgcagctttagaactaaagaaatgtcctacatgacagctcctcctcatctgaacaatatttatagcctcttgcagaatacgacttcaaaaataactagtatttataaggcacttattctgcagagcttgcctctatttttccatttttccttagaatccatacggagttgtcgagaggcagattcacatgctaaatgaccatgaaaaatatataaatatgacattgctttctgaatggtttattagttaatgttcgtattagccagtgtttacatttttaatgtgcatcaatagaaaaatttctctttaagctcctggataatttccgaagcagattatctggctcacgtacaacatttattggagtttgtggacagacacaaataccgtgcctttccccagtatattttaagtgataccgatttactttaatactgcagatttagccaaagacgtaattgggaatggcttttcctaagcctgtctagttcttattgaaattaaagcatttgcataaaaagctatacagtaaaccccagaagttgttgttgttgttgttgttgttgttgagacagtttcactcttgtcgccctggctagagtgcaatggcatgatctcggctcactgcaacctccacctcctgggttcaagggattctccagcctcagcctcctgagtagctgggattacaggcgcccgccaccatgccaggctaacttttgtatttttagtagagacggggtttcgccatgttggccgggctggcctcgaactcctgacctcaggtgatccacccgcctcatcctcccaaagtgctaggattacaggtgtgagccactgcacctggctgaaactcagaagtattaagacattgtaaattatgcccaacttgagtattgctaacaattacatttatgaggtaattagaattgtagtatctcctgttttaaagagcatttattatttatactcagcttcatcctgcctccctgcaaaagtatttaagatgtgttagggagacacatagct

SEQ ID NO: 114069 - DNA, 1012 bp, Homo sapiens
taaaatatgggctaactactgtttcagcttgagaaaacaaatggcagacaggaactgcaaatctggtatagggtcctaggagaatggaggcaggccatatttataaagattttctatatcatgtgctttaaaaaaaaacttttttaatggtttgaaaccaattcttacggctctgaaataagaagtctttattactgtcttgtcagatgttttcattttgtaaagtaaatggcttttgattttgtattgctacataatcatttcttatcagttcatctaattgctggggctttgaattccaactctggcagtggtgagtttcaacttttctggaagactgtttgaatctgggatacagtcagctttcagaatggcaatagaaaagaaaccttgagattcctaactttaaaagatttattaattcagataaaagtttaggctggaagagaacactgacataattaaatatatttagtcatttaattctcattaattttggggataggatattatgggacagtgaccgtgtgtttgcaacttggcaatccaggaatactctcttctggtagctagttgcccagtgaataaacttaactaaagcagagaattatttgttaaaaatctaaaatactttattttaacagaaaacacctttttcatgtagaggcaaggactatgaatttgcatagtttttctagaataaatcatacctattatgtatccagatgtatgatttccagtttcattttccacagagaaacaaaaatgagttaattcttgaagctgagtgataggtatgtggaggttttaggatactgttctgctaactgttgaatgtatttggaactttccattttaaaatgttttttaaataaaatatagagaaataaagtgatcaagaatttcaaacgtacgagaagaaatagaagtgcagaatcattcttgagttttatgatttaaaaaagaaatctcaggccaaggcaggcaaatcacgaggtcaggagttcgagac

SEQ ID NO: 114070 - DNA, 1028 bp, Homo sapiens
actgtgtaagttgtgtggtgttctggacacaggaaggggaacatcacacagtgttgtggggtgggggtggggggagggatagcattaggagatatacctaatgtaaatgatgagttaatgggtgcagcacaccaacatggcacatgtatacatatgtaacaaacctgcatgttgtacacatgtaccctaaaacttaaagtataataataataataataataataataataataataaaagaaaaaacactgggaggcacgtggtggctttttgtctcattgatgatactaagtttgatcatttggttatggtggtggcagcctgatttctccattgtctttttctttttgtaattaaaaataatctgttgatattttgaggctgtatgaatagcttgttttccaacagcctttgaccctgtggttttatcatgcatcagtaattcttgctttaatcacttgttgcaatggtggttacaaatgtgatattcgaattcgatagtttcttctaaagttatgaattgatgttcatttgttgaacgaaaataagcactgtcctttctaagcactctataattttttgtttgtttttgtgccataatggactcatggatttctttttattcagtgggttatagtcttttgcaggcatggtattctatgctgaactggttcccgatttgaccacagaaatcctttcaatcttgtccccgtgtcttttgaggtgtcctcatcagtttttgagccttttctgacactaaatgatgttccatgttcacctatgtttttcctgccttggacctatttgtgatgatcaattatttctctaaggcaccgtggtttccttcagggcggatggtagaatggtatttagaacccaatatcgtgaataaggcaccctggtttctttcaggggggatgataaaatggtatttagaacccaagagagtgaataaggcaccctggtttctttcaggggggatggtagaatggtatttagaacccactatcgtgaatgaggcaccctgg

SEQ ID NO: 114071 - DNA, 1027 bp, Homo sapiens
ttttggtgagagttggggagacactgtttgcagtctgccatgtttaactgaaaagcccatcttagatcttccgtctgttggttacttgaagtaagaagacagagaataagcagtatttacctttaacaccccaagtagctctgctcatgatgtctgcctcggtgtcccgggcccgcactcctccagtatccctcactggcaattagaactctgtacggcttccttgaagtttctcttcctaactctctcagtgggtgggactccttttcagtgatattgacggtagacctgaaaattcagggatgtgggcagttctggagagaataggccaggctctctgtggatacatttgcactgtgcttgaggactgaatgctacaaatcagacagtcctggattatttcagactgaaaaaaattaggagactaacctgggaagaggcagaaggcacgccagctctctcagcatgtttttgatgtctcggtgttctcatttcattgaaattagtgcagacctctcccctcagctgtaacacttggattttctaagccactttgatgtctcctatctctgcttatttacaatgaacatagcttcgaattttcattttctttctactctgttaaatgtgttatgtggaaatctgaaatctgaagacaaatttttaccttagaattctaagaatgcctttggtatcaacgccagttaggaaggtctaactcagggcggaagggggggttttcaaaaaggtgatattcgtgaggcagccatcgccttcgaaacactttgagaggtttaatttatttctcatgctttggtaaacaaaagctggcattttctttccatggtttttccactgcaaggctgccgttcctccccttcccccgcagtggtgcattttggtgatcaaatctaaaacatgtgtcaggtttgcgggcatgctttttaccaggaacctcctttaatacttgccatattggcagttttcacaagatcttctcgctgtgctttatttatttatttattta

SEQ ID NO: 114072 - DNA, 1028 bp, Homo sapiens
tgcgttaattaccgactgtaacatgttaggaagttttacagctgcctttattcaatcttttatatgtgcatgtgtatattatagataacttaacacgtgtgtatgctgcatagagaatctcaagcgtattctaaaaaaagagataaccctccatattagtcattctgctcagagtcaacatttcatttgattgctggcatcagtgacaatatctattggtggataaatgatacattaaagtgcatttacattgggtaagcaaacttgttcatttctagaggatattttggcattgattactttttaaagccttttatctataatgagtcgtaagggccataaagggggatgtaaagagtgtcggatttgcttggtcaggaggtttagttcatttttagattccttgaaattggctggtttatatcctaatattgatattatagtctttcattaattgaccataatatctgattgctccaaaactatctgctgaataatgctctgacagtttcaacttaaagctgtaaagggaagctgtgtttacagacgcaaagatctggaaatgtttatggtggtttgtgaaacaaatacatcaaggtgctgatgtgacagagacacatgagctacacccctcagccctacccctggttctctgtgacacagcgacttggatgctctccagggttttgtcggttggttagagaatgttttatcacattcataaatagtaacccaatgccctggaaaggttaaggcagtgtctccaactaaggtatgtgtcgctaggggggacacataccatagttgagttgggctatctggttcatcgtgtcacaaatgggaagcatgtgagcaagcttttggacagagctcaccgagctgtcatattgccaccccaatgtatttacccctcaaacagttcataaaaatttataagcctttaaaagcataaacaaagaataaaaacacatcgaacgacaagtgatggttgctgctgctgctgctgctgctgctgctgcatagaacgg

SEQ ID NO: 114073 - DNA, 1037 bp, Homo sapiens
ttacaaacgctttgagagctgaaatatgaactagatcatacaggtcccaggctgaccactgcatggtatacatgtaagacagatccaaatagcactgcaaaagctttctgcactgaagtgacattcagctgacaggaggtggtttggaaatcgcagcctgaacttaacaatgttgatcacgtgcttaaaaaaaaattcaacattgtccttaggatttaaagactcggactctcatgatataataatcaacattactaaaaattagccagcatatgaagaattaggataatctcaatttgtatgtgaaagaacaagtaacagttgcaaatactgaggtgtcacagatgttggaattatcaaagatttaaatcagttattctaatcatggccccagaagtgtgggaatagattatgtaatgcagaagtgagtggtaattttagaactgaaatatataataatcaaaaataaaaattcatgggtgggctcaacaacagaataaagataatagaaagagaagagacagtggacttgaagatagagcaatagaaatttttcaatctcaacaacagagaaaaagattgaaaaaaaaataagtaaacagagcttcaaggatgtgtgagaccataccaaaaatgtccaacatttgtgtaatcaaagttcctaaaagagtgtgatttgaagaaataatggttggcaactaaatttggtcaaagacgtaagcttttaaatttaagaagctgaacaaacctaaacaggctaaaatcaaagaaatgcatgccctgacacatcataaactgttgaaaactaaagagagaaaaatattgaaagcaaatagggaaaaatgctacataacatataatagagcaagttgaattactgcagatttaattggtatgtttagacataccaatgatacataacatataatagaacaagttgaatgactgaagattttctgttagaaaccacaaaggccaaagtaaagtggaacactatttttaaaataaccagggaacatattatttatatacgaagg

SEQ ID NO: 114074 - DNA, 1591 bp, Homo sapiens
ctgccttgtatttttgcactttttatatgtgagtatcttacctcctcaagtacatttgaagcttcttgagggcagacaccatgtcatttgtccatgagagagtgtgcaccaaggtttgtatactccatatgtacacaaccttaaagattaaaatttaaattcctgaactgaccataggactttgcagttaggcacctgataaatatttttaattgatttaatggtatttattgctgtctgctttttcaagtggagcagctctaagagcatgcgagaccattagccatcaagcgtttattaagatcctccccgtgtccctatgtgacgctgctatttaatctgctgccaaggacgcaggcgagtgccaagcacagcctctgcccacacttcatcaactgagcaaatcacctctgcggtcctctgtgtgatgttcgtaaagctttactgtaacaccgaagctgttatccaaagatgtaagaggcacggggccaggaggaggactgctaatgatggctgcatgtgattcttgagctcatcttgccatcagacgccgagatttaaagcatcagcagaccgttcttgtctttgtttctcagtggaggccaatggtgtccattatgaaacccaccgtactctcggtagggcagcaagatgagcttgtggtggttttgcctgaccgtgtatattcttttccatggtccttcaataaaagtctactcaggggcagtcgttaggggtcatagaccccagcagaagcaacttctacgggagaccccacttgtgaccttgacctcattggtccatgtgccaagtaagcagattgtgttcaatctaaatttaaaaattgacatataggttttgacatttttttgtttacagtggcttttttattttaattatcaagaggtaacacgtgttgttgaaagaacagactttcaacagcaatggttgttgaagatgattcatgtaggaagtctgtagaacagcatacataaacgtgtaaaaggtaaaattgactttcagtggctgaaagaacagactcgagagccagctgccttgggttgaaatcccatctctgccgttcaccagctctgtgagcttcaggaagagagttcccctctttaagtggggctcacaccagtacttaactttcagagtccttgtgaagatgatgtgagtttctaagtacagacatactaggcccatatatagatgaaaacatgcatgcttggatattagaaattatgactacatttttatttgtacattctcatcccttcgagtatttggattttttttctttctccacatatttaacctttcatagatcatagaagaaacttgtgtctttaactgtcaggaggtggtacagtgacccagggcttcccagaaggctcttacactgccaggactacagatatgtctgtttagatatgaatttgtaatacatttgttatatgcttccatcattgcattcttaaggtgcgtgtgcttattaggcaccctgtctgaccttacagtgatcagaccacgcccgacaggaatgggctggattacatgggtttgggtggatttatatccaacaacacag

SEQ ID NO: 114075 - DNA, 1006 bp, Homo sapiens
ctgggccctaggctcagtctgtggcatgcatgagaagctagtggcttatcaacgaggagagaaaatcataccctagaagggaaaatcaagaccgtatttggttaagtatgtggagaaagaaaaaaaaaacaaatacttgaagaaaagggatgagaatgtataaataaaaatgtagtcataatttctaatatccaaacatgtatgttttcatctgtatatggcctattaggtccttatatgcttctgatcaagcatacaaggtaaaattgatgaggctgttaaaaagtgcatcagtagcagttggtgtggaacacattctcaagggggtcacagggtgacagatagtccaggacagggaggagacagtgccacggggaggactcagcaggaggatgccacgtcgtcagagggaaatggatacgccagaccagagcaaaggggggaccccaggagggcagaggatgtgaaaagcgttaggtggttgagggcatggaagacgttttatttaataacattcaaagcaagcatctcaatggatcagtagatgaatatatagtctgcatgcctgctgagtgtcccagactctaggcagctagagaagagctgatctgggcacagggacctggttagtgtttgtagctatcggatgggtgatggcgcagaagcgggttatacgttttgtagcctcccgaggacagaatggatgtcactgtgcaggggtgacaagagacgctgatttgaactcaactcacaggggggcctttgccagagcctgagctctgttgggggaggttctggaggacaggctgaatcaccggagtcaggagaggataggacgctttcaggattttagccgggagacccacgtggggacccctgtaactctgagtttcgggggcgccttatgaagagcttcagtgcatttcccatctttgctggcaccccacattttgtgcccctggtagctgagctgctgggttcatgaggatgtgggagaatttgctgc

SEQ ID NO: 114076 - DNA, 1035 bp, Homo sapiens
acgtcaggaatcacctctggcggtggggaaggtggctcttggccagggcgctctcacccacccctgcccacgaggatggcccctttctgcccgatgctctaccctttctgccttatctgtctctatttattctgtgataagcttttacctgtagtcaaatctcagtaacaagagcaatagctaatgtgactaacgaaaggttgcggactgggaggatcatgagcttcttctgtagaccaatgagccaattaattcgttacttcacatagtggcattagacagactggtcagcacaaaggcccgggtgacgtgggggatgttaactcattcttttgggtgcccttggccaccgtgttactctcgtttaactttattcccattagaagtttcttagtaagtaatagctaatggacaccagtatttcagtatgattaatgagtgtcttctgtttacgctctcttgattaaaatgatttactcaaataatagcttaggaattggacctgctttaagatacccattaagtgttgaagtaaagcattaggaaacatttttaaagttgttatagaatctctaaatattctaaaattccttttttatgctgtttccttcagttgactattgccatcgggctcagccttcaacttttgaaatcagtggcatttgaaacaaacctacagtaaactagtaaaagtgccttttcattgccagttttcttctgaatgtcaaatacaaacattcgaaagtcaagaatagtcatctggtttcaaaggaaagctgcttaaaacgcaggagcatgtgaggtaatgggagccgtctgctctgcccccaccagatgggtgctgtggtcttcaagagagcgcataggaaagaagtatgtgggtttttttagaacagctttttaaaaaatactgtagtaggccttctgttaaaagagccaaacagcattaatacataaaattggggttaataaattgaattaaattgtaaaacacaagatttgtctgaggcgctgcatccgagaagttgttcactt

SEQ ID NO: 114077 - DNA, 1514 bp, Homo sapiens
gttcccccagcagacacgtaaacgcgttcaatgtgtgaatgaatgaatcatcaagttacacaaatgcaatttgtcgggatatgaatggcagttattaaataaatcagctccaagttaataaaaacggaaataaaagcctgttgttgcaagactttcagtactaggactatttaaatgagatctcggatgttaaagggaagttttatttgttgaggcagtaggagcttccactgcgtgtggaagtctttccacctgagtggaattggctgtggcttctgtgttcagagtggaattggcaagcagctgctatgttcggagctgactgtgttcgtcagaccagggccagatggacgcgtgaaggcgtgtgtctgacagatgaccgggtcttttaatgaaccactcacttgaaaattgtctttctgcaggtgatgtatcacccatcagtatgtctcccatcagtcagtctcagtttattccactcggggagatcctctgcttggccatctcagcaatgaactcggcaagaaagcctgtcacccaagaagcactgatggagcacctgaccacgtgcttcccaggtaacgaggcgggaacgtagcactttccaggtggcggtgtgctgtggtcgctctaggactcacgtggactgttctgcccatgtttaaagagaataggaaaacattcttccccaaaactgacccgaagctttccttacttctgtaattaaaaattcaggcacctgcatgacatcaaaaaataacttaactgcttcagctgtaatactttttaaattggcaccgagaggaagaaattaattcagaatccatgaagaatctggcaagaatgaccaggactccagtcagtctttgcaaactaatctttaaatacatgaacgtgagggttcaacggctgaaaactttagtcctagggagttaaactacagaaagggtcatgtcaaaaattaacatatcttacatatttgtatcatggcttgatgagttttaagaaaataatattgataaattaggatttcattttaaaaaataaaatacttacttttctcttaaatgttataaaaaggaggcaacagcccagctgctgtgtgagaggcatttgacgctttcagtgctggaaggcattaggaagggtgacaagctgcagaatgcaggaccctctttcaagagagccagtgtattgtcaccccacccccaaatggagatcctgccagagttgccaatctcatgtttcaagacaatctggaaatttggtcttatgtgaaatctctgcatttccttaaatattgacaattgtgtgtgtgtatatgttttaatgtctgtgtgccagcaacatgcaagtcaaatgaaatacattatcgggctaccagtttgccaacttggtgtggactcagcctgtttctaggttgaaatagagattatattaaaagggaacgtttgctatatttctcattcaacttagaagagatctgagtaaatataagctgttaattgtatcag

SEQ ID NO: 114078 - DNA, 1047 bp, Homo sapiens
tctgccaaggactgcaaagacccttactgtcccccttctctgtgccaggtgccacccactgaaaagagcaaaagtactgtaaatttttcctataagacagaaactctctcaaaacctaaagatagtgaaaagcagtcaaaaaaattcgggctaaagttattccggttaagttttaaaaaagacaagaccaaacagctggccaatttttctgcccagtttcctcctgaagagtggcccctgcgagacgaggacacgccagctacgatccctcgggaagtagagatggaaatcattaggcgcattaacccagacctgaccgtggaaaatgtcatgcggcacaccgcgctcatgaagaaactggaagaagaaaaggcccagaggagtaaagccgggtcctctgcccatcacagcggaaggagtaaaaagagtaggactcatcggaagtcccatggaaagtctcggtctcacagcaagacacgggtgtctaaaggagacccttccgacggttcacatctggatatcccagctgaaagagagtatgacttttgtgatcctcttaccagggtgcccagggagggctgcttcatcattgaacacaaaggagataacttcatcatgcacagcaacacaaacgtgctcgagtcccacttccccatgacaccagaatgggatgtgtctggtgaattggctaaaaggagaactgagatgccttttcctgaaccttctaggggaagctcccactcaaaagtgcaccgaagccacagccatacacaggaccggaggtccaggaatgagagatccaacaaagccaaggagagatccaggtcgatggataactccaaaggccctctgggtgcttcttctctagggacgccggaagaccttgctgaaggctgcagccaagacgaccagacccccagccaatcctacattgacgacagtactttaaggcctgcacagaccgttagtctccaaagggctcacatttcgtccacaagctataaagaggtgtgtattccagagatagtcagtggcagcaaggaaccg

SEQ ID NO: 114079 - DNA, 1032 bp, Homo sapiens
aagccatgcctgcttcccagcgtcagcaggagtcaggagggaaccaggaagcctcttttgactattacaacgtctctgatgatgacgactctgaggaaggggcaaacaagaacacagaggaggagaaaaatagagaggacgtaggcaccatgcagtggctcctcgagcgggagaaggaaagagacttgcagaggaaatttgaaaagaacctcacccttcttgctccaaaagaaaccgacagcagcagcaaccagagagccacccattcagcccggctcgacagcatggacagcagcagcatcacagtggacagtggattcaactccccacggtagggagaggtgtctctgtgcacacacatgcgcctagcggggcctggggctttatgcacgtaacttgacaagtttctgatttcgtagtctcagttctatggatgagggttaagagttgtatgagttgtattgttaacaatctgtttctgacttctttttcaggaattgaaaaaaatgtttctgcacctgtagagatcaccaatctggactggtgggttggctcctcccctcaaacttgcatcagtctgatctaactaaaaccaatatttccagtattttttctgctacgttcatattgccacccatgctaagagaaggatgttttttaagtccttcaaaaatagtaactttttgagtagaataaatagtctgggggcgggggaggaagataggggttgggagtaaactgattgatgctaagataggggtccctgtagtgaaaatataatagcagatctcaaaacctctccaatggatctagaagcttgttgccatttggatcccactattctgtgcagcctgtccctctggctcacacaccttcctttcactgccaagaaatggaatatttcttccctcacagcgagggcaggggcctgtgctctgttagatcaaagcatgtgccatgtttatttctcctcctgcagaaatgacggagcccatttgggcagtctaattgtagttccttcttgttaatagg

SEQ ID NO: 114080 - DNA, 2486 bp, Homo sapiens
agagcaacatgggacctaattctctttctaacttctactccagattggtgactctgagatgcagaaatactactgagagattgacatttctcatcagctatgattcccaagattttataatacttataattttaacatggattcagataggattatgtacttcatatatttaattattaagaattaaaattaattccgttgtgatcttttcactatatccctggataattttggaagtgagcatcacacagctggaactgggaatcattaattgctttgtcccatattaggcctttgtgatttattaaagggctggttcattattattattattatcatcattattattttggtcttggagcctttcttccaagttaacacgtgtgtggaagtctaaatgtctgcacagagctgagagatggccgtggtgacagtggagactatgggccccagtccctctccccatccctcgaggagcctctgacacctcagggagccatgggcctcagcctgaaaaccactagtctactaagtggcttttctaagaaatcatttttgctaaataattttttatctcaaatcagatattattttctgatttattttaactatccttttttttcttcattttcctgttctactcttttttcctcttgagttcccggtagtggataccagattagcaaaacagaaggtctgtaatccgtggtagaagttgagaacaatttttggtggtaggtgtggtgtatttgcctgtgtctttctgttctactgtttctcattatgtagcctctgcctcctacctgcttttcacatgctcgttttaaacctttctcctttccctctgggcccctgggcttccacagacaggaagctgccgtactaaagagatagttgctaaggagacattgggagtagtttaatgagttctaactagaaaaccttccactgcataatattgaaagttttttgtttgtttgaaggtaaacagagatattcatgaaatggttgaaccagtatctctacagaatatattttactatctctaaacttggggtgcagaatatagaatttatgactgggattatttcttgaagtaagttgattttcagttgtttcattatgtgcttaaagttaagtgttttgtcatggcagaaggtaaagactgttctaaagagacaaccttcacacaatagccgcatgtctccccactaatattaagtagaattttctctacatgaaaacgtgtatcacctatacatgttatacagttagagaatctacagaacaattgctaattttacccctttcatatttactacccttcgattagaagctaggtgacaaactattttctacacaccttaataaagtcactgagttgtctcgctgatccaggagtaatgttctgcaaaggaaagtatttgactactagaaactttgctctgcagtctggggagtattttagccagatagcattatcatgcgcctacattaccattgctgcgagacatgggaatcgttttaaattttttttagagatagagtctcactctgttgcccaggctggagtgcagtggtgattgtagctcactgccgcctggaactcctgggctcaagcaatcctcccacttcagccttctgagtagctgggactacaggtgtgtgaaaccacacctggtaatttttaaaaaaatttttgtagatccttctgccttggcctcccaaagtgctagacttataggcatgagccaccatgcccagccctgacatgaaaatcttaagcaggccatttattaaaatctttcagtaaataattcaccgagcagctaagccccaaccaaaaaaaaaaaaaaaaaaaaaaaacagaaaaagaccccaaaaagtgacttttctccacactccagggtttcagtgctggcttagaagtcatgttcagccacatttccaaaattcttcagtcccttttgttgggaattaaagggtatgtagaaggaaaaagggtagaaacttgaactatgctatgagatctaatattgaaaatgaaaagtcttgacgtgagaagcctgtgatttcaaatatgaggcctaaagctggttgataaacacaatatgaaaatcagagaccaaaggctgccaggggtatatctgcttaatgtattgcaagaacgtgtgctgtagacgcctggggccaggggaagacatgtgtacagaaggatgaacaacagaaccgcttggtccatttctcctgcctataaaatcctgaaatcctgtttttcaggttgtactccattagctctctttaaaaaaaaaaaacaaaaaacaaaaaaccaacttttaaatttgaggaatatttttactgctaacattctatctcctttaactttttcatcagcacatccggagcccgcagcttgaatgtcacagactgtaatcattattgcaacaataatgaaatacattctttaccacaatttaccactatta

SEQ ID NO: 114081 - DNA, 1045 bp, Homo sapiens
cagtcactatttatttcattatatgctaggtatacaatgaaataatccacattttctaccttattagtgtacagattcttccttgatgcttacttcttcttcacagtcaccctaggagtaggtacatcccatcataactctctatattttagagatgaggaagtcagatactgtaaaaagttactttagtgattaagaacaaaaccaaaggaatgtgtcttgaaatctttggggttttgcatctttcctgaccctcctcttcctccacctgctccatgcctcagtggtagctctggcaaagccactggtgagttttcctgggggagacgtcatgtaggcaagtctcacactttcccttttagtgatgacattttggagtgtcttttaggtatgctcagatttaccataagcataatgaaaaacttgacttctccctataaatggattacctttctggaggtaccctcgacattcaagaaagtccgagggtttgtttgtttgtttgtttgtttttttggttgtcagtgaacaaactgccttttaaacaattaactcttggcttcttggtgagaagcaaactcaaagccacaaggagttaggcttaaataacctgttggaaagggctgtcagagtacaggattcaaagatgctatcagccgaggatgggaatgaaagagaggagaggatgtcttcgctgtagtagtttgacttgttaactagctctagcaggcttaagtcagttgtggggaccaactctcagagactatttcctaaatgttgactctgcctcatgcagtggatgttttgagaatgcttctggcttcctcaatctctgtagctgatacatttcttgtagccacattgaggccctggcacaggaaagctactcagttcttctcaatctggcccagtcatcttatttctgccattgccctatacatttgaaatcttaaatgttctaaatatcttaaagcaatgaaatagattcaagtgtttctaacttagaaaaagtaaaagagagagcaaaataatacagcttttaaat

SEQ ID NO: 114082 - DNA, 1043 bp, Homo sapiens
gggctcaatttataattatttatgttccaaacaaaacaaaacaaaccctttttgctcttttagtactcgggagagcctggcttccaacacatcaagcattgttgaaagtaaccgtcgtcagaaccccgctttgagcccggcccatggtggagctggtccagccttcaacttccgagcgagcgcggagcccccgacaaatgaagctgagaagctacagaaaccttccaactgcttgcaagcttctgttactagcgtgtgattgtccttctgcctcagatcttctgtctcattcgatacagcaaagtttacgacactgggactgatgtttacatctttggaaagacaagcatctcaaccacagtttttgtgtttacttaaactgtgctgctaagtagggctagggcaaaaaaacaaaaaatctttatttcagagtattgcttttcacatttatggctctgtagcaactgagtaacagtaggggtgatatgtatacttttgcttcactaattgtatctgagcacacataggaaagtctagacactgtaagtgtaatacgcattttcaatgtcatgcagttgccaattccattttaaaatgccacagatgcgtgttgctcccagtctgtggttaaacggtgccacagaactgatccttgacacttccaaaaaaaaaaaaacaaaacaaaacaaaaaaaatttaaaaaaaaaaaacaaaaaacaaaactaagctaccacgaaatgtcaaatgcaagggtccaccttgagggaaatagatgccaaactaactagaagggaccccggccctttgtgtgtgaattgtttatgcaccagtcatttttcactgtgagttttcgtgacactattttgcaggagcccatggaagtgtgtgagaaggggtcgcaatggagatcactgggagtgaatgttttcagggttttgttttgaagtgtcacagatgcttgtctgatttttttaaccttccgtgatcacaaacaggaatataggcctttgaatctgaagtggacaaaggaaagcaatttccag

SEQ ID NO: 114083 - DNA, 1041 bp, Homo sapiens
gaacacaaagaagacccagcagcaaagggatgaccaataatttcatcttatagcaaggagacattccaacgttcccatgttttattttctgagaacagtgggacagatctgtagtaatggaatattatttgcaaaagggttacatatgacacaagtaagtgttctgacataaagttttatttagttcagtggcatgtgctgttgggagccatacaccataaaatatatatatcccaaaataaatctagaatattttcacctccaatttcagtaattggcatatgatttgtgagacgcatctgtttttgtatgaggtttaatcactagcaatctgtttaaagaatccagtcctatacacagttggactcattcttgaaacctttaaatgctccctcatagtttttcagttatttggaagttgcattgggtcaaactgaactccttgagtttggtgtaaattccttttttctgcttattatagtgaaacttcagcatgtttcttagtaaactcccataccattgaaatgcttaagccagttggctttcagtctcatgccttatttcctccaaggcatgcctcaacgcattgtttgtctcattgcttaaatatgtccagaaggaatgatcatgtatctaatagactacatagttggttcccttggggagttatatatcatacagttactaaatatttgtctaaattcattttttccaaaaacctgctctcaaatttttcttctactctcagttcataaataatataaccattgaaacaacacatcagcctctagctgatcctctgaaagtagccattgaaataatcgaatactgtgtgaacaggaaaggaaagcgttacctttaagagaagctttaaaataggaatttattgatatttcacaagatataggtttacagaagacattattcaaataaatatgtacactatttgcctgatgctatggggtacataattttttaaaaactcccttagaccagcagccattagtgtagaaatgatggactttaaaggtgataccatgt

SEQ ID NO: 114084 - DNA, 1102 bp, Homo sapiens
ccatctcccccaggaccatcccgcccattgtcaacgtcatccagggctcttctggtagtgagtgacttttctgcacatgtttagggcttgggggagctagaacacaggaaacatgaatgcaaaaggcatggaaaacactgttttgctttgggttagtaaaatgtgggcaggacaaagattactattggtctgagctttgccaagtgagatagaatcaactgtcaccccattcctttcccagaaggtcttatggtattaaggatacatccagtattttcccacagatttttattcaggcgatgtttcataaattacatatatgaaaacattcattattacatttccttgtgtgtttcaaacagacattggcaccttcctattgagttaattctctgcatcttttgcagcagcagcccacaaggagattcccagagatggctcccctaacacacagtcctgtgattttacagttctatgacttacagttgatgattcacaagattcaggattctacaagactcaagggggaactaaactttcttacgattgtacatgatcagttatagggctgtaatcattaattgttggcttcaaatgtggacacacacacacacacatcatgccaaggagggaatggggtgtttcaagtcaggcagcgatgattctggaaggttggaaatgtaaggttagaagcttggctggtcttagtaaacttgttcccttgctcccaccaagaagaggtaccaaatgtgagacctgagatctcctccaatatctgtcctctgcagttccgggaaactaatcatgaagtacacatgcagcagctcctccacttcctttcctccgaggtcctcctttccattctcccacctagatactgacacaccgccacggtttccacattggaagggcagaacactgtgcagtatcgtgcacacttgctgggttaggaatagagctgccctagggtcaccttcatgcaagtattgacagctacaaattaaagtccttagagcagttgacacagatactacgttctagaagagaattaaatttaaacgtcaagtttaaagggatcataattctgcaggtatctttctct

SEQ ID NO: 114085 - DNA, 1046 bp, Homo sapiens
ggattgttctgaagaatgtgaggttcagagggaggaggggcactattaattttatttaagatgtgtacttccttatgctgcactgttagaacttggaaagaagcgacgttgacttagcagtacagactaaatgtctggtgaaccgctacttccttctccccacttctaatctctgaatattgacctaaatttttaccatatttcaaggtccagatcaaatgctgtctctttcacaaggccttctctgagtgcccttctccacttccatgccctgagaagatggcttcttttcctctcttatagtacagcattcatcatttccaatcctgtgttctcatgttttgccttaaagacagaccctgcccaagaccatcccctcagctagacagtttataccactttaatattattcccttgatttcctggctgggggagcctctgcttgtcattgtttctaggtggcccttatgagctttgaaatcttcagcaagaaatgggctgggtgtggtggcttcaagcagggtttgaaaaacgctgcgtgctgtggtcagggctccttctcactaagaaacctctcaggaatgtgctcccagctactgcatcctttttgcttccatgcgtctaccttatcaccaaaaaacctcaacacaaaccgaaaccaaagaacaccgggaacaggaactgagctttggcttttgagatgtcgagaagttgttataagatgagaagctgagcgggaggcttccagcccttcctgttgcaagcacctgtgctgcagaagcctggccctttgctcttgggttgtgacggagccgctgtgtttctccacagcacccttcagtctgtgtgtgcagcaccaagtcggggggaagttagaagaggtgggaagagccaccgagcaggcagctcaggagaagccaaaccttgcacagtggaacggaacgggcagtccatttgtggggaaaacacgagacggaggtccagtgctctgtggtgcggcaggcaagggggaggctcttccccaaagtggttggagtgtgtatggc

SEQ ID NO: 114086 - DNA, 1026 bp, Homo sapiens
ctcactcaagttcaaggaccaacaagggcagtggaggtgctgcattgcctgcggtcaaggccagcaaggtggagtggatgcctcagaacggacgagataatgtgaactagctggaattttttattcttgtgaatatgtacataggcagcactagcgacattgcagtctgcttctgcaccttatcttaaagcacttacagataggccttcttgtgatcttgctctatctcacagcacactcagcacccccttctctgcccattccccagcctctcttcctatcccatcccatcccatcccatcccatcccatcccatcccgctcttttcctacttttccttccctcaaagcttccattccacatccggaggagaagaaggaaatgaatttctctacagatgtcccattttcagactgctttaaaaaaaatccttctaatctgctatgcttgaatgccacgcggtacaaaggaaaaagtatcatggaaatattatgcaaattcccagatttgaagacaaaaatactctaattctaaccagagcaagcttttttattttttatacaggggaatattttattcaaggtaaaattctaaataaaatataattgttttttatcttttctacagcaaatttataattttaagattccttttcttgtttatcagcagttgttattacatccttgtggcacatttttttttttaattttgtaaaggtgaaaaaagcttttatgagctcatgtagcaatcagattttcctgtggattgataataaatgaatatgatatatagttaaatttttaaggggcatcactcctggctttgtctgtgtctgctttaaaagagcataatcacggaataggactgacaaaggattgtttctttttggggaccaaaatgttttcccttgttgaccacaagaaaccgtggaggttcttactgtgaggcttcagttgacttcttctcttgagtgctcgcctgagcaggggcccgtgctgagcgttttgcatgacttcccgtcttcat

SEQ ID NO: 114087 - DNA, 1022 bp, Homo sapiens
tccctgcactttttctcaaagtgtttagtacatgggaaaccactaattcaaacaaccatgagcttccctctctcttgctccctccctctctctctctcattcactcaagcgcagacccccagcaggtggccagcaggaatgctttccatctccattccagccactttctgccattgtgcacgccccatctatgggagggagaggggacgggacccactcggaatcgagatggggcacacaaccagctctgggcacgggtcacagcgggagggaacccacgcacacgtggaagaggcttttgcttagcattttgtgacgtgtactggtcactgcttttggctgggaaggctgctctatttttgccggtgaagtaggatgtttaagtggtaagagcatcggcatttcccagcctccacttcaattcccttttcctgctatcacagcttctctacctgatggtaacatttaactccctttcctcctttcagttccaacgccgaattttataaccccaaacccaaaagtatggtaaattctggtgatgcatatttcaccacacaagaaaatcccaaagtgaagcttgtgatctaaaggaaaggtgcataaccagcagcaaggaaagcccggagctggtcgggaggcttttccttggcagcatcgtgggcaggctgggcagtggcttacctcggcactctcttcatcgctgggcacactatcagtcgtttcgctttctgttcacagagagaaaaacacagggccatcattcctgtccctcaagctgtccccaggctcaggcagtgtttataaaaaggagactgagtaactaaacgcatcacctccctccctttgtaaagcgaaacattctacatgggagaagctagagtgaatttcaactctgtaatcttcggagaaaccaggcttgagagctgtgaggaggctcccttggccagggccgggctgtgtatacactgggcactacctcccaggaaggggcgctggtccctggggccctcctcactgca

SEQ ID NO: 114088 - DNA, 1029 bp, Homo sapiens
tagcctgggtgacagagcgagactccatctcaaaaaacccgaaaaacaaaaaattagctgggtgtagtggatgcacctgtagtcctgggtacttgagaggctgaggtgagaggctctcttgaacccaggaagtcaggactgtagtgagctaggattgcaccactgcactctagtctgggtgacagagtgagacctgtctcaaaaataaaatgaaaaaataaaatggggatactagtatttaactggttagagctgttatgagagttaaagatgattgatgtgaaatacccagtgcttgcttctcacacaccagtgactcttatgaagacacccctgttggtgcataagacagttgctctgctcacatcagcaaacacatcttcagtcctgctttggccgccgataccaaccttttacctcccctggcttgcctgccaccttctccctgcctagacagcacctccccatccattaaggtcttcctttaccataaagctttcctttgccataaagctttctcttatatgcccatttaacaatgatttatgtattccttatgaactacctaacttagttggcaattaataatacactaccttctgatctttattgcatagtcttttattattataattataggattattagttagctttatgtgatttatctctcacatcctcagttaacttatttgttccttgagggtagtgatcatgtcttaccgtctttgaatcccccacagcactcagcacagttccttgtaacaatgtgtgtttaatgaatttttgctgatccattgggtgactgggtaataagaaaaggcgttccatggccgggcgcagtggctcacgcctgtaatcccagcactttgggaggccaaagtgggcggatcacgaggtcaagagattgagatcatcctggccaacatgatgaaaccctgtctctactgagaatacaaaaattagctgggcatggtggtgggcacctgtagtcccagctactccggaggctgaggcaggagaattgctt

SEQ ID NO: 114089 - DNA, 1059 bp, Homo sapiens
ttcaataattcagtgttcgtgaagctggtccccggccagctttgctgaaagcagggggtgtacgcatagcacacattcgtccttcagcatcatttcttctgaaaccaaaggtgtctttttttttttatttgtatgactaataagacttatgtaagtttatgcttatttttgcctttatgactacataataatttatagaatcaactaaaatcagctatccatggtattttgcttgtattttgccttttaggttattattcttggcgaaattcaaaggatggctcctggttcatccagtcgctttgtgccatgctgaaacagtatgccgacaagcttgaatttatgcacattcttacccgggttaaccgaaaggtggcaacagaatttgagtccttttcctttgacgctacttttcatgcaaagaaacagattccatgtattgtttccatgctcacaaaagaactctatttttatcactaaagaaatggttggttggtggttttttttagtttgtatgccaagtgagaagatggtatatttggtactgtatttccctctcattttgacctactctcatgctgcagagggtactttaagacatactccttccatcaaatagaaccactatgaagctacctcaaacttccagtcaggtagttgcaattgaattaaattaggaataaataaaaatggatactggtgcagtcattatgagaggcaatgattgttaatttacagctttcatgattagcaagttacagtgatgctgtgctatgaattttcaagtaattgtgaaaaagttaaacattgaagtaatgaatttttatgatattccccccacttaagactgtgtattctagttttgtcaaactgtagaaatgatgatgtggaagaacttaggcatctgtgggcatggtcaaaggctcaaacctttattttagaattgatatacacggatgacttaactgcatttttagaccatttatctgggattatggttttgtgatgtttgtcctgaacacttttgttgtaaaaaaataataataatgtttaatattg

SEQ ID NO: 114090 - DNA, 1038 bp, Homo sapiens
tatattatgaagtatcttataagctacaaaattgaagaaattttgttcaccatgttcaaaatagttagaattctcttaccatttaaaaggaagaatttattgtggacttctgaattgctgagtagttaatttcatttcaaagtagttattctttgttttccatacaattaaaagtaattctttctgttccaaggaatgacatctcggtctggtacagatgtcgatgcagcaaacctcagggaaacattcagaaacttgaaatatgaagtcaggaataaaaatgatcttacacgtgaagaaattgtggaattgatgcgtgatggtaagaagaaacaattagaatgaacttcattgtacaattaattttatactatggtctagcaataattatatgtataataaaatatgagaattgtggaattatactgtacataaccctaatcttacatactttagtaagaagtttaaaaaaagttatttatgccaacttcctaaaatggtttgagatgtgttgccgtgccccaggttaggttaagatgacctcttagttttagtctcagtttcttcatcatgttcccatacagtatatctgaagttgttgaataaagtcatggattttttttccttttatttgcaaatgtctttacagtttctaaagaagatcacagcaaaaggagcagttttgtttgtgtgcttctgagccatggtgaagaaggaataatttttggaacaaatggacctgttgacctgaaaaaaataacaaactttttcagaggggatcgttgtagaagtctaactggaaaacccaaacttttcattattcaggtaatgtctaactgagtgatttggttattgacgattaagcaggggttactattctcaactgtaaattatccaaaggataatttttttcctgaagctaatgaactattgttacttttcatttatttaccacttaaaagatatagagtaaattttaattttatacttatatcaaaaagactcagcataattaacatccttttttttttttttttt

SEQ ID NO: 114091 - DNA, 1027 bp, Homo sapiens
tagctcatggggtttaaggaataatttatgaattgtgataaatattgtgctttgagttatatttgcattttgttgatttcccatcatttcagggtaatttttaagatttttactcttacctcaaaggataaaatatttcacaaagttaataagtaatttttaaattataaaggtatttgatgaaattttgaagaatttagaggaaaatgtaaaacatggaagttaaaagcctgaactctgaagtccaacagatgctttccttccttcttggctgtgacacaatatttgcataacctttagcacattacttagcctcacgtcaggtcattttctcatctgtataactgttgatgtgaaattgaaatgaagacagcctggtttataacattcaacaagtgttaactgttactgtgagttataaaaattgcactaatataaacagaaggcgtggtcatttctacctttgtaaagctattatttgatttctaaacagaaagatcatacatggaagcgaatcaatggactctggaatatccctggacaacagttataaaatggattatcctgagatgggtttatgtataataattaataataagaattttcataaaagcactggtatgtgtcttacataatttttaatccttttcaaatgtttgtgccatttacatttgatataatattaaaagcagtattattgaggtattagacagtaaaccgtgacacagactagctgtgaagtagagattgggcaggacctacaggtcctctgatacactgtgaacgcgtcactcttctgcccaacttcatagcctcctcttgctggcctcctatctgtatgcttggttgcctctgccctgacttctctgtagcccttgcttctttttcttctttctgcttcctctttgatcccaatggaaggttctcaaaaaaacagttaagtggtagtatttattttttccccagaaactgcaagagatatcacaagcattgccttatttaatttatgacaacctggaaagtaacg

SEQ ID NO: 114092 - DNA, 1611 bp, Homo sapiens
tcctgggatggattccaacagtgtaactgtactcaatgccactgagctgtacgcttaagagtggtaaattttatgtctatttcaccacagttttaaagattaaaatttttaaaagtgggggaagttacctaggactttctagaaggacttttgagggtgagcaagttctgttataggcttgtgtattattttggtatttctgattttatcataggagtgaggttaaagttgtattttgactggaatttttgacattgtcagggtttctagagtgtggagaaggtcactcagtattttttgtttttgttttttgttttgcctttgttcttgttttcctctatttagggaggtggattgccatgggaagtacctttgcttcgaaaagccagaaaatgcctggtagaactccagaaaagtagtaaggagctggcttcttcagaggcagcatagcagagtgggaagagggccctgtcacttagattgtgactgtcgacaaagtcacttaaccaccagaagttgggttttctgacgtttagaattttgaaaagattaaaactgagtgccttgcaaagtacctggtatatattaagtgctcaataagtgatagttgctttgattctaagaactggttcaccttgtgagatataattgtgtaatggaagaatgaaagcagaaactttagtttctacttttacatttcctgggccattttactaccctaaatgagaagctgggcttccaaaacccactttaaaagtaaagactaggccgggtgcggtggctcttgcctgtaatcccagcactttaggaggcctaggtgggcagatcacttgaactcaggagtttgagaccagcctgggcaatacagcgagaccgtatgtctacaaaaaatacaaaaattagccagacatggtggtgcatgcctgtaatcccagctactcgggaggctgaggcgggagaatttgagtccaggagatcgaagctgcagtgagccgtgattgcgccgctgccctccagcctgggtgacagagtgagaccctgcctcaaaagaaaaaaaaaaaaagaataaagattaatggagatttggaacatcttgatactgtatcttgggaatctaagcattgtagaattgtgttatgtgagttataccattgtggtgggaagtttttgatttttgttttaactgtgttgagttgcagttcttagaaatgacccgaggtgttgtcttacaaaagaaataaactgtaatctgtatcttgatctgatgagggtatgtaaatataaaaaatcgagctgtatactttctatatgctttatgtagttcactatatataattcatagctcaattaaaaagagagagagaggctaaattgtatgtaccattgcaaagaaatcattatccccagaactgactcacatacacctttaacagtagagggagaactgaggtattaatttggaaaaataatcactgggataattaatataatgcagtggttttatgactgattttttattaacttctattttctttgtattctagttaataaaggtatccatggagaacactgaaaactcagtggattcaaaatccattaaaaatttggaac

SEQ ID NO: 114093 - DNA, 1058 bp, Homo sapiens
gaaaaagcggatgatgacaagtagagagcaaatgtgcgcatgtctgatgctgtaaggatttcctttaccatcatataaatttttaaagtatatcaaaataaactgataactgagaaaatatatgttgttcagatactaataatgaagttaatgaagtccactatagtatttgtccctgagaaatctttatcaaatattttaaatcctattgtaaaataatgtattttttctttcagttttagagactggcaatcctaatttaacatctccttttgaattccccaccacaggcacactttcacacattcactctttaataacaggttgtttcaaattgttaatactttatagcttaatatagaaatttcactttagaaattaatttttatttctctgccttaatgctatagatgttgtagtctgctttacttcagtattgtaatgagtagttggctaaccaccatgtaaatagggagaacattctagttttttacttgtgtaggaaaacacagcttgaaatgtctaagtatctattttagagtgaagtaaatttatactgacaatatttttttgtgtttgaagacctgactgttacagcgttggtggcaagtgttaagggatccaggaactagacaagtgattctgagacctgagttccaggtttctaagtaatatcagttggtctactgagaactttgccataaacatatgtgttcagaaatttcctttcttagcagcagcatcctgaattgaacagaattacacacacatcagcccagtaagaaacaattcatgttaagtccattgctatgccaggataaatcttttaaatcacaattatttttcctatttatattttgtcaaataagaatgttctaaaaaccaaaatttctgttttcttttttttttttttttttttttgagacggagtctcactctgtcgcccaggctggagtgcagtggcgcgatctcggctcacggcaagctccacctcccgggttcacgccattctcctgcctcagcctcctgagtagctgggactacaggcacccaccacc

SEQ ID NO: 114094 - DNA, 1088 bp, Homo sapiens
tgtatttttagtagagacggggtttcaccatattggtcaggctggtctcgaactcctgacctcaggtaatccgccctcctctgcctcccaaagtgctgggattacaggcatgaaccacggcgcctggtctaccctctcgtaatctttttttttttttttttgagatggagtcttgccctgtcacccaggctggagtgcagtggtgcgatctcggctcactggcacctccactcctggttcaaactattctcttgcctcagcctcccgagtagttgggattataggtgcccaccaccatgcccagctaatttttgtatttttagtagagacggggtttcaccatcttggtcaggctggtctcgaactcatgacctcatgatccacccgcctcagcgtcccaaagtgctgggaatacaggcaggagccaccgcgcctggccccctttcttaatcttttagggagattctggttttccttccaggaaatactcatttgccaatgagtttgtgttgctgcaaagttttctgctaaaattcaagacaatgtttatcaactcaataagcacaaatgtgttaccaaagaaataggacttcactgttaaatgatttagtacatattatttcacttcaaaaaagccccaatatatctgttttccacataggtaaattatggcagagatgatattaatgaagagaggaactctattaattacctatttctatgtcaaagccagccccaaacttactggcttaaaaaagacaaaacaaccaaatttatttttttcttatagctctgtgggttggctgggcagtttgataggtctctctgggactcaggcttactaatgcgttgaattcagatgacggctggatgtccggaatggcccagctcacatatcagactgcttatgctggctgttggctgcaattccttggttcttttccatgtgggctttcatcctctatgaggctagagttatggcatggcaatctcagggcaggactctgggataaccaagtctgctgcaaaggcactcgttaaacctctgcttgcttcacttttgtcaatgtgatgttggcccaaaacaa

SEQ ID NO: 114095 - DNA, 1017 bp, Homo sapiens
aatactgtagttctttatttttgatttagctgtgtcaaccaggaagttactaataaaaggaatagcatggacttgtgcagctaagttctattaggattatttcaaaaaaaattttcagattgtatcacaggaagttgtgttaaaattgtattgactattattcagcctaagtgtaggtactgacacttactgactagctatttttcttttaaatgttaactgaataataatgttatagattacccattttataacttttaaaatatatccagattaaaatgtttttgataaagaatatctgctagtattctctgttggacctctacatgcttgattttaaatctttgtgaaaatgtatgtgaatgctatttaaaaaatatatagaatgttagctttatcctggctttgaagcagaagaaatatatataaagtcccccaccacccccaaaaaaaaccccaaattatatttttcttcaaatagccattgaacccttaaaaataaatttagatgcttatttcattacagctggtaaattctgtttaattttaaacctttattattattattattattattattattattattattatttctgagacagagtctagctctgtcacccagactggagtgcagtggtgtgatctcagctcactgcaatctctgcctcccaggttcaagcagttctcctgcctcagcctcccgagtagctgggattacaggtgtgtgccaccatacctggctaatttttgtatttttagtagagatagggttttgccatgttggccaggctgttcttgaactcctggcctcaagtgatacacccatctccgcctcccaaagtgctgggattataggcgcgagccattgtgcctggcctaattatgtttttagtaattcataagtattgactttcttctacagtctaaagtaagatttcttgtgtagtttctccatgggctacaaggaacctcgattcagagattttcactgccacttaacattgcatattagca

SEQ ID NO: 114096 - DNA, 1023 bp, Homo sapiens
ttctgcttctacagagggagagaacaaatatggaggaagagcccctgtaatacagaggaaacatgtcaaactaatcacataaatcaacctaaaattgtaagtctataaagagaaaaagagtatgtagggggaatttgatgtagagagggaaatcaaggaagccctctctgagaaagaatttacagaagagtaaagccagagggcatgaggacagtgtggtgttagaagaatcccaaaatatcattaaaaatacagtttattgcgtaactttgaggtatctaaactgacggcagttcataaacatttttgctcatgtcaagataatattgcatggtagttcttagtagcttcattttgcaaatgagaaaattgaagctttagggacttgtcctaaggctgcacaaccaaggcttttttaagcagttacatgtgctaaaaatttccattttcttttttattccttaaagcaactccaaaaggtagctgctattattattcctgtttagcagctgggaaatgttaaggtttagatttgaccaaagccatagagctggcagatggcaaagccaaaactgacactgacctgtctctgactccagcccccgtgcttgctgcctttctattgtgcatggccttcatgcccagtgccttgtagtctcagaggctgtattcttagagctggagtcaggctcaatatgaactagacactttctggtaattaaaaccattaaaaaaaatgaattaatgactttttttttttttttttttgagatggagtctcacactgtcacccagactggagtgcagtggcaccatcttggctgactgcaatctccgcctcctgggttcaggtgatcttcctgcctcggcctcctgagtagctgggacttatagacacctgccaccacgcctggctaatttttatggttttagtagagactgggttttaccatgttggctaggctggtctcaaacttctgacttcaagtaatctgcccgccttggcctcccaaagtgctggga

SEQ ID NO: 114097 - DNA, 1063 bp, Homo sapiens
tctcctagcacgcaagtccctcccccagttcctcattggctgagtactatggggttaacaatctttccagacatcacctaagtttcattatcccccttataaggttataccccatccccttccccacttgagttttgattttccaataacaaactttcttcctttttatgggctgacccctcctctacattctgttcacttattaagactttctaggtgcatgagccgtgtggtttgttacatttgcaggctggctgccggtacttagatttatcatggcttgaaaatgaaccatttaaaatgttttctcacaatccttcagatattagtaatggtagagtccatctttgaccctcttcccactctatcctcacccttgatgatcagccaccatcatggctttgatatgcatctatgttgatgactctgaaatctttatcttcagcccagattgttctagacgtcagacccatccagccaactgcctctaaacactccccacacagatggttccaacttggcatgtcctgtgctgagctcctcatccttccccagagtcacatcttctccgtgatgtgtgtatcagtgagtggtgtcaccagttacccaagtagacacgttggtatcatccttgccctctctgtgcctctcgccctacttagccagtcagctggctagagtgcgctgattctgccacctgtgtgcctcaaaccctccagtgattattcgctgccttcaggcaaaagcatggatgccgtagcttgcaaagcgaggcccgctgtgctccagcctcatcttctgccaccctgccctttgcattcagctcctgtcctgggccacatttcctctagtccatgggcctttgaaccttttgatgctgctgtctaaaccgttgtgcctccagattcacctggcctgttaggattctgtagacgtcaagctatgtgagaagctgtttctgtcatatctcaaaccctaagccttacttggattagtgttcctctgggttgcagagaacgtccagggcttatggtgtcaaagcatttaccacttcctgaggtca

SEQ ID NO: 114098 - DNA, 1049 bp, Homo sapiens
acaagagtgagactccatctcaaaaaaaaaaaaaaagtattattcactaatttcactaattttcattttatggtgtttttcaaaaaactacaaaaataatgtaggttaacaaaatgaaaatgtaaagttctttttcactcttctgtccatgatcaaaggcaggtaaccactgcaatcatttgctatttaacctagaagagcgtttcctatatttcctatatatagagagagatcttcctcagtcttttaatggttgtatagtttttcatggtatagctctgtcataacttacccattcctctactgaagaacatagagtgtttttttcaaagatttcttacataagccctccagtaaacatttttatacacatattttcatatattgttatttataatagcaaaaaactgacagcaatctaaatgtacaacaaaattgaattggttatatactatgaaatcctctagctgttaaatttaaatttgtgaagcctgtataatgtggaaaacacccatttgtgatgttaaaagaaaaactagtctctaaaattatgtgtatggtatgattacaagctttaaaatatggataaattttcttatgtttattttcttgtcttatatgtatttatagacattgatttagagtctgcctctcacatttccacattaatatatttttcaatatttctccaattatatatattattttagtaagtgaaacataaacttcatttaaagcaaactagattcttgtccttaaaaattaaatgatactggctgggtacggtggctcacgcctgtaatcccagcactttgggaggccaaggcaggcggatcatgaggtcaggagttcaagaccagcctgaccaatgcagtgaaaccccgtctctactaaaaatacaaaaattagcaaggcgtggtgttgcacgcctgtaatcccagctactcaggaggctgaggcaggagaatcgcttgaacccagaaggccgagcttgcagtgagccgagatcgcgccactgcactccagcctgggcaacagagcaagactct

SEQ ID NO: 114099 - DNA, 1050 bp, Homo sapiens
aagacctggctgatggagctaggcctgttatggacgtgagggactgcctttctctttgccaaaatgaagacagcagttgaaattatttcaaacgctttttatgaaattagttaacatttgacctaattgagaggtttgaatcttacctgcttccttgtagtgtcacaaacatgaattgactgaaattgcaaagagtgagggaaggctgagagattgcaaaacccgtaattgtgctcaacaacatttaatcaaaatttaacttctcaactttcagctattgtaatttataaaccattctctctgttgcagtagaaaccattgaaggttttcagtgttctccctatcctgaagttgatcattttgttctttctttggtgaataaagatggcattaaaggaggtaaagttaatctcatcctttgttaactgttatatgatagagtgatagtagctttagaaacattatttgcattttaggaattcggcgttggaactactttttcccagaagaattactggtttatgatatttgtaaatatcggtggtgtgaaaacattggaagagcccataagagtaataatataatgtaagtaatattaatgatttgtgtgtatttaaccaatattatattttaaatatttataacttttaaagttgcgaatatgaaaactattttgttttaaaaataaatttagttgtattaaatttcttttttttttccaagacgaaatcttgctctgtcgcccaggctggagtacagtggcgcgatcgcggctcagtgcaacctccgcctcctgggttctagcaattctcctgcctcagcctcctaagtagctgggattacaggcgcctgccactacacccagctaatttttgtatttttagtagagacaaggtttcaccatgttggccaggctggtctcgaactcctgaccttgtgatccacccacctcagcctcccaaagtcctgggattacaggtgtgagccactgcactcagctgttgtattaaatttctatttgttgtatatggttagcattacataatattt

SEQ ID NO: 114100 - DNA, 1099 bp, Homo sapiens
tgtgtgctatcacttcaaaaaaaaagaaaatgagcatacataaattctcgaaggtacgtgccaaaacgtgtatcatttatttctggtcaaatgagtaaggaagattctttcctctttgcttcttgtgtatttcctaattttatgtattttctttcttttttttttttttttttttttgaggcagagtcgctctgtctcccaggctggagtgtaatggcgtgatatcagctcactgcaacctccacctcccaggttcaagggattctcctgcctcagcctcctgagtagctgggattataggcataggccaccacacctggctaatttttgtgtttttagtagagatggggtttctccatgttggccaggccggtctcaaactcatgacctcaagtgatctgcctgcctcagcctctcaaagtgctgggattacaggcctgagccactgtgcctgacctaattttatgtattttcaattcattctacaatgcacgttaattatttgggtaaataaaaaatctttaagagaaaaatgttggtttgacaacctggtaatacctaccaaaattaaaactgaatatgccctttgacacaattctacttctagaaattcatcctacagatacagatgttcaaagaaatacaaagatgggtattttgttactttgaaaagcaaaatatgggaaacttcttaaatgtctgggactgattaaactgtacacctcaagcagcagtaaaaaaaaaaaaaaaaggtttgtattatcagatatgtgctgaaatgggaaaatcactacaatatattcctataatacagtcataagtgaaaacaaggtagcaaatgggtttcaatgctatttggacactactcatggctcaggtatactattgtaccaagaactccctggtaaggagaaagacactaaaatctgtacttacctctttgaaaagaaacaggagacatacttcagcaggtaatgggaaacctgaatcagaaagatagcaaaactattacatattacagttatctaatttttactttgtggtaaatgtaaaaattagtaacttacagtcagatttgaagttttctgctttacataca

SEQ ID NO: 114101 - DNA, 1026 bp, Homo sapiens
gggctggtctcaaactcctggcctcaagcagtcctcccgtctcagcctccccagtagctgggattacaggcacgtgccactgcactgaataaggacattctttacataaataatgtattgggcggatcaactaaatgtctatactgaagacattctatggtaaaataattgatacaatactattatgtaatatacaatccagtcatattttggcaactgtttttaatcttttttcaatccatgtttacgatttgctaaatactttaaaatttaaagcatgggtactaagtccattgtcaagatagcaaatttatcttctgatttgtcttcagctggactgtccacttgttaaaaaattaaatccacccttgctcttccgtcggggagtattgaaaagtatgtgcacagaactgtaggtaatttcaaatttggagtttcaagtgtgtctgagcttcagtgcagcaacgtttgaatcagtgcactcattcccacggtgagatatcggagacagcattcctcctgcatattcactttagtatctgtcacttaataccttacttcaacatagagtataaggttaaatcacatatcctgagtaaatattttcctatcccactctctatcccttcaccactgaaataaaggaagaagagtttacaacagatgaagcagatgaaactaggagcaatgaaacccagaatcctcataaaccatcacctagcaggctgtcaacaggtgcatctgctgatgctgtctgggataatggcattgatgatgcttattttttagaagctactgaagatgctgaattagctgaagctgcagagaacagtcttctcagttataacagtgaagtggatgaaattcctgatgaactaattatagaagtattacaagagtaactaattcactatgaacacttttgtcaccaggctataatttgcctgatgtctgtgagatttgataaatatatcattcaacctgtttatataaactaagttttattactttgctttccaatttttg

SEQ ID NO: 114102 - DNA, 1054 bp, Homo sapiens
agctttggtgtaaattcaggagaaatcgccttattaattaatcaaaattatgttcacatcaacttaattttacaagtttattatagctcatacctgggaccgattaaggtgtcaacattttaaaattactcaagatattaaccagaaaagatgattatggcctttaaaactattggacaaactgatgctatttaacattgttcacagccatttaatttgaataacaaattttagattctaagtaggccataacttctttgcaaaacaattgatttataaaggtacagtttcagaaggtaacagcatgagactagtcttcctataggcacattttagtagactgctcttctcatccctggtcaaggagcttctctaactgatggttgatatttcgcagatggctttcggctcccagaagtgttcttgctttaaataacagagctggaaggctggatgaatcatactgttgaaagaaaattatataattagcaatatcaaaaactcataaccttgtccttagatagcccaatcttatgactaatgcaaattttgattgagctttccattaactactcctcctctcatttttaactaggaccattaagacaattggttttaatccatttcccttagaatataattgatcacaaagttgctagggagctgctctgcaaagcttgaactgatcttcttatcccagaagaccagctgattcaaagaattgtatcatctctattactggagacaggaaatcacatctgggacatgtcaaggcttggtttgggcaggtctgctcgtgctgtgtagaatctgcttgatatcatgtctattttaaaacacagaaaactgtaagacaggttttactttaactgaaataactaatggaatgagaacaccagatccataaaagttcttaaggaaaaaagaaaacccaaatctatcatctcaagaaattatttattgggagaatcaattaaatgtctcaaaggctgccaatccaaatgttcttaatgattcatgttaaaattagaatacaaacccaacataaaataca

SEQ ID NO: 114103 - DNA, 1024 bp, Homo sapiens
cagccatgttcgaaagaccagcctcttctgtttggtctagcccatgttcacggcatcttttgcatatgaaaaacaagctattttcccgtataagtggtaggtaggattttagaagttaagaaacaggccgggtgtgatagctctcacctgtaatcatagcacttcgggaggctgaggcaagtagatcccttgagcccaggagttcaagaccagccttgggcgatatggtgaaaccccatctctactaaaaatacaaaaactagccaggtgtggtggtgtatgcctgtagtcccagctactcaggaggctgaggtggcaagatcgcttgagccctggaggtccaggctgcactgagctgtgatcgcactactgcactccagcctgggtgacagagcaagactttgcctcaaaaaaaaaaaaaaagttaaggaacattaaaaaggaatataatgggaaaacaagtttattgttttaatacattttgtagttgcttctggatttttactgcagactttgctactgttatgccatctgcctcagattaatagaaatgtttaagttctaggaaagaaatttgtatttgtatgccctaatataattttatataatatatatatatgtaatgtatacatattttatgatcagatttgtattcacttctaaattcaatgttaaggttttgacactgatctaaattaattttcctgagcctaaggtttgtgtatatattagagatccagaaatagaatgcttttaaaggtatttttttaattacctaagtagtccaaagcttatgatttggagtttgttactaaatttgggcaagttatctgtagcattgattcagcttgaacataatactttggttaaaagcgaggtttagtgtctctgccttgtttggaacacaccacctgatgagcgtcctgttcttagagtgagctcaatgccttcttgcactcctcttgtattaactgtcccttttgccttattaagtgtagatatttgggcatatgtcttactctaa

SEQ ID NO: 114104 - DNA, 1040 bp, Homo sapiens
gcaaagtctgcagtaaaaatccagaagcaactacaaaatgtattaaaacaataaacttgttttcccattatattcctttttaatgttccttaactttttttttttttttgaggcaaagtcttgctctgtcacccaggctggagtgcagtagtgcgatcacagctcagtgcagcctggacctccagggctcaagcgatcttgccacctcagcctcctgagtagctgggactacaggcatacaccaccacacctggctagtttttgtatttttagtagagatggggtttcaccatatcgcccaaggctggtcttgaactcctgggctcaagggatctacttgcctcagcctcccgaagtgctatgattacaggtgagagctatcacacccggcctgtttcttaacttctaaaatcctacctaccacttatacgggaaaatagcttgtttttcatatgcaaaagatgccgtgaacatgggctagaccaaacagaagaggctggtctttcgaacatggctgagtggtcttacatgaatgaaaactgtaatacagcagagtgtgatttttcaattgagatttatacacagaataaaaacttcccttgatgaaattcagctgtccgagtgaaaataccttacacaatcagcaattctagacattactcctccagccttcattaagtagctaagaaaagtgctgatataatgaagtttcactggcttatagtgatactattttaggtggactctgtaattctgtatctgcatttgtctttccccaaagcttctgatactctagcatgaaaatgccctcccacaatcatcttctgaagcatggtaaaaagtaaaattggagttaccgtttcctttacgtttggttcttgagcttgaacatctgaataatcttgataaagctgttttaaattagataagaaatatgctgcattcctaagggaagactttctctctttaagttcatcatattttgtttgtagttgtttcagctgtggctctaacctaaaacaaaaataagtgacaaataa

SEQ ID NO: 114105 - DNA, 1029 bp, Homo sapiens
tttaatctcttattggtcatttctgcattgcttattacggagtgggaacattatgaatgtctaacaatggagaattaggtagtcactaaaagtgactgaatgtccgagataataaaatatgaaatatttcttttaaaatacagagtggatcacaacactcccctgctttgatagtttcctagtatgcctagataaaatctcctcactttacaggtcacagggtccagtaaagacctggcccctgctttccttcctctggtcattctgaagtagatacccctgcttttcttttccagagttctctcttcttttcctacatatcacaagctgtaaatacatactgtttctatgtaatgtctgtcttccccattagaccaaagtctgtgatggtaagaactgggtctgtcttgttttccactgcacttcattacctggcagcttatgtggcagtgctcaaacagttacaaattaattttaacacaaatgattgtgttacttagatgatttcagatatcgaaaagaaaaggcagcgtatgattgaagtccaggatgaactgcttcggtaagatactgtcaaatcctgtttgagcacttacctaaaaggatgtaatgatggtgtgtcatttaggggagtgacacttgctgctgtgatgtattaaagccccaggttatcttcaagctccgatactcagtgaaggcagggtatgctgcttagttgccccaccttttgacaaaggagaattccacactgatctatctccacagatttctcagctctggccttaagagatataatgcctagattctagaattcagctgcctgggttgaattctagaatctacacattaaactgcttgaactgcttgggttgaacccaagctctgccacttactggctgcgcaacattgaccaagttatttaatgtcccagtgtctcagttccctcttttgtatataggcataataataatcatacctatacttcacagagtgttgtggaaattaaataagtacatatatagaaagtgc

SEQ ID NO: 114106 - DNA, 1356 bp, Homo sapiens
catatagaccatggaatactacacagctataaaaaagaacaaaatcatgtcctttgcagcaatatggatgcagctggaggtcattatcccaagtgaattattgcaggaacagaaagccaaataccgcgtgttcttacttataagtgggagctaaacactgggtgcacatggacataaagatggcaacaatagacactggggactcctagagggaagagagacagagggattcaaggactgaaaacaacctgtttgctactatgctcgctacctgagtggtggggtcagttgtaccccaaacgtcagtgtcatgcagtatgcccatataacaaaccccttaatctaaaacattgagattattaaaaataagagattaaagatatttttaaaataaaaaaaggtatatgccaaattgtatgtgtatgtttgtttgtatgctaagcaaatgaaacacctttcaaaatccatcatggtacttagacttttttttaattcctctacagacaaagaatagaatctaaagtttgtaaggcagccatcgccacattttatgttaatgttaaagaacaattcatcaaaatggtaagctcacggacatgcatttgttggtctaaggtttttttcactaatcctgtagcagcatattgttgtcttagaaaagcttgcatttgctggcagtatggtaataaactcattagaactattcatattccacataactgtttttaaactaaatgtgacacatgtgaaactaattaacatttacttttggaaactgatgtacatgtgtattttttgttttgtgtagcttaaagaaagccagatgttgacaaatctgaaaaggaagaatgctaaggtaaattatttatgtgattagagtcatagagtcaaacacaatactaatgtagagttatgcgaagacttgactctgggtttacagcctttagagtgtgagtagatttcataatcttgtcaggcttttatttggttgatcttgtggttgatacggttggtattattaatgcaaggtaaggaatggggatcctagtcacttttgtttcctaaggctgcacgagtgtcaaaataattgtttttataattaaagacagaaatttaagccttttattaatgtcacaaaggtagctttaaaaaaactacccagtccaaaatgaccacttacatggataaatattaatatatatttattgcttttgtggatgtcgaaaagcacaaccttttagaataaagaactgtcccaggtaggacagcctgggaagaatactgggttaagggtcaggagacctcatgtctagtcctggttctgctgcttcattgctataccacctataagctgta

SEQ ID NO: 114107 - DNA, 1079 bp, Homo sapiens
atagcaatgaagcagcagaaccaggactagacatgaggtctcctgacccttaacccagtattcttcccaggctgtcctacctgggacagttctttattctaaaaggttgtgcttttcgacatccacaaaagcaataaatatatattaatatttatccatgtaagtggtcattttggactgggtagtttttttaaagctacctttgtgacattaataaaaggcttaaatttctgtctttaattataaaaacaattattttgacactcgtgcagccttaggaaacaaaagtgactaggatccccattccttaccttgcattaataataccaaccgtatcaaccacaagatcaaccaaataaaagcctgacaagattatgaaatctactcacactctaaaggctgtaaacccagagtcaagtcttcgcataactctacattagtattgtgtttgactctatgactctaatcacataaataatttaccttagcattcttccttttcagatttgtcaacatctggctttctttaagctacacaaaacaaaaaatacacatgtacatcagtttccaaaagtaaatgttaattagtttcacatgtgtcacatttagtttaaaaacagttatgtggaatatgaatagttctaatgagtttattaccatactgccagcaaatgcaagcttttctaagacaacaatatgctgctacaggattagtgaaaaaaaccttagaccaacaaatgcatgtccgtgagcttaccattttgatgaattgttctttaacattaacataaaatgtggcgatggctgccttacaaactttagattctattctttgtctgtagaggaattaaaaaaaagtctaagtaccatgatggattttgaaaggtgtttcatttgcttagcatacaaacaaacatacacatacaatttggcatatacctttttttattttaaaaatatctttaatctcttatttttaataatctcaatgttttagattaaggggtttgttatatgggcatactgcatgacactgacgtttggggtacaactgaccccaccactcaggtagcgagcat

SEQ ID NO: 114108 - DNA, 1038 bp, Homo sapiens
tagctgggaccgcaggcatgtgccaccatgcccggctaatttctgtattttttgtagagatggggtcttaccatgttggccacactggactcaaactcctgagctcaggagatctgcccacctcagcctcccaaagtgctgggaatacaagcgtgggccaccgcacctggcctacacattcctactcgatgggcatttggggatgtatgtgtccattgctcctgggtgtataccgaggtgtggaattgctgtcctgtgctgaccatgtggggccgttagaggaccggccaggctgtcagagcagctgtgccattttgtgttccccagctgtgtgtgagggttctgatttctccacactctttgactctggccatcctagtaggtgtgaaaactttctcatgtcttgcctcattagattttcggacaagcaaacaccacgctgaagcgatggctcttggactttgcctccaagaggaaagaagcagagcttcgcagcggcatcatcagaaacaacagcctgtgggaccggctgatcttccacaaagtacaggtaacacgtgactcacagccactgctcccatggaaaccgacttcgcttttcagagttctgggagggccttttttgtgagagggagagatgaaggtaagggagagaataacatgtttttgttaattctggcacacatttaaaaactaaggcaaagccattaaggaggcctcagtttctaagatcaatagtattgcagccatctagggggaaaaggagtcagggtagtggagcctttctcattctccattttgttgcgtttttccggaacaagcgtgtcactcttgaggtaatttttcaagcatgagtgataacgtgtaacaatatcatgccccccagaaggccagaattgtggtagttgccacagatctgcccagttgtgttctaattccctgaaatagcttctgcagaggtggggctgacttccatccccattgggagggaacagggcagtcacgggtggaaacaaaccgtagccctgtgctgccatc

SEQ ID NO: 114109 - DNA, 1029 bp, Homo sapiens
actatgggcacccgccaccaagcccggctaatttttgttttagtagagatggggtttcaccgtaacgtggccaggctcgactggaactcctgacctcaagtgatccacctgcctcggcctcccaaagtgctgggattataggtgtaagccaccgcgcccagccactaaaaatatttagaatatgtaataccatgtcattcattgaacagatacttaccaccgcactaaaagagtagaacctctgtggtcatcactaaaaacaacatagcctggttttttactgagtcccatatcttcaggataaccaagagaaataccacatttccatgttgtacaatgactagtaaatgcacattttttttaagttacctatatttaggaaatttaagatttctggaaactggcctgaaatgctaaaactgaaatgttggatgttgtccatatgttgtgtaacccctgctgtggtgataaaatgtttgttttttccattacccctatagtgtgtaatgctgtgtcatggagctaaaatcggatttttccaaggagatatcaggctgctcatggatgacctcaaggtgcttcaacccactgtcttccccgtggttccaagactgctgaaccggatgtttgaccgagtaagttccaagcagcgaagtcccaggactgagcactgacttggacgcaggggcttgggcttgaattgggctgtgccatgtgccatctgtatgaccctggacaatcctcccaatcttacagaacttcagtttactcatctgtaaagttagaatgcgtttacctctcagagtggctgataaggattataagagaaaatgcatgaacacactttgtaaaccatggtcacaacacaagcataatgtgggaggtcattttatttttacaataaacactttgagcctctgcttcctcatgtgtaacacggactgtttacctcttctctcctactgtttgtctccaaaagttgctaatgggatcacgtaagaatagtaactatgaaatggttttcttcat

SEQ ID NO: 114110 - DNA, 1021 bp, Homo sapiens
actcctgacctcaagtgatctgcctgccttggcctcccaaagtgctgggattacaggcgtgagccaccatgccccttgtttttcattttattctttggtgagaagaaattgcagaccataagcaaaagccgtttctcctcagtgttgaggtactatgtgctcagaaataaaatggaagtttactcggagtcttttttttttaattttattattattatactttaagttttagggtgcatgtgcacaacgtgcaggtgtgttacatatgtgtacatgtgccatgctggtgtgctgcacccataaacttgtcatttagcattaggtatatctcctaatgctatccctcccccctccccctaccccacaaccgtccctggtgtgcgatgttccccttcactgggagtcttaatgcttttctgccttgctggtgtctttgcttacagaatacagtcaatccttgcccagatgatactttgatatctttcttgcctctcgcccatatgtttgagagagttgtagaggtaggcatttaattttgttttccttgcttgtttgtgtatgttctgctaagttgttgtgttttacagaaagcacttcccttgagtgccagtgacacacacatttcatatttaccacttgctcacatttatgaacagttattgaaggtaagtgtggcgtgcggactgtcatccctatagagaattctctgctcagccccgttttagaaatggtgcagattatttgaaagaatataaattctttttctgagtatgaacaggatactggaatttaatcactcattttaaaattaggagttcagacttttgaaggatactaatgtggacatgagtccagaaaaaccaactataaaggtaaagtcattattaattcagttctacaaagcccagcgaggcttccgttctgtgagaagtctctatttttgattgtgcttgttcctaatgcacaagttggcttgcgactaattttttcagcaatattctaagtgcccttggagaaagag

SEQ ID NO: 114111 - DNA, 1005 bp, Homo sapiens
ctcctgagtttgaattgtttcctaagaatacgttctcaagaatggaactgtagaacttaaggataagagcttgctcttattttttataggtctctcaaaagttgctgtttctgtgtttataccaaataaacaagttttggctgctttataaataaaacaaatccatctctctatcatttttaaaattgtataaaactaaaatagaaaaaaatgtataaatagccctgccatataattgtctgtgacctgcagccattgggataagattaattttctttgcagaaggaaccctgcggtcagttctcttaattctgatttcttgtgaataaaaccttgtgttttaccaaaaaatctatcaataaaggaatacctgcatgttccctctccgtttctgtgtgcagcattgcttgctggctgagatacaagcctgccgtctggtcagctttgtttctggagttggggcccaatgctgcttctgactttttcctctccattttaggttgcagaattgtcggagtgcataggctcagcactgatccagaagggcttcaagactgccccagatcagttcattggcatctttgctcaaaatagacctgaggtatgaaccagtaggtacttgctatgcatgattttgagaattctcagatataagagcctaacttctgctagagaccagattttgtagtctgatttctactaaaagtatagctttacgttacaccttagaaagttacacatatgaaaacctcaaccagggccgctgggcacagtggctcacgcctgtaatcccagcactttgtgaggccaaggcgggtgggtcaccagaggtcgggagttccagaccagcctgaccaacatggagaaaccccatctctactaaaaatacaaaattagccaggcctggtggcacacatctgtaatcccagctactcgggaggctgaggcaggagaatcgcttgaatccgggaggcagaggttgcggtgagccaagattgtgccatt

SEQ ID NO: 114112 - DNA, 1021 bp, Homo sapiens
tttggacacataaagaattatattttcctttccgtattctgaattagaatgctttagacttcttgaaaagttttgatgaatacctcttctgaaaaggtatctgtttaccactacagcaggttctctttaccactcatctgctgactcctggtctaaaccagtagggtgttaaagaggaatcacaaattaagtgcccttaagagttggatattgccttttctcccctctgtccccctctcctgccccacttaaacaaaacagaaataaacaagcaaagaaaaaatcagaccaaaactgagggagaaaacatttccaatctgaagccaccatttcttatctgaggactaaagtagagtctagctgatgtttagtattagagtgcggttgggatacaaattaaaatctaggaatatttatgtacgttcagcccatctgttgttttttctctttttttagataatggcccttgtttaggctctcggaaaccagaccaaccctatgaatggctttcatataaacaggtgagtttgtatgagacaggctctgtggactcctcttgcaagcaggggtgcttctgtatgtgcattcttggagccggaaggtttctccagagtgtatgtgctggaccagctcagagccttgccgtaagcatggggcatccaaggagaaacttgacacaaaggtttggggagaacaagttaaggaatttaacaggtggttcaaagcattgtatttcaaagctgatgtggatacattgtgaagtcaagtataatttttaagataaaattctagaaactctcccggtccccctggcggcatagcattatttctctccacttgaggggtactagaaaaactcagaagctggaacgtgggaatacatcttcatttcacagatgaggaggacctgtctcaggaaaagaggtgactcacccaaggttatagctggttagtggcagaaccaggaccagaagcaaggcctgcagcctcttgtgtaggctttcctagtgcatgctgctga

SEQ ID NO: 114113 - DNA, 1062 bp, Homo sapiens
gtctattgaacattgccagacattttttccttgtcattattccctgaacaatacggtataacagctacttatttacatcatattaggtattgtgagtaatatagagaccatttagagtatacagaaagatgtgcataggttatatgcaaatactatgccattttatatcagggacttgagcatctggatttgggtatcctgaaggggaacagctgtatagaccacatgttaggtattagaaggaacaaaaaggaatcatttttacccccggactgtggttctacatgctcctttgcaccctagagatggatcccgcattagaacccagccacgtctttggcagtctctttagaagttacttggctctgcctctcccccttctactccttgccctcctctctctcactctcccttctcactttcgccctgcgtccacctccctatccctctcctgcataaacagtagcaacacaaggggcatttaactgctatggctggcagatgcccatttggagatggagatgaatgagtctatgagtggtaaagcttgggcttctctacccctaagaaatcctcaacggcatcatttgcttttgcacttaaataggagagtggcacaaaataactggccatcgcgttcctgttagtcaaatattggtgagagttctggcctcggaaacctttgatatgcagatgttcacggttttcctgcccttcctgcccccaagggggacttgaacttgtttcctaattcagcccttgtggggagactgacctcaggaggaacctgagcttgtagagatgttgcggaatatactcatgaccaccgatttcactgtagtgggtttgactcactatcttttttttttttttttttaactgggaacactatgtaaccacattaaagaggtctatagcaggaggaataaaagactcctaaagcctgctgactcactggctcatgactgatttcctacacattcagctggggttgtctgctttgcttgccctgtttcttgagcccaagcgacccacacacactgcctgctgatcagtaggtta

SEQ ID NO: 114114 - DNA, 1007 bp, Homo sapiens
tacaaggggaggaggcggggcacggaatggcagcatcttgccagcttgggttgctgcgttaaggaaagatgtcaggctttcttaatttgccactgcaggggcaagggtgtcatttatgtgggtttgtttgagggctgcattcctagtgaagtattccatcaaactgccattattcatcttgatgaaagcttgaggaactttagaaggagagaaacatccagaccacccggtttttggtttctaaatgacatgaagagaatacaatgttaatgtaagtaaaagtttgcagagttgcaggggcagtgtgtgtgtgtgtgtgtgtatgtttgtgtatgtgtatcttcaagagaatgatgtccttgtgagtcacctctggccctgagccactattttcatggtacaaataaaatggtgaagaggtgaacctttgtgtatagtgggccttgaactcaccacgtgttcagaggccagggtgatacaataaatgctaacgtttttgtaagacattgagcatttaggtggacctcaggagggagctgtcataatacctgggagtgtgagtactggaaggactttagaaacctgacctcatggttcctaacctgggttgggctaaaggagacttgtgatagttatgtgtgttctcaggggagagggtcagtggcttagcatagttaagaattattagcataggttggatttagagtcacattggttggtgtcccgttcttgactaacatcctggggaaggcttataagtctctggccttggtttcttcctcatcagtttgcttttgtgatgttcagataagacactggatatgaaagcctttccaaaacactaagtaaatgctaattgcatttttagttctatccaaagtttgggtagacgggtaccaggattttggtttctgacagtccgtgcagttcagtttccatcaccctgcctcgctatgcctgtctctgcccaggtctatttaaaggaatctcctgtgctggatctttac

SEQ ID NO: 114115 - DNA, 1020 bp, Homo sapiens
acttgcatatcctcaatatttgcaaattgaatatatgggcgtttttcttgcatgataattaagtattatgctgagttggatgcttcaagtcaatattcaggttgcctccttttgtttaaacctttgggcagttggcaagatgcagcctacatgccagtcagttttactgtcctgcacatgatacccccacgcggtagaaccatagagccgtggaggcctcagaaatgtcacctgagagacagggtgttgggatgtaacttaaagtaattttttaagaagtgggtataatgaaacagcaaaacgttgatcattactgaagctgaagttggagtcacgggtacataaaatatagttttattatacttctgtgtctacttttgaatagatttgaattttcataataaattttaagtgaaacataaagggaatatagagaccccaaactagtatcacccattccgagcaggtaatggccgaactgcatagtctctttttctttctgtcttttaaacactggtcattattctataatcttctgcaacttgttaggtttgttttgattttggcttccccagagccagtcacctctttttatagttacctgagctctttgtgtaattttagctcatgtctcgtggttgtcaccagtacctctcttctccttcccaatacgatgagctaaatcctggttaaccttttccctatttcacttgttgcttcctccaacaccactgaggtcttccacatgacaggcacaattcagaggccagaacagggtcccatgttttttgcaggctgcgtccagtcctggggaacctcatagcctgtgattatcttctagattccattcatgtctgcttttttttttttcttttggatggcgtctctgttgtccaggctggagcgcagtggtgccatcttggctcactgccgctgcgccccccacaggttcaatcgactctcctgcctcagcctccgagtagccgggactacaggtgtgtgccatcacgcctggctaat

SEQ ID NO: 114116 - DNA, 1044 bp, Homo sapiens
tggaaagagaaatggaaagaagttagggcatcagaggaggaaacggggcctgcctgtagaccatttcctcattctggaggggacttctgataaatgtaggctctatccattagcacagctttggctgctatagaaatgggcactttccccttaggtttgttgtgggagaaatgtccatataagaaggactgaaacactctgaatactatttattcctttattaagcagagtcatgagaaagtgcttccggagctagtttctccttcagggtccaggtgtctgccacaaagcagggctgtggtagctgaccgaggtggtagccacagcctggacacggccaggcttaggaacagagcagtgatgagagcagcagacagagccaggtgctgctaagcttctgatgggttaactcattagtaccttcagcaaccctgtaaggtaggtcctgctgctatccttactgtacacaagataaaggaacaggtgcaaagattaagttccccataccagaatttgaacctaggcagtctggcttcagggtctgtgctcctaattgctgggctctactgcccctccagagctagaagttctcactccaggagggcctagaaagttccaggttaggccaggtgcggtggctcacgcctgtaatcccagcattttgggaggccgaggcgggtggatcaccctgaccaatatggtgaaaccccgtctctactaaaaatacaaaaattaactgggcgtggtggtacgtgcctgtagtctcagctgctcgggaggttgaggcaggagaatcgcatgaacccaggaggcggaggctgcagtgagccaagattgcgccacagcactccagcctgggtgacagagtgagactctgtctccaaaagaaaaaaaaagaaagttccaggttatacagctggcagtaagacaggaaggacagagctgggtctccttcggtgtcactgctccttgattttacccccatctcatttacactctgccttgaattatctctttataccactagagtgctgaaagagacca

SEQ ID NO: 114117 - DNA, 1928 bp, Homo sapiens
aaaggtcttccggccagggagcgtgggggaaaccctgtggggccgcgcccgtcagtgtcaaggaaaaacggagaggaaggcccttgcctccagggccctcgcagcagaattctgcccggcctgccaggaggccagcggggcacgggctgagggtgcaggatccggagggcgccgcccgcccctcgggcatcgcggggcccagggtccgcggggcctctgagctgaggcggtccaatgtaccctttgtccttcctcagattcattatgaaatccgaggcagtctgggcgactccagcggcgttcgcccgccgcagcctctcgaccgccggccacccgccagccacgcgcgcccagacaggagggcggccgggcgctcggcggggcggggcctgccgggggcggggcctgcgggcggggcggggccgcgggagggcggggccggcgcggcgagcgcaccagcagcatcctggctcagccgcggcggtggcgggggcgcaaccagcgggccgaggcggcggcgccagcggcgccttaaatagcatccagagccggcgcggggcagggagtgggctgcagtgacagccggcggcggagcggccggtccacggaggaggtgagtgcgcccgccgtgcggagccgcgcctgctcccgcggcggtgcccgggccccggccgaggcgccggctgacgttgcccttcagggccgagcccggagcagcggccgccgcggaggcgcgtgagccaccccaggctcgtggggccgcgccgcctttccggcctcctgcccgcggccccgcttccctcggcagccggaggcctccggggtgcccgtgctgccgcagcttcctgtgtctgagtcgcgggcggcgcgggcgcggggctggtgcgcggccggggatgcgcgcgggaccgacccttgtgtgtgcggcggcggggaccggcccggcgaagcagccggaggccgcgcttcggctgggaggaggtggcccagctgggccgctgacgttgccctcgtccgcggcccccgcctgcccagaggccgggctcgcgggcgttcggaccgcgcgtggggcgagactgcactcgcgcccgctgagatgccggccccacgcagcgcggcggcacgaggcccacaggcagctcagaggccgctgccagaggcagacattctctcggtgactccagaggagtgcccgtggcccttgcacttggccgtggagtcattgatctaaggagtgctggcattttttgaaattgagaagcaaagatgatgtctgtcacctggcagcgtagacggagagtggcggtagatgacttgaatggacacgtggattcgagtctggggacaggcgttcccccagtcggtgcgttgtgagagtgtggaaaccccttccccactcagtccaatttcaaggttatggagcataattaagagtgaccattctaaaagcgttctctagtgccctggctaagacttttaagcttcttggtgcaggagtgtctaaagtcccgcgactctcactgccctgtcttttattttcttgacctttgattagcgttgagagaaactggttaaatcttgcagtttctgccacccatttcacaacttaacctgtgattgtcccaaagaaaacaattattggcttcttgctagcaaaaaaatcaaaggcttccggttgattgtttctttcttttttttcttttttcaagtggacgtggaaggttaggctggctaaaacttaaagtttgagttgtaggtctgtgctgggtaggcttgagaagatggagctttttaaggaaccattgctcgccatcagattggagccagacagtgcagtgtgatatagtggaaaaggaccaggtcttgggagacttactttcttgttctgactcaactcggaaaacacctccctagtctgaggcccccct

SEQ ID NO: 114118 - DNA, 1005 bp, Homo sapiens
gatgggattgggtggtggtgatcatgggggaagaagagtaggaaactagaggactcaagaatgacttctaggtatttgccctgaaaaaaaacagatggatcatggcgccatctattaagatgaaaaagacttaggtaggagccagtttgcggggaaaataaaaaattctgctttggagatgtgaagtttgagatgtctattactcatctaagtggagtttgcaagtaggcagtcagatatacatctcaggggagttcagggctgaagattcaaatttgggagatggatttttgtaaatctcccacctccttctcaggcattagtttaagataaggagagggtagaactgctccttgacttaccagaaatgaggagcagatgctatttgttcacttgtacttttgtccatccctcaaatatttatggagtactttcagtgctaggtactgtgctgacttttatggactggatgagcagatacaggtacagacaccgctctcattgagtttgacatccagggctgtgcagtagaaagtgagcctactacgtaagctgaattttctaatggccatgttgaaaaggtcaaaagaaagagatgaagttaattttaataatctattttatttaacccagtatatcaaaaattagtatcatttcaacatgtaatcaatataaaattactgagatattttatgttctttttctcatactgtcttcaaaatctgttgtgtctcttacacacagcacatctcaattcagacttagccgcatttcaagtgctcgatagcctggatctagaagatgctgtagaacttggctccctgatgtctaaacccctcccttctctcctgcccattggtgatctccagaccttcggggactgttgggagctccagtgtgctgtaaaatagtgaggtgtaaaccttgggcacacagccccagagcagaaccccagtccaccttgcccaaagtgccagcaatggcagcctgatgatagaggtgcca

SEQ ID NO: 114119 - DNA, 1120 bp, Homo sapiens
aggcagtgagctctggtggggggcgcctttagatgcaagaaggaggaaacagctcgaaatccctgggcctgagcgcggcccgtgcaggccggagggtcaagaactctccaccggcggcagcggcccggtgtctgccccggcttcgccccggcctaaggctgcctgtgctataaatacgcggcccacatgccgcggtgacacggtgttccctgggctcggcgggacagataacatgaatgtgccctttaaacgtcccaagttgcagggacagcccccggcccagcctcgctcccggaagcgccttcgcccccgatgccctctgcagctgggaggagggggcgccccgcacctgcccagccaatgcgcggcgcgagcgccggccgcgacccgcctcctctcgcgagagcccggcggggatataagggggagctgcgggccaggcggcggccccctagcgtcgcgcagggtcggggactgcgcggcggtgccaggccgggcgtgggcgagagcacgaacgggctgcctgcgggctgagagcgtcgagctgtcaccatgggtgatcacgcttggagcttcctaaaggacttcctggccgggggcgtcgccgctgccgtctccaagaccgcggtcgcccccatcgagagggtcaaactgctgctgcaggtgaggaccgcgcggtgcaagaggcgggcgcgggcgcggcgggccgggcggggcgcgcgatgcggcgcgagctgcagggcgcggggcgccgcggaaaatctgcgccaggccacaggcccgggcgcccgcccgcccgcccgcccgcccgcgggggaagaaggtgccctctgcgtagagacaggtccagcgtcagtcgcagattcctggtgtcgggtggcgcccggcgttcgggtgtctatatatggaaacccacccggagccggtttacgtgtgccagatcctgcgcccgtgacagcacgggcgtgcactcaggcccggaggcacctagtgattgccagtatttttggcaccgtcttatgcgcacgcacctttacaataaaaacatcaaaataatcatcacccaagaattcccttatcgtatctcatgcacaatgctgtatgtaggctgacgccttca

SEQ ID NO: 114120 - DNA, 1613 bp, Homo sapiens
ctccagggtgatcagagtgacactgagaaattgtcattttttggccatcatgtctattaaatccaaagccctttgaagcagggagtgttactcatttctgtcccccagtaagcccctcatacagttctcaaacctagggaaagtgaaataaataaatggctatagctttatataattcaatcaccttttcagtttatttggggcaataccttttccctcaaataccctaataattgaagcaacattggattattttggcttgttatccagtaactaacatggataacagtatccatttacacgtcctcagtatccatttgatttcctcatcctttttttcttcaaaaaaaaaatctaggaagtgcaaacctttttttttctcctgtcctcttcccttctctctaccctgcctgtcctctgtcacccaccctcccctccaccaggtccagcatgccagcaaacagatcagtgctgagaagcagtacaaagggatcattgattgtgtggtgagaatccctaaggagcagggcttcctctccttctggaggggtaacctggccaacgtgatccgttacttccccacccaagctctcaacttcgccttcaaggacaagtacaagcagctcttcttagggggtgtggatcggcataagcagttctggcgctactttgctggtaacctggcgtccggtggggccgctggggccacctccctttgctttgtctacccgctggactttgctaggaccaggttggctgctgatgtgggcaagggcgccgcccagcgtgagttccatggtctgggcgactgtatcatcaagatcttcaagtctgatggcctgagggggctctaccagggtttcaacgtctctgtccaaggcatcattatctatagagctgcctacttcggagtctatgatactgccaagggtgagagaggggcatcggggagaaggagggtggtgtggaaagaggatcctatgggatctataactcacaaaggacctgatatatattgatcttgttttttctagtctctgggataattgaggcttctgaatgaggaggtgatgtgcataagttaatagctgaagcgttccttgtgtcctctactgaaataaactctggcctttagttattcagagaggaggaggggggagcctgtctccctctagacacagccatagcagttactgagtttaacttgaagccacttccaatgccctgtatacaagctgagcactgcccctccggggtccggagagggcagcagccacctttgctgtctgcctggtcatatgtgaagcacctgcacaggggcaggttccccgcaaggtcagagcatggagctggaggtgcagtggcctctctccctccacctgctttctgctgagaacaggcacttcatagccgttcggcttctgggctctgtccacagggatgctgcctgaccccaagaacgtgcacatttttgtgagctggatgattgcccagagtgtgacggcagtcgcagggctggtgtcctacccctttgacactgttcgtcgtagaatgatgatgcagtccggccggaaagggggtaagcttgtgctctactcatctaaacttgtttg

SEQ ID NO: 114121 - DNA, 2197 bp, Homo sapiens
gtgccagagaaagttttggcttctataggttgaaccatacgaaattgccactttaaaagtcaaaaacagtccaatgttagcagtttcgtatgtttcaacgaatagttacagccttttatttagactgcataacctcgtgcaggatcatctgaggctcggcctcagttcggtcctccataaaaaaaggtaaccgcgtagcataatactcctgctccactgcgcccttcttgtttcgcagttgggcagtccatgaattacttggttaattgccccagttcttcactgaccttgaactaatggagtaggaatgacaggagacccagcctgccagtgaagcaaggaaggagatgtccagtgggatgttgcatggagctgggactccatgcccagatgaccctgattttataaaactggtaacagtgtgtacagatatgtttcaggggaaaagtctctttcctccagcgttacggagccctcaccagcatttgtttccacagccgatattatgtacacggggacagttgactgctggaggaagattgcaaaagacgaaggagccaaggccttcttcaaaggtgcctggtccaatgtgctgagaggcatgggcggtgcttttgtattggtgttgtatgatgagatcaaaaaatatgtctaatgtaattaaaacacaagttcacagatttacagtgaacttgatctacaagttcacagatccattgtgtggtttaatagactattcctaggggaagtaaaaagatctgggataaaaccagactgaaaggaatacctcagaagagatgcttcattgagtgttcattaaaccacacatgtattttgtatttattttacatttaaattcccacagcaaatagaaaataatttatcatacttgtacaattaactgaagaattgataataactgaatgtgaaacatcaataaagaccacttaatgcacgctttctattttattgaactcttattaactgtaaaatgcatttttaaaagatcaaaaatgcatattttctagcatgattcatgtatcagtcagcagccaagcttctaaatgccagatattatattgagaatgtattatatgagaacgtacaatgcttaaagttccggttttcaaacttaggcaggtcatattctatctatcttatccagcattactgtaggctagaaagtgataatggctttcataatcctgccttgtcttaggcactttcctgcagtctttagaaattctaagattctgctaaaagttttaaatcacaatctggagaattttctatgattaggaagtgctctgttttcatccctttagataactgtgacacctagaattttatgttaagtagagagtattcattgaaaatcaaggccaggtgcagtggctcacacctgtcaccccagcactttgggaggcagaggtgggcgtatcacttcaggccaggagtttgagaccagcctggccaaccgagcgaaaccccatctctaataaaaatacaaaaaattagctgggtgtggtggcgcacacctgtaatcccaactactcaggaggctgaggcatcagaatcacttgaacccgagaggcagaggttgcagtgagctgagatggcatgccaccacatccatcctaagcgacagggcaagactctgtctcaaaaaaaaaaaaaagaaagaaaatcagttgtcttagtttaagctactataacaaggtactgtagactgatggcttataagcaacagaaacttatttctcagttctgtagtctggaggtccaagatcaaggtgacactgtggtcaggttctgatgagggccctcttctgggttataaactacggacttcttgtatccttacatggcagaaagagcgacagagctctctgtagtcccttttataagctcactaatcccattcatgagggccctaccctcatgacccaattacctcccaaatgcccctcctccaaacaccaccactttgggggttaagatttcaacagatgaattttgaagggacacaaacattcagtccatagcatcacttatcaagctagtatttaatacctcttaggccccgtggaagggaaaatagataggaacctgccctgaaagatgcttcagttggggagaaaaggtgaaattccattgttagacaatttgtttaagacaatacatcttgcttgagaag

SEQ ID NO: 114122 - DNA, 1016 bp, Homo sapiens
attttttaacttccacagggaattctgaagtgcatcctagtcgagaatcatagcattagactattagacacacatagaatgtggaagaaaaactagtctggacttcaagtgaggagaagtttctcagatatttcttctttttatattttcaggagcttccaggacatccagtgctacgagtggtctcagttgtaggagtgagcgatcagcggttgacccctccagtggccaccctcgaagaagacctaaaccccctaatgtccgtacagcttggttataaaacacttttttactttaaacattgttcacacaacttttcttgaagtgctcgtgcatattcctataattctctgtgtaaacatctagaataccgttttagcaattgaaggtgtacaacagtgagttgtaatgtattgttattcagtgcaaaattattgtcaaaaaacgatttaatgtaaaaagtgtttcctgaggatgtatttatatgagatgtatgtgttcttaatagagaaatagtggtatgcatgtgtatcttctaattattcagttgtcatgctgtcaaaatagtagtgatagtatcattgcatgtcgtacccaagatggtcactatagttttcaatttgtgttattttcatttctttataagtgttataccatgagctcagctcctaaatttggctggctttgtttttcatttgctttagaacttatgtggcatgacatagctcgattgtatgagatttaacacttattatgaaacaaatcttgaaatttgttttcactggtagagctgatctagatttgatgagcagattgagagacgcttctattggagcaattcttgtaattcaccagaggtatctagttgttgtataagtgcactgagttagatcttaaaagtttgatcaatcattccaaaccatttcaaatatgaatattagaaagttcaacttagaagcttcccttttgtgttttcatgcattcaggtaaagtcctatttatgactcttagaaatg

SEQ ID NO: 114123 - DNA, 1062 bp, Homo sapiens
ggcttttagcagcctgaagccatggtttttagtttctgtctctagtgatatgcagaaaagagagatgaggaaggggctttactggcccaaccagaaacagaaactaagaacccatgactgtattctctccattggacacctctggatgaattgttatatcacagtggtttggttagctgtgggataggcaaaaacccttggatttttatgaaattatattatttgaaatgtttttcacatggtatgtcgagaatgatttaagatcttttggcgggatgtggtgggtggcacctgtaataccagctacttgagaggctgagatgggaggatcctttaagcccaggagttccaggccagcctgagtgacagagtaagatcttgtctcttaaaaaaaaaaagaaagaaagtgaatgtcaggctctagaatgtattgccttgttaaaaatgattgctgtttaaccttgcctttcaaattaattgtctttattgaaggctttattgaaaaggcttgaggccgtgaaaccaacagttggtatgaaacgttcagaacaactgatggactatcatcgcaatatgggctatctcaactcatcaccattgtcaagacgggccagatccactcttggccaatatagcccattaagtaagcattttggaaattattttatacttatttgtatcttgtatcctttttttaaaaaaacgtaacatgttattatgatagagttttaaatgccaactctggaatgcgttctgttatttcccactgtcatgttttgttttatttgtattagttcacttaatttcaggtttcatttacagcatataatgacaggaaggaaaccaggagataaaacaatcaaaaatatcagtaggttcttaggtaattgaggaaggactgttaatttcaaagtttattgaaggaagaaatacataggtgtgctgtttaaaagctgctaaaacattctccttaggtagttaagaatcattgctaatagcctccagcccttatatgtgctttttcttacttactggataactaaaacaaaaattagcaagctg

SEQ ID NO: 114124 - DNA, 1029 bp, Homo sapiens
agtttctgcatgtaaacttgataattgatgtatcagactccagaatgggtttactttttgcattattgttgattttgatcacatctgtatgttttatatgtgatgaataagtattgtaattttcttaaaatttgtaaaagaaaaatactcatccaaccaaataaataaacttaggacactaggagtttaatagacattgagacgtctaccagcaaaaaagcaaaaatgaaagataactgaaaatgccaggtcttctgtcttgtcctttccaccctgcacagctcagtgtgtagttaataggataatcagacaaaacagcaaatgcactctgctggtagaatacactggagatgtggccccaggaagttcctgcacagttacaaactgcaggtagagaagatatgatttcaggaggtttggacacctacatcacactgcttctctgtccacaatgcaagaaagaggatatgatgggaagaccgtggactttacagtcaggtggaatcatgttgaaataaaaactcagctcagcaaagggaaccactaatactagttgggtaatttgagtaggtgactcttttctagcttttgaaggccaaaaattaggaaggggcacttcacgcagaaggaatagcatgcagggaggcagtaaagatgttctcagtggttctgtccggttcttcatgtgttttgcacctctgctgtttgcctccaagcctccttttgtttctataacaacctcctcctctcccttttctaagtggcccttcccctggatatcttggcttattcttccaccatctgttccttctttggaattgctcaggaactcagcatggaagggcagggggtgaaactgataaaacaccaagtggaagaaaagttatgggagtcggtggtgatgtttcacaacagtgtgggtgtacaaaatgccacagaactgtatgcttagaagtggttaaaatgtggtttcattttaccacagtaaaaggaagaaagaagaaaagattgtacagagaaaacttgtcc

SEQ ID NO: 114125 - DNA, 1855 bp, Homo sapiens
tgagtagccgagattacaggtgcacaccgccaagccaggccaattttttgtattttagtagggatagggtttcaccatgttgtccaggctgatctcgaactcctgacctcaggcaatccacctgcctcagcctcccaaagtgctgggattacaggctgagccaccgcgcctggcctcagtgtgtccctttttagtacatacttaacctgaaacattcagcaagtttaatacttttggatgttttctacaaatgtttagtagtaattgcacttattgataattataatatggaaatttaagaaataagcatgttgataaaaattatagtatgcaaaatattgttgctagctaaaaacacctttctgtttaatcaggaataaaatgtttgacttttacagtagaagtatttgctttaatggcaatattaagatttataaatccagcatcttttctggttaagttgagagttttggaatattcggagttactttttgccattgtttccctcagtcattgctgaggacatttttttggaagtatgccctccaactaagaaaagctgtacctaaattaagtattgtattagtgccctcaactctgaggtttctaacctttccagctattaaactgcagtcgggaaggataaaattgatataacaaaggcattgtctgtaaattatactagcctaaagaccagtactatatacatttttaaagatactttcattgtttcgtgtgtagcttttatgcccaaggaacccggtgagcataaaatactaagctacgtccaatttttttctacaaagttgtaatctagatgtcattagtattatttcatacatactttttcttgaatttaatacatatttttaagggttaaagcatgtaccaccgggccaggcacagtggctcacacctgcaatcccagcactttgggaggctgaggtgggtggatcacctgaggtcaggagttcgagaccagcctgggcaacatggtgaaaccctgtccctactaaaaatacaaaaattagccaggcatggtggtggatgcctgtaatcccagctagtctggaggctgaggcaggagaatcgcttgaacccaggaggcggaggttgcagtgagctaagattgtcccattgcactccagtctgggtaacaagagtgaaactccgtctaaaaagagaaaaaaaaaaaaagcatgtaccacatacttactttggccattttctcttttttttttgttcttttctgtagcttttctgcaattagataaaaaaggaccacaaaaacatcactttgatcagccttcagtagcacccgggaaaaactactctttcacaagagaagaggtgagacagatcgatcgggaaaatcagaggcttttgaaagaactgtcaagacaggcggaaaagccgggaagcaaaagtacaattcctagatcggctgatcatcccccaaagttatatcacagtgctctcaacagacagaaggaacaacaaaggattgagagagaaaacttggtaagtaactgaaataattagtcatcaaagaaaatgtgtttgcactgatttgtatgtccagcttacaggaaacctaaatacagccaaatattcaaacttcattacataaaagcaggtgcggtatgtgtggtatgaaacatatgatgtgctgtaagtccggaggatacgatatgtatttttatccaggaaactatatattaagagaccactggccagatgcagtgggtcacgcatataattctagcactctgggaggccgaggtgggcagatcgcttgaggcaaggagtttgagaccagattgcacaatctggcaaaaccccagctctaccaaaa

SEQ ID NO: 114126 - DNA, 1036 bp, Homo sapiens
tgtttttataatgtttctttttatatattaaacacacttgtcagtttgggaaaattatttaattattgtatacaaatggaaagtatttggaaatcactctttagtctgatgtttacatttttttttcagatatatttttgccatcatggatcagtttggagatatattagaaggtgaagtggaccattctttctttgacagtgactttgaagaaggaaagaaatgtgaaactaactcagtttttgacaagcaaaatgatgacccaaaggaaagaatagataaagatacaaaaaatgtaaattcgaacactggaatgcaaacaacagaaaattatcttactgagaagggaaatgaaagaaacgtgaaatttcccccagaacaccccgtagagaatgatgttacacaaactgtaagttctttctcattgccagcctcttcaagatcaaaaaaattgtgtgatgttacaacaggacttaaaatacacgtgtccattccaaatagaattcccaaaattgtaaaagaaggtgaagatgattactacacagatggagaggaaagcagtgatgatgggaagaaataccatgtgaagtccaagtccgctaaaccatctactaacgttaaaaaaagcataaggaaaaagtattgcaaagttagctcctcttcctcctcctctttatcttcctcatcttcaggttcaggtacagattgtttagatgcagggtctgatagccatctatctgattcgtctccgtcatctaagtcatctaagaaacatgtatctggtataaccctcctgtcaccaaaacacaagtataaatcaggaataaaatcgacagaaacacagccttcaagtactacaccaaaatgtggccactaccctgaggagtctgaagatactgtgactgacgtaagtcccttatcaactccagacattagccctcttcagtcttttgaactgggcatagcaaatgatcaaaaagtgaaaattaaaaagcaagaaaatgtgagccaagaaatatatgaagatgttgaggat

SEQ ID NO: 114127 - DNA, 1185 bp, Homo sapiens
tgattgtgagttagtaaaattactcttttgttatgtttaagatctcttcatttcttcagtgtaatcatccatctcttatagctaaataattttgtgatttcagtttcttcaaatttcaagaaaatgtttattttttatatttgtaatttaagctacatgtctttttttttttttttttttttaattaagagggagtctcgctctattgcccaggatggagtgcagtggcaaaatatcagctcactgcaacctctgcctcctggattcaagcaattctcctgcctcagcttcttgagtagctgggattacaggcgcctgccaccacacccagctaatctttgtatttttgtaaagataaggtttcaccacgttggccaggctggttttgaactcctgacctcaaataatccattcacctcagcttcccaaaatgctgggattacaggcgcaacccactgcgcttggccttaaactacatttcttcaactctggttcctgatttattgtagtgaggccttaatctattagcagagttttcctagactctgtcatattacctatgacacttgacactgtctaataccacccaaagtttaacctttcattccatctttatgtatcatagtacattaccttttgatgaaagctttttatctccatagatcagtggcatttccaacccttgcctgagactctcaggaatgtgaagctggttttacatcaaggcctagtacactcaatgcatttaagtaatagaaatgatggtttcatgaaacttactcttataatatgtaatgcactcttttttttttttttttgagacggactatccttctgtcccccaggctggaagcatgatctcagctcactgcaacctccgcctgccaggttcaagtgattctcctgcctcagcctcccgagtagctgggattataggcacgtgccaccacacccagctaattttttatatttttggtagagacagggtttcatcatgttggccaggctggtcttgaactcctacctcaagtgatctgcccacctcggcctcccaaagtgctgggattacaggcgtgagccactgcacctggcctataatgcactcttgattattacactgtgttctacttcgtcagtttaatgatggacatgagctactgaattgattttaaactggattgtgac

SEQ ID NO: 114128 - DNA, 1064 bp, Homo sapiens
gtgaggttaaaccatgtgctcaggctataaaatcagtgaaaaaactaagaattaaacccacgtctctcttaattaactctggagtctacacacttaaacactttattacccttttaattattaaaaattagtctggcctgattcagatttaaaacaacttgggaagctttgggatgattctaggatctgcttaggacttaatgtcacttcagaggtctcagaatgaacttgaatgatgtcacagctgtcccttctgtgctcaggaggatctttactaatcaagtaaggcacctggttgtgactgcagactctctctcaatacagcattccaggcagccgctgaaaattcaccgagttggcacatagcgtgaaacccatcaggcattttgagtgagaacctagtagaatggcggtggtgccttttggattctgcgatcactttttctgcggctgtattactctgtcatcactgcattataacagccaggcatatacttttttagtctctctggtaaaaatcagtgtttcccaaactgtgattcattaacacttagttctgggagatgcttttaggtacactgcaaaaacaaagaagaggaagcttgggaggctagtttggtggtcacataagtctgaaaaaactaaattttttgttgttgtttgtttgagacagggtctcactgtgttgcccaggctggggtgcagtggcacaattatagctcactgtagccttgacctcctggactaaagcagtcctcccacctcaacctcctgagtagataggattacaggcatgtgccaccacgccctgctaatttttaaactttttgtagagacaaggtctcactatgttgcccgggctggtcttgaactcctgggctcaagtgatcctcctaccttggcctcccaaagtgctgggattacaggcatgagccaccacactgtgccttggaaaaactaattcttaaagctttacaacatgtgttattaaattaacattgtaagaaatcctactgtaaagaaatctgcttagctttttaatccaatgttttgtaaacatgact

SEQ ID NO: 114129 - DNA, 1297 bp, Homo sapiens
aaaatactgagtgtaaacagccagatgcaaagttgtatgtataccatgatcccaatttcttttaaaaagtatacagatgaaaaagttaccaataatttattgttgtcagacattgttacagtacttggtgtgtgttaattaatgctcatatcaattttgtgaggtaggtactattgttatctattttacgtatgaggaaagtgaggtatggaaaagtaacttgcccaaggttacatagtaagtgttggaatcactgacaagaaggaaatgtaccaaaatgttattagtgatcatctggatcatcattatgagtcagtttaattccttacatctataatagagaatgtatttctgctgtttatgtaattggaaataacagtttaaaaagaaattatagcatttttgaaatttaggaaaacagtaatatgagaaaacttgtaggttgaattttaaagaatagctgctccttcctgtatctaaagtagaaattgtgcttgactaagagggaaaaaaaggcacaaatccactattttctattaatacactctccctaaatgataacctctcagtatcatgttaacaattttctgttttttttgataaggaaagtaagatattctttagttcatggttcagcacaataaaagcacaactcaggaaactgtcaaaccaggttttgtttggatacttaaatgctttacgtcacagcaaaacatctccagggaatgtgcgctttcctctctgtaaagcacatcctcaaaggcaaaaatacttcaagaattatgtgctctgttatgctgtgtcttactggttgcttaacttttcaacccctccgtgcttttatttctgccattcctgtgcctttagaaaacccctcaatcaacccactttggatttgttggaagttggtaaacattttgagttgtatttgtgatactgtctggtgggcgctctaagagctttgtgagagcagccattacagactagacgcccacggcttgaacatggctcaaagtttagcccaaacagtggcagcctgcagagtttgtaataacgttgaattagttggagatatcgtccaaaattcatgacttttttttttggtgttgttgttggaaaaaaaaaaatcaggccgggtatggttggttgctcgtgcctgtaatcccagcactttgggaggccgaggtgggcggatcacctgaggtcaggagttcgagaccagcctggccaacatggagaaaccccgtctctactataaatacaaaaattagccgggcgtggtggcacgtacctgtag

SEQ ID NO: 114130 - DNA, 1189 bp, Homo sapiens
agctaaacaaaaggagagctagtagctgctagaaagttagttattgggagtaaaattcatgcatttggcagtagttcttcaacagcaataacaacaacaaacaaaactagaatcaccttccaagaaaaatttgaccagttaattttatggagaattagaatctagaaatgtatattgagaaggctaagaggtttcatcagcatgtagaaaatctttagtggttataatttgcatctctggagtggtttgatttacatttctaaacccggcaccaatatatttaattggaattcagaatgttattaactagctataatagatttaatattaatcaaattgagggtctctgtacatttgcaaaacattaaacaatatacttgttaaggctgtagtaatttgagttcggttatactaaatgcttatgaaatacttacctaaaaatctcctccttggaagctaatttaaactagagaacattatggtaccattttatctttatatatctattttattggttttagagtgtgtaatttaaaaacatttaaagagttaagtaccacataaggcatgtgtgtgtgtctgcatgtatacatgttctacatgtttgtgtgtagatatttttgtcactaaatttgtgcttgtgttgtagctcagtataagttaggatttaagtctttacagattgaattacaaagaagaaagaagtaatagtcaaaaatgcagagcaaaataatatactccagctttctgtggaacaatatgaaatactagagctacaaatgctggaagttaaatggcacacttgaggaaagtgatcaaagcatatgactgctctgttttgttagccagtttaaaatgtaaaactatattttaggggttcagatctaatatgaatgaactcttctttttgagaaggcagaacagttacccttctgtaccagatagcttcagaagattctccaaaagctacatttaccagaaaactgacagaagataggaaaaagacgacttctaaaaatctttttgacttactattaaatctcaatagatctattgcctaattttcactagcctgccctaaaccatctctaatgtgaaccagataatttaattgtataattattgagtacatgctatttgttcagtggtgtgttcaatgttaaattgaaagttcttgaattgaaaatat

SEQ ID NO: 114131 - DNA, 1102 bp, Homo sapiens
aggctttcttgaatcactatcaagatactatgggaagggaagtatagaaagttctgttttccagtcctcttcactcagatcctccaaattaatgttcctgggatggagtcagtacagggaagtgcacaaccaaggttgtcaagactggttgaaaaatactttggagcctcacagaaggcaatttgccatcaaattagataacgtcgagtttatagaccctctagctcactagaaatacctgtagactttttatcctattatctcccagtcagaaagcaggctggcaaccctggtttatgctttgttaggtttttttgaaaaatgaagctgcaggtcatatttaagaaaacatctagaagacttaaaaattactaaataaatactcgtacctttttagattgttgctgtgattttggagttatatagaccctttgatgctactgaagttcgttgttatgatttcatttgaaatccaaaaaaggccatgcatttgcatttattctagcaaaagttttccagatgagttgatggttgaggaaatttgattatttaggagatggcagttactataaccaatgtgtttctcatttgaaatattttttacctaatagtacataattgaattgtttctagaaacttctttccttctttttcactctctttatttagacatgaagaacagccaagaccttttgtgttgcacgcatgcttgaggaactcagatgatgaagtaagatttctacaaacgtgttctcgggttctggtgttttgtctcctcccctcaaaggatgtgcagtctctcagcttacgtataatgcttgcagaaattctcacaacaaaaggtagacttatacagttgatttcactaattcaataagtgtgcaaactaatgtgctacatgcagaccttgtttactgttgaacatatgggatttgaagtattttcaaaatcttgtttatatgtctctaaaactatttggccattcaggataaacttaaatttttaatatgacatatcgccaaatgcacagtccattaagttgcatgttttgacatagaaaacaagtttttatgctcttcacagggaagcattcatttgggat

SEQ ID NO: 114132 - DNA, 1019 bp, Homo sapiens
atcctcagcaaactaacacaggaacagaaaaccaaacaccacatgttctcactcgtaagtgggagctgaacaatgagaacacatggacacagggaggggaacaacacacaccagggcctattgggggtgggggcaaggggagagaacttagaggactggtcaataggtacagcaaaccaccacagcacatatatacctatgtaacaaacctgtacatttacttaaataaataaatagtaaattactacaataaaattttactttattcctttaaaaaatgcatttttaccctaaatgtagaaatcagtccattggaagttaaagcaaactgacatttaaaattcgattttaaaaaaagttttcttaaattctcttaatagattcttcagtttgaagatatcttggccaatacgttctaccgagagcactttggaatgtacatggaaaggatggacaaaagagctctgattagtttttgggaatctgtggaacatttaaagaatgctaacaaggtagtatatgtaggctgaaaggaatattaatcactagctgatgtaaacttggcatgtgaggcagcatgtctgtttttctcaagataagtatacattaaaaatattttaaaccaaatataatactgacattatgttctagcccataatggcaaataaaattacattatatttttacagaagattcttttgaatgtgtagtcaagggaaaaaaggttttataaatgtaccaagagattgaatttagttttgggtattttttttacacattgtaaaaagacatatacatatccacattactattataatgaatttggccccctcacctacacttcagtctcataatcttgccatttataatatcataatgtgcatgttttatactttgcctttcatttcaattttttttttttttttttgagacggagccttactcttttacccaggctggagtgcagtggggcgatctcggctcactgcaacctcagcctcccaggttcaagcggttct

SEQ ID NO: 114133 - DNA, 1022 bp, Homo sapiens
gacaaagctgtctaatataagcttgactaggacataatcattctgaagtagtcattctgaagagtgtttttctcgtttttctgagttacacaattattatattgacttctttctgggatgagaaatggcacttctagttacttatattaggtaaaaagttaaattgacattagctaatacattttcttcttgtggaattgagatttatgaaaaggaatctattgcaggaagagaactgttcttattctgtttttgccccctccagtgtttaaaataaattgcaggtgttaactgttcaacatgttcatttaaagaattagtttttttttttttaggatctgacatttgctccttgaccctgaatatggacacaaaattctacataccagggtgcatcttaaatgtctttcttctgactttcaaatgcaaataattcagagaaaaataatttctctcagagatgatatgtcttacttttccttatcttcctgtcttttcagaatgaaattccacaattagttggtgaaatttatcagaatttctttgtggagagcaaagaaatatctgtggaaaaatcactttacaaagaaattcagcagtgtcttgtaggaaataaaggtattgaagtattctacaaaatccaggaagatgtttatgagaccctaaaggataggtattacccttcatttattgtcagtgacctgtatgagaaattgttgataaaagaggaagaaaaacatgcctcacagatgatttccaacaaggatgagatggtgagtcacatttaactttctgctcctttttattggataagcttttaaatatgtttaagtgggtgcatattgtgtgagccaaatttgatgcacatcttcatcttttaatatacaggaccttaaatagaataaaagtagcatcgtttaatatacaagaccttaaatagaataaaaagtaagcatcaataaccttgtctctggttgtatgtatttctttcttccccttttatcctctgacatacatcttcc

SEQ ID NO: 114134 - DNA, 1099 bp, Homo sapiens
gaacaagttccattgttatttttttgcttctaggatagaattagaaaagcatttgtttttaatctcttatggtttggagttctttctcagtttcaactgtgagcaactctgttctttacatctgctttgcctacagggcctttggagaaggggcaaagctttctcttgtgccagggtcatttctggaatttaattaaatactcaaggacaatcttttgaataaaaaaagatgttttctttcaactgctgcaggtgcaatttagggaaccttacagtattgttcaggaaatacattgttttgctagaaagcagcaatttgaaagtttaaaaatgtaaacagcatttcactaattggcctttctcaaacccaagctgtggtgtggctttttgctttgtgttttgctctttagaattcaacaaggaggtttctctcatatagatatggctgatgctctttgatctgccagattggtctctggcactttctgaatgtgtgtttgaggatttcaagcggtcaacatgaaagcaacttagaataaagcaatttcagtgactcacattgggttttctgtgagcaggtgcccaatcctattgagtcttctttagtattctttttgtggacattcaaatgcttttatagtaggagaatattcctgaaacaagatgtaagaaaaactggtatcatgagcctatcagcaatttacaattaaaatatctattcatctataatccagttactgtctagttaaacagtgagttttctttaacaaagaaaaagcaaaaaagaagaaggaagaaagtcctgcaaaggtgtgttgtcttggttagtagtaatgtttttacaaaattgtgtaggaagaagtttaatgtgagcatcactttaataattgttagtgatgggctggctgcacaatggctcatgcctgtaatctttgggaagccgagatgggtggatcgcttgagcccaggagtttgagaccagcctgggcaacatagggagaccccatttctagtaaaaataaaaaaaaaaatcagcccagcatggtagtggatgctggtagtccccagctactaggtaggctgagaaaggaagatctct

SEQ ID NO: 114135 - DNA, 1050 bp, Homo sapiens
tttattgctgaaatgcatcagacatgtatttatattcatgcatccattcattcaacatagccttttaagagccaacccaggccgggcacggtggctcacgcctgtaatcccagcactttgggaggccaaggcgggtggatcatgaagtcaagagatcaagaccatcctgaccaacatggtgaaaccccgtttctactaaaaatacaaaaattagccgggcatggtggcgcatgcctgtaatcccagctacttgggaagctgaggtgggagaattgcttgaacccaggaggtggaggttgcagtgagccaagatcgcaccactgcactccagcctgggtaacagcgagactccgtctcaaaaaaaaaaaaaaaaagagccaaccagatactatgctatatatacaaccccaagacagatatcatctctgtcctaacgtaacatagcgtcctgatttactctgccccatgttcctctgactacagaaggttagaatccttcacgttgctttttatgtgacttggcatagcttccattgccttgtcactaaaagttatacagaaaactgttttgcttagcacagaagaatcctgttgttaaaggtgagtgttggtgttaggataattccatggccaaggacgtgggaatgcctccaccctatttttcagctaccttttttcctcttgagcagtagttcttcatggagggaaggagggacatatggtgatgtctgaaaatgtttttgattgtcttaacttggagtgaggggtgctactggcatctagcaggtagagtctgggatactgctaaacattctactgtgctcaggacagccccgcggcagagttgtcctgcccccaatgacagtaatgctggagttgagaaatcctaccctagtgaatcctcaaggagagatgtacgtagaagaaaccattgtaaaatggggatcaaagttccatttccttaagagctatacaagtgcctctccctgaaagcatcaccttggtgaaaggtaaactggactccatggcttagtgttgagcgttgaatag

SEQ ID NO: 114136 - DNA, 1463 bp, Homo sapiens
ttgcagtaactacaatttcacatgctagaattgcttcaaaagcatcagacaggtttcagctgatagaaagtcagatctaaatcagtagaaaataacttagatgatgacctttattaagagtcgcttcctaatctcaagttgtaaactgaaattttaggaagctaggcaggcaggtcagcagattctctcttaaaccacaagttctgttaaatcaataaacttattttatatggtctagatttgaattgcacagttccaagaaagagaagagtctaggagatacgcagttatagatggagataacagtgtagtttgactcatagcagtgaccgactactatgtgcaaagtactggacttgaaacatctactgcagatgttatttctgaaaccttgtgttgtccatttaaaattctggttggaagtcagattcttaaaaggctttttaatatattattattcatgaattgaatttgaaatttgaggtctttctggcacaaatagtctaagatgattcttttccccttttcaatggagaggcttttctcctcccaacctcacaactactcttgggctctttgaactgtgtgtagtagtctcttgacagcagaggacctgtaactggttagaatgtgaccaatgactggccgggtgcggtggctcacgcctgtaatcccagcactttgggaggccgaggtgggccaatcctgacacagtgaaaccccagctctactaaaaatacaaaaaattagctgggcatggtggcacacgcctgtagtcccagatactcgggaggctgaggcaggagaatcgcttgaacccaggaggcagaggttgcagtgagccgagattgtgccactgcactccagcctgggcaacagagcgagactccgtctcaaaaaaaaaataatatatatatatatatatatatagaatctgtctaatgactaacgaaatggggttgtgtagaagacctgggtaaccaaataaaatgcataactgtgcaagtcaaatggctgccacccagtcttcattcttggggaattttgaaattggccacatagcagtgtatttttgaaagggactatctttttccttgcctcatgggcatatgaagtgcttcatctggatccgagtatcctgcccagcattctctgccatagcaacactaaaagacagctacggaaagcctgctcctcctgcggaacttcaggacctcagggaggttttccagaccacttccaacagtctttaaatggatttatgttttcaccttataccacttcatggaaatgctgcagtctgcagacaaatcagtctctcagttcttgtctttatagattgaacacagccaacatttggagaagttagtgccaatgacaaaattatctccaggaataactgctcatgcagtattaccaaaataaaaaaatgggccaggcacggtagctcatgcctctaatcc

SEQ ID NO: 114137 - DNA, 1673 bp, Homo sapiens
tttattttgaataaacccttggagaaaaacatttttccacttttttccttctttgttggttcaggcgctgatggaactgctgctaattgaactgtgtcctgagctgagagttcatttagatcaacttaaagctggccaagtttgagactacacaaataaaccaccagaaaaatgtctgtgtaataatagacatgaaacattttcctcttttccacagagggcttaactgagaaccgtattgatttttattttagttacctccctctagttttatgtgaaattagtagaatcagggaggacgggacttatgctgtggtaggcaacagaaaaaaacttctattgattttaatttaatatgaatactttaaagatcaacataccgattgaaatacaaatgttaatatgtgagaacctaggaagtattttaaatatttatgaaaatattttgttttaaaatgaactatgaatattgtacagttaatttcctcactgaggactgtgaacattcttatattatttcatgtatattgaagaacattgttatgcaatgctttgtgtaaagttattgtgaagattttattgtctttatttttaccaaagatttcccatagtttgagcattcaaagcaataaaatataaaaatgaatcacagtgctctatgatatttaagatacttatatctcaaagaggttgaaactctacaggctgttcaaatatttatcaaatgcctttttagagaaaacactatgtacttaactacttctgcagggaagtaaaagtttgctgccttctccagaaacaaaataaatctgtaaaatatatgatttttagtgagcagaaagagccaaattagtgcttgaagtgaggcattagggaggagagatgggagctgacccttggagtatgggcagggccgagatgggggagcggaaagaggagggcagctacttcaggggctcggttgtattatcaagccgtttagaccacagggacattaggggagatccagagtacagactttgtgttattgatagtggggccatgcacaagtacttaattttcctgggtttcaccatctattatgcagtaataaaataccttcccctgtctaatccccaagaatattgaaaacaaaacaattaaacaagtaacaggtaaaaattccatttgaatccctgaaagatactcccctcatgccctaggatgtaacctatgccagtttatatacgtatgatatacatatcatacctgctaacttcttgataagaaacaagttctgaaagataaatgattaaaaattagtaaaccaaatgttatccttaagatttttttagttatagcttttttatccttttttcaaaccatgatgatatttgacacttaaaaaaatacccaaagttggctattgataaaaattatccttcaaaagactatatagaaaagaccagataaaatacattcaaggaagagaggcaatgtgaagttgtcaagcctgaagaacttatcacaatacaattatgggaaatgtctattttaggcataattctatgctatcatttaaactgtagctgttaagtttacattgcgaatgagaaagatcactattattttgtctctatatttatttatgataaaatgtcatttttccatgagatatcagctacaaggaatct

SEQ ID NO: 114138 - DNA, 1101 bp, Homo sapiens
aaagaaacactcggctggagctttggtttctaagcagatccttctggaaagacgcttagggagagtctagggagcagctctgacgtcagtagctgccatcggaagtcaggtcatgttctacaaaaagcagtgacgcacgcccgacagcacccgcggggccggacagcggcttcaccagccccgcgggtccgaatcgcacgcggccgggtccgctctcccgggaggagagcccggcgtggaccagcgtgacgaccccagcgtgctgcggcctctccccgagggcccctccacaagggtccctgcgcgggccgggctcggccgttgccactcgggacagccatcccctcgagttcgcgctcgccgtccccgccttcacctcccgggttgggaggcgggcgactgcgcgcgaggtaaaggaacttgcgttccccggcgccgaggcggcagcagcgcagtgcacagcggcttctgaaggcggcgtcgacggggagctgcgcgtggctcccagtttcctggttacgtgcgcgccggcagagccaaaacctgcagccgaaactcccgcttctccgtaaggattaaagggcgggcgcactaccgggagacgtgtcaaactcagcgcgcctcatggcggccgcggagccccacccgctcctactccagtcctctcacgcccactgacttaccctgcgcacgcgcgctgaggctccgtggggccgccgcgggccccgccccgaggtgggagggcctgacgcatccacagctggccaatcggcggatggcctcgcgcgcccgccccctccccctgcccccggcgccgggctccacgtgccagtgtttgtgtacgtgcggccgtggcggggctggacagggtccgggtcgttgaggattaggctgctcgggcgtaaccggagctggggcgcggctgccaagggccggcccggaagtcccagcggtctttaaattctcccgtgctagggccagcctgcgcattcttacctgtcggggtgcggcgagtgtctcacctctctgcacttccaaggactcttgtcatctgccttaggcgggaaatgctgttgctggattgcaaccccgaggtgagat

SEQ ID NO: 114139 - DNA, 1057 bp, Homo sapiens
tcagatcctgagcaatcagaggtgcaattttgttcattatgactgtattctacttcagtttcggttcaggaaaacccattctatagttcccattgactacctttgggtactcatacactgtattaaacatcagataattctaacattcattcagaactggaatgcccgctctatgctggattctgttagttgctgaggatacaatagtgaccaaaaatgcaatttccttatgcatcctttacctcttctgttctgcaaccaacatttgtatgagcccaaaattcccttgtaagatataaaaaaaaagacttaagttcaatgtttcatttcactccgtttttatcctgttttcagtttatgtaataagaacgggcaaacagctgaagatctcgcttggtcatgtggatttccagactgtgccaagtttcttacaacaattaaatgtatgcagacaataaaagcaagtgaacaccctgacaggaatgattgtgttgccgtgctcagacagaaacggagtctcggaagtgtagaaaataccagtgggaaaaggaagtgctggtaagtaactcagagctgctgcttttttcctcccgcagtgatctcttgtttgcatagcatttattattccatttaatactgacactcgtatttctagtagtattgtttcattctcattaacattttagtactggttatacttaccagagtctagagaccaaaaatgggactgcatggtggaagtttggggataaaactctttttaaaaaaaagtttttaatgttaacgtgtttttaaaaacagatgtcacgtgggttatgaagaagtctgaagaacgccttcatttcatgcaaatctataagctcctgcttttggctttaccatatgttgtgtctaatctccttctgagaaggacgaaaaactttcttccaagtgaagatccatttaagaacacatgtatttacatgcctataatatgctggttgtgtatgctttgtcttttaagttattaaaggaacgtctaaaaaatacattctccgtgcagtatttacaacctttg

SEQ ID NO: 114140 - DNA, 1016 bp, Homo sapiens
taacagtctaactctaagaacattaaacataattcgggagcatatatagaatatgtacttctatcctaagttaatattttactgtgtttcttctctgtatatagatttatgtggtccagggcatatatggctatcatcattatatgcaggatcgcatagatgacaatggctggggctgtgcttatcgatctctgcagactatctgctcttggttcaaacatcagggatacacagagaggtccattccaacacacagagaaattcagcaggtacagaacataccgttttaaattataatcaactgtatgtttcattagcccttaatataccattgataatttttgttacctcatggtgcagacttatttctgttttgaagaaaaaaaaattcttgtactggtaatcagggaaaatgccctaaacatcgtttttaatagctgtcttgtgtatggatgttttatatttttaaatacatcaaggctctagtcgatgccggggacaaaccagcaacatttgtcggatcgcggcaatggattggatctattgaggtgcagctggtactaaaccaattgatcggtataacgtcaaaaatcctgtttgtcaggtaagcacactttaagaaattagataaatcatttcaaagtgacagtctgtcattttaattaaaataatagaaaaaatggtatcttcccttatttctttttattccttttccttcttccttattactcattgctttataaatctcattttttaatcttaattttttttcatttttttttggaaggctctgattttatgaataaactttgtgatgtaatgtatacttgtattatttaggcctaattttagcctagaagaggaaaacttaaaaatatattaacgttgagtaaagtcataaaaattatattaacagtttctttatgctccaatcttttaaaaagtcttaaaaggcaaaactcaaatgttgaactatgactgacctttttgtttacctcctgctctttttctttcta

SEQ ID NO: 114141 - DNA, 1048 bp, Homo sapiens
taacatttgatcggtgaatatagcacatgtaaagctcagagaaaaccatggaaaagtttatggctaactcctcctctaatctttccgtcaatctcgtcgtgggtaaagatgcctttattaacagtagtgatgctgttggtttcgctcactaatggctttcttgtgcgctgtgtggctgtgtattttgtctgccattgtacaggaattcaaacccattggtaccgcgcacaacagaagggcccagccttttgttgcagctgcaaacattgatgacaaaagacaggtagtgagcgcttcctataactcgccaattgggctctattcaactagcaatatacaagatgcgcttcacggacagctgcggggtctcattcctagctcacctcaaaagtaagtatccggctctgttctggccacagtgtacctaacagtgatagcatggtttcttttcttttcaaaagtccagctcttgctgttttatttttactttcctgaaggcactatcagatttctcttttaaagacaagcatctaaaacatgttctaattgttgtggggtccaatccgccagtgcctgaccgtttagcggatagatggttggaaagaagacatcgtcctggtcccgtcatcgcctttcttagttatgacagtagttggtggtaaatgatcctccctgtacaactatcgttcgtttaatcttatctgcaacagtgtccgccttccactgagggcctttttaacgctttgttttcacaggacgggaactactttgaacacaagcataatattcggcccaaacctttcgtgatcccgggccgaagcaggtcataagcgctgagactgtggagtttgcagtgcatgcttcttaaatcagttcttactaatcatcaagaaaagtaactggtagatgtttggagtggcttttctcattgcgaagcttatttcaaaagcaaaaagaaacaaactcacttggcagagaacagaagccaaataacttgcatttccaagagtaaatattgacaagatgacagagctgtgaaattgtatgc

SEQ ID NO: 114142 - DNA, 1013 bp, Homo sapiens
acaggagcacatagatagactatgtcagcgaatgggtttggtggtagtggttttgagattgtataaatggcacttcctaatacagaaccttagctgtattagagccctaaatttttacttatgtgcagaggctctcatttcacattcaaaagactgaatgtgagggtgagctattgtttgaagtctgtcaccttttttccaaaggaaaatgttttaggatcattctgaacatagaaggaaaacatttcagtgatggactaatttcatgctgtggttgtcattaaatctctttccaaggccagtcattaattttgttaaaataattttttaaaaatagtatctttaggttaaataccagcggaactgtcagcctgcaagtctcagagatggatgctttgtgaagtgctacaaaaggatgatccttcccacatcctcatgaatttacgtcacttttgtggaagaacaaggctcaagacagtcaatgccaaagatcatcctgtctccaggctctgctgaacctgccgatcggtgggaaatgacgggagacaatgagtccactgagaggtgatggagaatggcaggcactgagctaagataccttaaatgtgatgcttctcatgctgacggccaactgaaaacaatctcatcattacttcttattatgatatacattttaatttgtttttctcctcaatctgggtatagctgctatgcaaatatgtcttttaaatgtttggatagaggccacgcccatgatgttaaaagttagcaatcagtatttatgtaacttcgtaggtcttgtgagagggcgcaaatctgaatgcatacatcttactaattaagctcattgaagacatgcaataaaccacactcaagatgcagttacctttaattttggtggattgatctcctgttgataagaatatttagggaggagaggaggtgagcagggctgagaaagtgtagagtccaggtcagaaacagaggcgaagagagaatgaaatggaggggag

SEQ ID NO: 114143 - DNA, 1035 bp, Homo sapiens
tacattaacatgatagagtatgttcttaccttatttgagctcaagctgtgaatcctatcactagaatagctgtggggtattggagggtcagggtagtcctcagcaccttttgtgttcttcttgacgacctccacataggaaacagggaagatgccttgtctgttggttcctgggattttaccttcataccagttttgatcaactcttttaagaagaataactctatctccctgttatgaatatgagaaaaatgcattagaaacagagatagaataacatgaaaatataattgtcaatgttttctatgaaaaaataggtttccatttgggcaggttttataccttcagtttttgtttaatcaggggagggcaagtaaggtactagtgcttactagaaaaatacacatgatcaacatatatgtaattgaaatgtccattcaggccatcagaatcttccctaaggatgcctgattaatgtgaacgggtttatacttgtttatgctggtattgtgtgaaattatttgtctaagttatttcaaaaagcagaatagtgtaaaaggtaatgtctcaatgacaataggattattttatctctggcaggttcagtgcattggccttctgtaggaagagcttcagaaagtgcaccatagcttgctgtgagggtctgtctgaaatgggttacagaaaacacctctagaagggagaacatcgaatggtacaccgttttctttttttatttctattttttttttttttttgagagggaatctcactctgtcacccgggctggagtgcagtggtgtgatcatggctcactgcaacccgcacctcctgggtttaagaattctcttgcctcagcctaccaagtagctgggattacaggcgcccgccaccaggcccggctaattttttgtattttagcagagataggggtttcaccatgttggtcaggctgatctccaactcctgacctcaagtgatctgaccgcctcggcctcccaaagtgctgggattgcaggcatgagccactgtgccc

SEQ ID NO: 114144 - DNA, 1018 bp, Homo sapiens
tgtttaaagagctttagctatttttttctagaaaaatgttagcagcaatagttcacagcattttgattttgcaattttggagaatactttgccttatagcttttaaaatctaaaacccacaaaaaattatttgatatagtcatgagagtattaattcgatgtaaatgtataaacccttcttcacctatgtatcattacgaatcaaatgaggctcaaattccggccctattaaattgcgtaagggtataacacttttgacactaattgttaaaccttcactaccagatcatgctatcagctgaagcagcactattgtgttttggcaaacaatattgtcagaaaggtgtatgaattatgcagtaggagtaggtgtatttgcttacgtcggttgcttcttatacacagttttgtcaactctctctgcaaagctacattcactgaaaaagtattagctcgctttagaattagaccttcttctctagagttgaagctccatgtgtgaacaatcagcacctagattaaaacacactaactgctttctccttgctatgctgtctgatgctttactgacatgctctcctctctttgtgaaccttttaacttctccaaatgtctctcttctaccacgctgctctggattaaaaggtggggatgatagcaaaatatgtccatccctttgcagttactcagggctcaacggcaacccctccagtgagttagattactgtagcacttacagacagcacttggatgtccctcgggactcaccaagagccattagtttcaagaacggctggcaaatggcccggcaaaacgcagaaatctggagcagcacggaagaaaccgtctctcccaaaatcaaatcccggagctgtgacgatctcctaaacgacgactgcgatagcttcccggacccgaaagtcaagtcggaaagcatgggctccctgttatgtgaggaggactccaaggagagctgccccatggcgtgggggtccccctacgtcccggaggttcgcag

SEQ ID NO: 114145 - DNA, 1038 bp, Homo sapiens
ctgtgcctaatcattaatcagagtttaacttttaaaaaagttcataagtgcaatacttaattgctatcatagcttgctaatgagaaaaatcattaattaatctccccaatatacatggacccaggcagttccatcccttgttttccatattggctttttaatatttctttggatgaagggagaattttccaaatgcccttttcataacaagttgttttaattgcttcttattaaatccctcctcaggttaccaagcctcaagcttcctgattgattgtcattctaatggatcaagattatatttcactttgcaggattttttccaattatttaattatatgcaaacaaaaatatctatacacttaagaagaaccacttgcctcctcgaagcgcaggttcacacataggtcttcccttggccttctttggttttgattccccaatactcccttgcatgtcctttgcttcccctcagaaatcagtgtcctcaggattttctttgaaactccacagttcctctgcatctccttccaagcctacttctaggaaaacatttgcaatcaattgcaatttactctcatttttgctttaaaagaattttaggtgtcagtgaacaggaaaaagagagttttctttgtggagctccttcaagagtctccaagaaatcacactcatatataatccaaggccagccctgtggtttaattggaaactctagccttgccacacccaacatgagtgtccttgattgagtctttgaaaccctgtgtttgcggttgtgttctggagaagcatgttcaaaaccttatcatcagataattcatacatgatatttgtctaagccttcttaccctttctttaaataactcatatcttttagagtaacaggactacaaaagaaaaactgaaagaaaaaaaaaatcactgatttgcaggcaccattgcaaacttgtaacccatttactagtttctgtgattgagtatcatgctactctgaaatttccagaatgagaattgagtgaaacacaatgtcatcat

SEQ ID NO: 114146 - DNA, 1365 bp, Homo sapiens
agaaaatgagcaggattatttgcaggatgttacacctttaacactgactgaaatccagatgggaacaagcaggaatgtgtatgatttcttaaagacacctcaggtgcctttggtctctcgtattgtatatacagtgtatatgcaatacagtgtacaatgtaaagtgtacagtgtacaataccgtgtataatagaaagcagtgccaaggtctactagttttctctacagcagcagtcaacagtcaagttagagaacaggtggggaactagagacagagtgggatagagagagagaggaatgagccaggaggacacgtggaatccaggaggcaacggagccctgaggtgctcagatggaacagggtgttcagacaaccgcgagtaccatgaaccaggtgtgggacgacggtgtgtcccaggaacagggtgtgatgggtacagcatgtcccaggaacagggtgtgaggaggacagtgtgtcccatgaacagggtgtgaggacagtgtgtcccacgaacagggtgtggtgtggacagtgtgtcccacgaacagggtgtgaggaggacggtgtgtcccacgaacagggtgtggtgtggacggtgtgtcccatgaacagggtgtggcgtggacggtgtgtcccatgaacagggtgtggtgtggacggtgtgtcccatgaacagggtgtggtgtggacggtgtgtcccatgaacagggtgtggtgtggatggtgtgtcccaggaacagggtgtgaggaggacggtgtgtcccaggaacagggtgtgaggacggtgtgtcccaggaacagggtgtgaggacggtgtgtcccacgaacagggtgtggtgtggacggtgtgtcccacgaacagggtgtggtgtggacggtgtgtcccaggaacagggtgtggtgtggacggtgtgtcccaggaacagggtgtggtgtggacggtgtgtcccaggaacagggtgtggtgtggacggtgtgtcccaggaacagggtgtggtgtggacggtgtgtcccacgaacagggtgtggtgtggacggtgtgtcccacgaacagggtgtggtgtggacggtgtgtcccacgaacagggtgtggtgtggacggtgtgtcccatgaacagggtgtggtgtggatggcatgaacagggagcgaggcggatggtgtgttgtatgaacagggtgtggtgtggatggtgtgttgtatgaacaggtgtggtgtgggtggcatgaacagggtgtgatgtgggtggcatgaacagggagcgaggcggatggtgtgttgttgtatgaacagggtgcaaggtgagcagcgtgtctcatgaacagggtgtggtgtggacagcatatcccgttaatggggtgtgatg

SEQ ID NO: 114147 - DNA, 1624 bp, Homo sapiens
acccccagaagacttccccgcagctgatgagctaccaccgttaccgcccgaattcagcaatcagtttgaatccatccaccctcctagagacatgcctgccgcgggtagcttgggttcttcatcaagaaaccggcagaggttcaacttgaatcagtatttgcccaatttttatcccctcgatatgtctgaacctcaaacaaaaggcactggtgagaatagtacttgtagagaaccccatgccccttacccgccagggtatcaaagacacttcgaggcgcccgctgtcgagagcatgcccatgtctgtgtacgcctccaccgcctcctgctctgacgtgtcagcctgctgcgaagtggagtccgaggtcatgatgagtgactatgagagcggggacgacggccacttcgaagaggtgacgatcccgcccctggattcccagcagcacacggaagtctgactctcaactccccccaaagtgcctgactttagtgaacctagaggtgatgtgagtaatccgcgctgttctttgcagcagtgcttccaagctttttttggtgagccgaatgggcatggctgcgctggatcctgcgcctctggacgtgctagccatttccagtgtcccaactactgtcatcgtgaggttttcatcggctgtgccatttcccaacgtcttttgggatttacatctgtctgtgttaaaataatcaaacgaaaaatcagtcctgtgttgtcagcatgattcatgtatttatatagatttgattattttaattttcctgtctcttttttttgtaaattttatgtacagatttgatttttcatagttttaactagatttccaagatattttgtgcatttgtttcaactgaattttggtggtgtcagtgccattatctagcaccctgatttttttttttttactataaccagggtttcattctgtctttttccactgaagtgtgacattttgttagtacatttcagtgtagtcattcatttctagctgtacataggatgaaggagagatcagatacatgaacatgtcttacatgggttgctgtatttagaattataaacatttttcattattggaaagtgtaacggggaccttctgcatacctgtttagaaccaaaaccaccatgacacagtttttatagtgtctgtatatttgtgatgcaatggtcttgtaaaggtttttaatgaaaactaccattagccagtctttcttactgacaataaattattaataaaatacttgagctttatgcctctttttccttcccattgatactcctgttcaggattcagtggctgagatagaagaatggatgaatggaagggtggatattgatgtatttgcttttagtggacaaggcgtaaatgtgaaaatcctctctaccctgaccaaaagccctgctgtccaagcggagccagccaccaggtggcagtatatagctacttgatacggctcaaaactatagccacaaaagtaaaaagcataactttttaatatttttaaacaaaaccaagaaaattttatacatttttaattagtatgaatttattggttgtaattttaatgcttacatgtttttcacctttgtcaatgttttatatcaaaaa

SEQ ID NO: 114148 - DNA, 1027 bp, Homo sapiens
ttgatagtttctaacagtgcttaacctgcatgatcctgtttaatcctcataacaactctaacggattttcaccccatttcaaagagagaacctgaaggttagccagggcctgggcaggcgtctcatggccctaactgatagtgggatttacatgcgtttggttacacttcctgctgggcttctgtgtatagatgcggggccctggcagggcaagtgtaattacagacatggggtaagtgtagccgtggtctctttagggaatggctcacagtgtcaatattaaagcatattcaaaatacatacagtttggagagatcttcagcttgtacatctgtctttaagtatctaagtttgcctatgaattcctctgaatttaatgtcctttgaagttgcagtgtgctataaagtgtgtgcattatgtagctgtagatgtatttggattatcacctatgtaatctgatcagtttatattttattagagcctgtttgttttgttttcattattcctaaggaaattctgtgttttcaggctgtgattgtcagaaacaaggaaaagaaagtaatatttgagttttctggccaaatttctggttcctcattccgcagtcactttcctccacttccatattccattttatttgtggtacatacatttctcagccatttggaattgtcatagatactggcgtaaggacatgctgtatggctgattgggcctctgtaagcagttttcattgttctgtgtacttacctttattgccttttcagccgactgttttaattacaaatgttttcttttttttctactctgccaccaaaagaatctttggctgctcctgacctcagcaaaccaagaggtgacttatgcatgccagttattcattgatactcactaaaaacaatgggtcaagccttgccccagtgctgactgactacgctgggtcgcccagtgtttgcagcagtaactaagtacacggctgcatgtgtgtgcgcattgcatttgaagcacggattgcctaaccttctc

SEQ ID NO: 114149 - DNA, 1040 bp, Homo sapiens
atatcaccccagttttgtgggtttgtcagaaatcttcctcgcaactttcttaaccacgcagcacgcacacaaacacacactctctctcacacacacacacacacacaccccctctaagaagagatgtgatagtctgaaatgttcgatttcagtagcaccttgggtattacaaggttttatttgtctcctcccccaaccccactgcggccccagctcccatttggatcagagcgtactgccagagcacagtttaagagattgctagtaagtttgattatatttctaatgaagaaagtttaacagtgggatctttgccaccagttatgttgatctggtttccctatagggtaaattgcattgataactagctttgccatattaacacataccagtagagaaaaacgtcaatattcagtaacacaatgtagtttttagtggaaatttttgaatctcagaattagtaagtttaatgataatttttattgtataaacgtaatacgtttattattaaacatattaatatgttatacatttcaaatattttattggtgggaaaaggtaaccccactaataattattcaatccagagtaatatagtccataatacatcatatagtccataaatccatatagtcattatctattgcagtcatttttcaaactaaagatagctataagtatgtgctatcatttctgatttcaagtatatatatatatatatatatatactttcaagtatatatatatatacacactctattcctaatcaacacaggtatattttgataccgtatatatggtatcaaaatatacctgtgttgattaggaatagggtgtatggacatagctttgcttgttaaaccaacaagatagaattatgtcttttatcaattttaattctaagaagttcctgtttccagtttatgtaataatttatatcttggcccctaaatgctctttataaatacatttcagaattttatcagcattttctttctagttcttgttgttggaacatcagtcttcttaataatagtccc

SEQ ID NO: 114150 - DNA, 2026 bp, Homo sapiens
aaggcttgttgatgtagccaacttttttcccagagagagtgagaattttacgagcttttacagacctcggagaataaagataaaaagcaatataattaagaccaggtttctgagtcattgagtgataggacttttttgttcctttttgccgatttaggttattactgcaaatgcagtgccttgtacatagggacccactgtgagataagcgtcaatccgtgttcctccaagccatgcctctatgggggcacgtgtgttgtcgacaacggaggctttgtttgccagtgtagaggattatatactggtcagaggtatgtgtatttttcttaactttcataatcaattgtagtataaaattcttaaacatataatggtacatgtaaaaagtctgcacgttaatttgctaatgtgttctgttttgctttctgttttgctgtatttatttgcaataggatcatgaggtttatgtctgtttctccttactcttcaggtgtcagcttagtccatactgcaaagatgaaccctgtaagaatggcggaacatgctttgacagtttggatggcgccgtttgtcagtgtgattcgggttttaggggagaaaggtaaatggtttctttcaaaatttaggttcataccttttcatagcgtcatattgactggcagatgcaacagaccttcagtgatttgaactacattatgtcagattttgataatcctcatattggccccttatataatttataatcttttcactctttaaaatgaattatcaagcagatgaatacagtatatataatacttgaaaaaaactaatgtttagccaatggggttgatgtaatagtctgttgatcctaggaaaatggccattaatattggcttgatatgtttccttcccaaatatacatcaaaagcatgcgatcacatgattggtttctccacagaaggtcttttctcgtggttgtcgacgttacattttttagttgtcttttatctgggtttgatcttcacatagctcatcaaggagggattagtcttcagtctctaaggattgagcctgacatacgctggcgtatgctacagaggtctctcctcattcctgacttccttggcaggtgtcagagtgatatcgacgagtgctctggaaacccttgcctgcacggggccctctgtgagaacacgcacggctcctatcactgcaactgcagccacgagtacaggggacgtcactgcgaggatgctgcgcccaaccagtatgtgtccacgccgtggaacattgggttggcggaaggaattggaatcgttgtgtttgttgcagggatatttttactggtggtggtgtttgttctctgccgtaagatgattagtcggaaaaagaagcatcaggctgaacctaaagacaagcacctgggacccgctacggctttcttgcaaagaccgtattttgattccaagctaaataagaacatttactcagacataccaccccaggtgcctgtccggcctatttcctacaccccgagtattccaagtgactcaagaaacaatctggaccgaaattccttcgaaggatctgctatcccagagcatcccgaattcagcacttttaaccccgagtctgtgcacgggcaccgaaaagcagtggcggtctgcagcgtggcgccaaacctgcctcccccacccccttcaaactccccttctgacagcgactccatccagaagcctagctgggactttgactatgacagtaagagccactttttcatctcactaaagtgtcacttgagataaacagtgaggttacaaattctgtccagtcaaaatgtgtgtactcttcattagagacaagtatgctcagactgaaatccgtatgatgatttgaaacttttttggatgtcccgattgctgggttagcattgtggctttgatgttattttaattaagaaattgaatctagtcatgtttagttaatattctggagagatcatttcattttataattgataaaggttctcatctataattttttg

SEQ ID NO: 114151 - DNA, 1076 bp, Homo sapiens
tgatattcctaaaagacgcattttaatgatttatacagtggacaaatgaatctgtgctctgtagtacttaaatgtaaggcctaacttctaccctcactccctaagccctctcctgtagatttgtgatcaggtgctctcattgaaggttctatgagagtaatgtgaacagtcattgcttttatcctagattcatcatggaaggctgcagtacaagtttgactgtggaagtggccctggaattgtctctgttcagagcattcaggtcaatgatgggcagtggcacgcagtggccctggaagtgaatggaaactatgctcgcttggttctagaccaagttcatactgcatcgggcacagccccagggactctgaaaaccctgaacctggataactatgtgttttttggtggccacatccgtcagcagggaacaaggcatggaagaagtcctcaagttggtaatggtttcaggggttgtatggactccatttatttgaatgggcaggagctccctttaaacagcaaacccagaagctatgcacacatcgaagagtcggtggatgtatctccaggctgcttcctgacggccacggaagactgcgccagcaacccttgccagaatggaggcgtttgcaatccgtcacctgctggaggtgggctccgtaatgttgccatctttaaaatgctgcacgtgtgtacatttaaggggaagctccccaggtatttttttatttttttctcttttgattcagataattttgtcagacactgcagtcagtgttggaagcgagcagcatccctcatacgggggcagagctgggtctgctgcccttctggtgcccaggctgcaggtaccacggctcccactgctgagcgcctgcagtgccctcccagtgcccgagcaggaggcacctcaagtgactcagaactcttctttaactccatagtcatcggcccaggggaatttagaattcgtaccgcttagcccttctttgttatttgtatcaccttttatctaatggctcagcgtagggggcctgctagattcttgctggcaataatagttgggaatatgattt

SEQ ID NO: 114152 - DNA, 1020 bp, Homo sapiens
aattgttatttagtcagttctacataattttatgtaacagttgccatctgtggagattgatgacatttgcatcttctttggggaatggggattgttttattttgcttgagaaggtttcttaaatcaccttgaggctatgtataactattttctgaaattttcttctaataattttatactgaacatttttatatttaatctttcattactttagaattcatttctctgtgatgcagtcgtcaaatttattctttccaaacagagagccagtcatgctgggcttttcattaagcaaatagacgttttcccacagaattggatagtaaaatgttatcatcttaaataaaaccctaaatcagtctcaaggggtgcaggggagtcatactttaaaaaatatgcttaaacttggttctggtttattttttcctctgtgtgattcacagggagttcatctatgacactgactggaaacagctacgtgaaataccgtctgacggaaaatgaaaacaaattagagatgaaactgaccatgaggctcagaacatattccacgcatgcggttgtcatgtatgctcgaggaactgactatagcatcttggaggtatgtttctccacagcgttgcatcttagtggaagactttcaaaccataaatttcattttatattcagattgttaatttgcacagataataaagtaagtgaaatggttgaattccacatttaaataattcattgatgcctgtacaagttttagactttgtgggatgaagagctctttttgccctgccatgacagagatttaggtccatgtgacagttaacattcaaactctaggtgatgccccattttaataatgttggctgggtgtggtggctcacgcctgtaatcccagcactttgggaagctgaggcgggtggatcacttgaggtcaggaatttgagaccagcctggccagcatggcaaaacctgctctctactaaaaatacaaaaaattagccagacttggtggcggacgcctgt

SEQ ID NO: 114153 - DNA, 1177 bp, Homo sapiens
cattgacattagggtaattgaggagagcatctatccgcctgcgattttgcccctggagattttcatcacctcttctggagaagaatactcaggtggcgtcattgggaagatccatgccacagaccaggacgtgtatgatactctaacctacagtctcgaccctcagatggacaacctgttctctgtttccagcacagggggcaagctgatagcacacaaaaagctagacatagggcaataccttctcaatgtcagcgtaacagatgggaagttcacgacggtggccgacatcacagtgcatatcagacaagtcacacaggagatgttgaaccacaccatcgcgatccgctttgccaacctcactccggaagaattcgttggtgactactggcgcaacttccagcgagctttacggaacatcctgggtgtgaggaggaacgacatacagattgttagtttgcagtcctctgaacctcacccacatctggacgtcttactttttgtagagaaaccaggtagtgctcagatctcaacaaaacaacttctgcacaagattaactcttccgtgactgacattgaggaaatcattggagttaggatactgaatgtattccagaaactctgcgcgggactggactgcccctggaagttctgcgatgaaaaggtgtctgtggatgaaagtgtgatgtcaacacacagcacagccagactgagttttgtgactccccgccaccacagggcagcggtgtgtctctgcaaaggtactgcacatgagtgtatgaaagtcggtgtcacagatggtttcagacggcctttgaagcctttgatggctatacatgaaaggtgatgttcttgaaatgtctgttaattatcttttccctttctcccctctttgaatgaagagggaaggtgcccacctgtccaccatggctgtgaagatgatccgtgccctgagggatccgaatgtgtgtctgatccctgggaggagaaacacacctgtgtctgtcccagcggcaggtttggtcagtgcccaggtgagagttgaatggttgggtatacttttatttttaaaaatcggtttcattgtttcttaccattttcttctttattggagtctaaaaatattgcaaagtatgtttattgtaagaagacagatgtggagatgaataaagaatga

SEQ ID NO: 114154 - DNA, 1049 bp, Homo sapiens
agaaggacactggtgatgattaagaatgaaatttcagaagaataatgggtgtatctaagattaaaggaatttggggggagatagtgatgagatacctcattaaattctttaatttctcctttgatgtgtgaatgttgagaagggactttctaaggatttgggaagcatgcttaggattgcccccactgtggggcagaataaatttagtatctttgactaaagaacccagatcctttaatacacttctgtccattgtgagataccaaaggagctagcctgtggtatttcccaagctaatgcgccagcagaattctttttcattggagcgtcttgcaggactaacgttctgtagaacatactctgggatctagccagctttctggcttctcccacaactcattctagaagacagagctttatagggaactgccctgaaaaagaagctatctcacttgactttctttcttttgtgggaggtcctgacaagctaatcctgagggatttagacagctgagtataatccgagtgtgaaattgagggggagggtgatctggagtgtcctgaggcattggaaatgagtcagcgctaaggtgcgggaggcagctcatgtctgtctacttccactgagagcaaacttggggccctaaggaaggctgctcccatcttaccgaagcaacagcatttgagatatgttaacttcttgtcctaatcatttgtattacttttatgtcttagtttctgttaatagaactgcaagataaaagacttttacaaaacaagtacatatttaagaggcatcagagaatctaatcattattggtaattcttgctgttgggaaatgtgtattacttgcatgcactcgtttgtaggagattagggcatcgctcacaggcaggatgcaacagatagtggtagctcactgggacctgcccgtcaggactctcaggaggacactcctcattggagctctgtcggccttgtgaaaatgaacgtgcattctgtcttttgcctgaaaagatttcaggttacacgctcacggttcaagctt

SEQ ID NO: 114155 - DNA, 1150 bp, Homo sapiens
atttatatttataataaaattatttttagggctctttaggactagaatgatgtgaaagatgttaaaaggaattgtttaaaaagggatttttaaaaatgagaggatgtaaataaagggttatctagaagttaaaaggatataaatctccattttaaaaatatgagaaggaaaatattttaaaaagatgagacaaaaaatgaaaccgaaagacacaatagaatttttacgtttttattttgttgattaaattagagtgaagtcgagtgagctatggtatggaagggatgatacaatcatcatgtttataataagcagggatgtaggtggtgttgactggaaaagcaatttaaatatcatgaagaatatcatgaaaattaagagaaataaagatccagggatgggcagattcatagtttttaattgttgaattaagaaaataggaaacatacgtaaatggtaagtaaacttttgaagtgaaaactaaatgtactcaaaagcattcatctatttcagtcatagtgggaaaatgtggtggcattgcagaatgctggaagtaattttgatttctattcaggggccgtatttatcattgagaatctggattatgagagctctcatgagtattacctaacagtagaggccactgatggaggcacgccttcactgagcgacgttgccactgtgaacgttaatgtaacagatatcaacgataatacccctgtgttcagccaagacacctacacgacagtcatcagtgaagatgccgttcttgagcagtctgtcatcacggtgtgtattttttccccattacagtgaaaactgtgtatcttctggatctttgcaaaagtttttagtaaaatcaatctagtttttgtagcggcctttgtaaatattttggagatttgaaagtgtcttttgttaggccaactgattgctgactttgttatgaataattgtgttaaaacagctaagctaaccctgtctctactaaaaatacaaaaaaaaattagccaggcgtggtggcgggcgcctgtagtcccagctactcgggaggctgagacaggtgaatggtgtgaacccaggaggcggagcttgcagtgagccgagattgtgccactgcactccagcctgagtgacagagcaaggctcc

SEQ ID NO: 114156 - DNA, 1044 bp, Homo sapiens
cgtttacccttctaaaaaaattttgtttggtttttaaaaaaaaaaaaaaaagcgttggccgggtgcggtggctcacgcctgggatcctggcactttgggaggccgaggcgggtggatcacgaggtcaggagttcaagaccagcctggccaacatggagaaaccccgtctctaataaaaatacaaaaattacagtgtgtctgtaaccccagccactcgggaggctgaggcaggagaattgcttgaacctgggggacagaggttgcagtgagccaagatcacgccactgcactccagcctgggcgacagagggagactccatctcaaaaaaaaaaaaaagtgttaaacttttttatttaaaatcttttgacatgtttttatgtcttcataggattaaatcggaagattttatactcactgattgactctgctgatgggcagttctccattaacgaattatctggaattattcagttagaaaaacctttggacagagaactccaggcagtatacaccctctctttgaaagctgtggatcaaggcttgccaaggaggctgactgccactggcactgtgattgtatcagttcttgacataaatgacaacccccctgtgtttgagtaccgtgaatatggtgccaccgtgtctgaggacattcttgttggaactgaagttcttcaagtgtatgcagcaagtcgggatattgaagcaaatgcagaaatcacctactcaataataagtggaaatgaacatgggaaattcagcatagattctaaaacaggtaacctaccatgtatctgagaggaaacccttcattccaccaagaaaactagatttgcttaaccacgttgccttgtattaagtgaccctgtgttgtcagtagatgttctaaaaaaggcaaatcaagttttcttttagttatttacagtgggattgaatgttgtttggaaggcttcagattatagttctacttaatacattttgggcatgttcattataaaatacaagcaaattaacttaaaatagaaaatcaaagcagcatgttc

SEQ ID NO: 114157 - DNA, 5444 bp, Homo sapiens
atagccttgtctttccaccacacattcccagtgcagccgagagagggagttttggcttcgctaagagcagagtgctgtttcttctgttttttgtttttcatcatttatggacaaaattctgtaaagtatacctggttttaggtggataaaaataaaacaagttgaaggttccattcaaatattgacatcccctgagtttctgcttaatttcagaatataatttttaaggatactttgtttctgtttctctaactactactactactgccccttgtgtttttctgtaacatgtattttttcctctccttccaggaaatattggaaattcttttatgattgatcctgtcttgggctctattaaaactgccaaagaattagatcgaagtaaccaagcggagtatgatttaatggtaaaagctacagataagggcagtccaccaatgagtgaaataacttctgtgcgtatctttgtcacaattgctgacaacgcctctccgaagtttacatcaaaagaatattctgttgaacttagtgaaactgtcagcattgggagtttcgttgggatggttacagcccatagtcaatcatcagtggtgtatgaaataaaagatggaaatacaggtgatgcttttgatattaatccacattctggaactatcatcactcagaaagccctggactttgaaactttgcccatttacacattgataatacaaggaactaacatggctggtttgtccactaatacaacggttctagttcacttgcaggatgagaatgacaacgcgccagtttttatgcaggcagaatatacaggactcattagtgaatcagcctcaattaacagcgtggtcctaacagacaggaatgtcccactggtgattcgagcagctgatgctgataaagactcaaatgctttgcttgtatatcacattgttgaaccatctgtacacacatattttgctattgattctagcactggtgctattcatacagtactaagtctggactatgaagaaacaagtatttttcactttaccgtccaagtgcatgacatgggaaccccacgtttatttgctgagtatgcagcgaatgtaacagtacatgtaattgacattaatgactgcccccctgtgtttgccaagccattatatgaagcatctcttttgttaccaacatacaaaggagtaaaagtcatcacagtaaatgctacagatgctgattcaagtgcattctcacagttgatttactccatcaccgaaggcaacatcggggagaagttttctatggactacaagactggtgctctcactgtccaaaacacaactcagttaagaagccgctacgagctaaccgttagagcttccgatggcagatttgccggccttacctctgtcaaaattaatgtgaaagaaagcaaagaaagtcacctaaagtttacccaggatgtctactctgcggtagtgaaagagaattccaccgaggccgaaacattagctgtcattactgctattgggaatccaatcaatgagcctttgttttatcacatcctcaacccagatcgcagatttaaaataagccgcacttcaggagttctgtcaaccactggcacgcccttcgatcgtgagcagcaggaggcgtttgatgtggttgtagaagtgacagaggaacataagccttctgcagtggcccacgttgtcgtgaaggtcattgtagaagaccaaaatgataatgcgccggtgtttgtcaaccttccctactacgccgttgttaaagtggacactgaggtgggccatgtcattcgctatgtcactgctgtagacagagacagtggcagaaacggggaagtgcattactacctcaaggaacatcatgaacactttcaaattggacccttgggtgaaatttcactgaaaaagcaatttgagcttgacaccttaaataaagaatatcttgttacagtggttgcaaaagatggagggaacccggccttttcagcggaagttatcgttccgatcactgtcatgaataaagccatgcctgtgtttgaaaaacctttctacagtgcagagattgcagagagcatccaggtgcacagccctgtggtccacgtgcaggctaacagcccggaaggcctgaaagtgttctacagcatcacagacggagaccctttcagccagttcactattaacttcaatactggagttatcaatgtcatagctcctctggactttgaggcccacccggcatataagctgagcatacgcgcaactgactccttgacgggcgctcatgctgaagtatttgtggacatcatagtagacgacatcaatgataaccctcctgtgtttgctcagcagtcttatgcggtgaccctgtctgaggcatctgtaattggaacgtctgttgttcaagttagagccaccgattctgattcagaaccaaatagaggaatctcataccagatgtttgggaatcacagcaagagtcatgatcattttcatgtagacagcagcactggcctcatctcactactcagaaccctggattacgagcagtcccggcagcacacgatttttgtgagggcagttgatggtggtatgcccacgctgagcagtgatgtgattgtcacggtggacgttaccgacctcaatgataatccaccactctttgaacaacagatttatgaagccagaattagcgagcacgcccctcatgggcatttcgtgacctgtgtaaaagcctatgatgcagacagttcagacatagacaagttgcagtattccattctgtctggcaatgatcataaacattttgtcattgacagtgcaacagggattatcaccctctcaaacctgcaccggcacgccctgaagccattttacagtcttaacctgtcagtgtctgatggagtttttagaagttccacccaggttcatgtaactgtaattggaggcaatttgcacagtcctgctttccttcagaacgaatatgaagtggaactagctgaaaacgctcccctacataccctggtgatggaggtgaaaactacggatggggattctggtatttatggtcacgttacttaccatattgtaaatgactttgccaaagacagattttacataaatgagagaggacagatatttactttggaaaaacttgatcgagaaaccccggcggagaaagtgatctcagtccgtttaatggctaaggatgctggaggaaaagttgctttctgcaccgtgaatgtcatccttacagatgacaatgacaatgcaccacaatttcgagcaaccaaatacgaagtgaatatcgggtccagtgctgctaaagggacttcagtcgttaaagttcttgcaagtgatgccgatgagggctccaatgccgacatcacctatgccattgaagcagactctgaaagtgtaaaagagaatttggaaattaacaaactgtccggcgtaatcactacaaaggagagcctcattggcttggaaaatgaattcttcactttctttgttagagctgtggataatgggtctccatcaaaagaatctgttgttcttgtctatgttaaaatccttccaccggaaatgcagcttccaaaattttcagaacctttctatacctttacagtgtcagaggacgtgcctattggaacagagatagatctcatccgagcagaacatagtgggactgttctttacagcctggtcaaagggaatactccagaaagcaatagggatgagtcctttgtgattgacagacagagcgggagactgaagttggagaagagtcttgatcatgagacaactaagtggtatcagttttccatactggccaggtgcactcaagatgaccatgagatggtggcttctgtagatgttagtatccaagtgaaagatgcaaatgacaacagcccggtctttgaatctagtccatatgaggcattcattgttgaaaacctgccagggggaagtagagtaattcagatcagggcatctgatgctgactcaggaaccaacggccaagttatgtatagcctggatcagtcacaaagtgtggaagtcattgaatcctttgccattaacatggaaacaggctggattacaactttaaaggaacttgaccatgaaaagagagacaattaccagattaaagtggttgcatcagatcatggtgaaaagatccagctatcctccacagccattgtggatgttaccgtcaccgatgtcaacgatagtccaccacgattcacggccgagatctataaagggactgtgagtgaggatgacccccaaggtggggtgattgccatcttaagtaccacggatgctgattctgaagagatcaacagacaagttacatatttcataacaggtaaaaaaaattcataccaaacggtttaattaatttaaaatgatttttagaagcataaagtataagatctgtattgtatggaaattggggatttaagggatgattttagttaaaaatatctaaaataatacgtagaaataacatctgttgagcctcatttcaagcttgttacctgagcaaagctaccagttgtttcattagactgtttttgatttttgtgactcattcttttgaaccttatacttagtgtataataaatataattaaaaacatctatagttttaatgcaggctaaatgattagtagtcttaatgctatgtttatgcattttaatgctgcccttgtttttgtaaattggaaggctaatatatgccaaattaattcttttaatactcaattcttttaaactataacattatacatcttttgtacagtttattttttctgttacttatttttatcctttcaacaaatttgattattatcttcctccattgatttaataggaggggatcctttaggacagtttgccgttgaaactatacagaatgaatggaaggtatatgtgaagaaacctctagacagggaaaaaagggacaattaccttcttactatcacggcaactgatggcaccttctcatcaaaagcgatagttgaagtgaaagttctggatgcaaatgacaacagtccagtttgtgaaaaggtaagcagctcttcccttacatttgtgtgttatgaatttcaatttcttaattctttcaatgggaccatcatttggcgctgtggtgtaattcacatgtgttttatgatcacttactgattaagcagaggtgttaaatggggtaagacttggaaaagcttcagaactatttgcgggaatgctcaataaatcaaaagcctcattctagaaaactaaattacggacaggactccagttgcatccaacactgaaaatgctctgtaaccttttcatgaggggattctcttaatatggggatacagctgttttgggggaaggatctgacgggaaacaaagtgccgacgtgccgtgagacactgttttg

SEQ ID NO: 114158 - DNA, 1049 bp, Homo sapiens
agttgttattcctgaagatacagcgccagaaacagaaattttgcaaatcagtgctgtggatcaggatgagaaaaacaaactaatctacactctgcagagcagtagagatccactgagtctcaagaaatttcgtcttgatcctgcaaccggctctctctatacttctgagaaactggatcatgaagctgttcaccagcacaccctcacggtcatggtaggcgctctacccgctctcctcccaccatttggtcctgaggcctttgtgtgttcgagcgtgatttttaattagttataaggaaagcaccaatgggattgataatgtgtcaattctttttaggtacgagatcaagatgtgcctgtaaaacgcaactttgcaaggattgtggtcaatgtcagcgacacgaatgaccacgccccgtggttcaccgcttcctcctacaaagggcgggtttatgaatcggcagccgttggctcagttgtgttgcaggtgacggctctggacaaggacaaagggaaaaatgctgaagtgctgtactcgatcgagtcaggtacttttggagccttcagtggcattttaaatttgcagttgttaaaagtctgtttctacttttccaaaatcagttctgggtattgaagcatttctatgtatctgcaaaaatggcttaaattgatctctagatacaattttacatgttaggagaaaggaatttttttttttttaacttttagcccatcagagagtttgggggaagttctgggggattcacaatattagcccagttcaaggctctgagaagccacgtagtagaggaaactttatttgaccaattcagtatttctgaaattattttaaccacagtttcttctgtaacattggttaaattaaacacacttaggaagctgcttgcctagtaatttaacgtttcacttttttgtcagagagtattttctcttgagcagagcaggaagctccataacagtgttgactcatctcattgtaattggctgaaacctcagaaagaggtgtcgtgcccctcccaccccttcca

SEQ ID NO: 114159 - DNA, 1030 bp, Homo sapiens
tcagctgggaggtgagacactagggtactgcagggatggattgaagagcagagggatcagctgggcagtgagacactagcataccgcggggattgattgaagagcacaggaatcagctgggaggcgagacactacgataccatggggatggattgaagagcagaggagtcacctggacggtgagacactaggataccgcggggatggattgaagagcagagcagtcagctgggcagtgagacactaggataccgcggggatggattgaagagcagaggagtcagctgggcagtgagacactaggataccgcggggatggattgaagagcagagggatcagctgggagatgagacactaggatactgcggggatggattgaagagcagaggggtcagctgggaggtgagacactaggatacctcggggatggattggggcttggaagtaacactcagaagtcaacagagcagccattgtgtatccaggtcaggggcagcagatgccgatttgagaaggtttaggtgagccgttggtgagtcaagcgggcagcctccagcagaggtaggcggcaggacagtgggagaactgccagtgccctgcggaaacagctcttctctggctttcctgtcctgcgtgtgtggcttaggatgctgaccgccattgattccagtcacttggctttatcttgtatctccaggtaacttaccaaatccagttaccttttttttctttcattcaaacaactttgctttcatatcttctttaactttctctcgagcatcagcatcgtggcctctggagcagatcacttggtttgaatcccggctccacctcttgtactcctttccatgggcaaatagctgtaactctctgtgtgtccatgttctcatctacaaagtgggggtggtgataatcgtccttttggaggtcttaggaaggttgatgaggtgacccgcagggtgcttgttcttcacgttctgagagcctgtcacccagtaagcacgcagaaagccatagtcttgttgcaca

SEQ ID NO: 114160 - DNA, 1019 bp, Homo sapiens
aaaataaaagccttgttttgtttttgtttttttttacttttttatttccagtgactatcttccatcgctgttttttttttcatagtgtgcgcatggtcacccatcccactcgccagcgtgttgccacgtaatgctcacctagctccgtggttttaggtttctcttaagacgtcgtgtgtgttgttttgtttcttggttagatttagtagtagaatttcatcatgacattaaacctctattttcatcccatttcattttatatctaggtcgatggatttgaaaagagagttttatcaaaaatatttggataatattaataggatagaaacttttgtttcattaggctttgtgtttgtcaaaaatgagaaaaaaaattcttttcaaatagtttatagtagccaggactaattaaagttaacgaccgctattttttttagagttaacattgatttttaatagctattttattaggtcaatttgctcaaagtatcagaaagttttgttagtaagtaagcttttaaatggcccagtgatggtatctactgagatacaaattgaagaggaattcagaacccctgaaaaagcaaattgaaagtaactcattggcaatattagcaatgtctttgttttcagagttgctttcttgctttctttcagttagttgcttcctggacaattagggttcactttgccttaacaagcattgtctttctaattggccactcttttctttcaaaatgctcctccttggaagctctttgctagtatattagaagatttttcagtgccattaagtatgagaaagccacagaataaactacagagtgttatcctgtgacctgtttttacttttttttccccaaattaggtggcaactacgacagtcacttcgatgtggacaagggaactggaaccatcattgttgccaaacctcttgatgcagaacagaagtcaaactacaacctcacagtcgaggctacagatggaaccaccactatcctcactcaggtaagtgaatt

SEQ ID NO: 114161 - DNA, 1075 bp, Homo sapiens
gctgcctcacctccttacagccctgttgttggaatgaagatctgctgtgtatgttgtcatcgtgccctgcaaaatgcagagctttacacacatgcggagtagcatgaggaagaagatgctcactttttatatagtatatcttaacatgttaatctgttaactttaaaaaaacaggttactgtgacagacaatggtagtccccccaaatcaaccattgcaagagtcattgtgaaaatccttgatgaaaatgacaacaaacctcagtttctgcaaaagttctacaaaatcagactccctgagcgggaaaagccagaccgagaaagaaatgccagacgggagccgctctatcacgtcatagccaccgacaaggatgagggccccaatgcagaaatctcctacagcatcgaagacgggaatgagcatggcaaatttttcatcgaaccgaaaactggagtggtttcgtccaagaggttttcagcagctggagaatatgatattctttcagtgagttaagattgtagtactgtaatttttcatatgttgtgactataaaccttattttgtattttttctttagtaactttatttctattttgtaaacggctgaagtgtttgtgacctgctggccccattaggcaatgccggataacgtttgagaatcagggtgcttattgtttatgttgaatgtggtcatgaaatcattgttcttctgtcaggcattccatacacagaatacaaatgtgaaatgtttgaaattggctcagtttaagaccaaaccagtctgtgcttcattcatttctgggttgtaactcctgatttgctgtttttaatcccctctgcccaaatgttgtagattaaggcagttgacaatggtcgccctcaaaagtcatcaaccaccagactccatattgaatggatctccaagcccaaaccgtccctggagcccatttcatttgaagaatcattttttacctttactgtgatggaaagtgaccccgttgctcacatgattggagtaatatctgtggagcctcctggcatacccctttggtttgacatcactggtaagcattcc

SEQ ID NO: 114162 - DNA, 1031 bp, Homo sapiens
ctgggattaaggcatgagctaccgcacctggccaagagtgtgattttaattgcagtattttgtaattgaccttattttgtgaggattaatgaactgttatcattttacaggtctcatcacaactacgtcaaggaagctagaccgagaacagcaagatgaacacatattagaggtaagttttttttttatctttaatacttaaagattcgtagttacaagtatcatgggaaagaacaatcttgttcccattaaccagtattcttagctattaatattttgttgtattaatattatttactggttgttaggaaaaaggaatataaggaaattgttaatgaatatagctcttgtcccctttatccctcaataccattcccagaatacacagccactgtcatgggccggattcagatctttgtattttatgcttgcgcacacacagggggcgaacagatctataaacagtgtcatgtggaattcatttgcatttacataagtgatatttttctgtatacatctttttttccccttactattatgtttttgagatatatttatgttggtatttatagatctgtttcaacctttttaactagaggtaatttgtttccagattcatttttttgctcttaaacagttgcattatttttgcgttttaaactatgaattacttagtttgtgcttcttaaatacctcaaaagtaaaagtagattgaagtctcagatgtgctcttctagaaagttctaataaggcttctcattctcatggataatttacaatgccttttagtccttagaaaacccacagcttgttatcatgtattggtcacctggtttttggctaatagtaaatacattgcagaaaaaggccgcgagtaatttggagagggaaggtggagcgtaacatggacatcaggttgatgagatctctgggccgtgtcgtcaggaagcggctgagagacaggcagaccgcagagaggggcgtagagacatctctctgtcccgtgtggaagactggtgttcattatcgga

SEQ ID NO: 114163 - DNA, 1058 bp, Homo sapiens
tcgcccgctgagccaagtggagactcatagcagagaacggggagcaggagcatggcagggcagtatcagcacagtcaaaatctaggaaagttttactttttttttttttttctatgtaggtttaagacagatgtctacaaaaatttggatttagataaatattttttgcttcaaattttaaccacagaaaaggattttgaatattgcagatgttaaagtttttagttttgacaggcagcatttgaaattggagatgctataaaggatcagacataattggtgactatttaaatttaaattatttaaatttaaaattcagttctatggtgacattagctctgtttcaagtgcatagtggccacatgtggccaggtgctaccatattggacagtgcaaattatagaacacacaaatcatcacagaaatttctgttggacagtgcttttctagaacgtgtatggctgtggttcatgaattattgtaaaataaaagggcggaaaggccaaaatcattgcagggggtagaggaaaataatcagagtaaaaggaaggtatcgggtgaccagatttttaccttttttccttgatctttttcccttcctgtgcttattctctagtagagtaattgaaaagtgttccaagtaaatttcctgccgggtgaggtgaacatagggctgcagagattccttcctttagagccaggaccctgtctttcagtgtggggtcatcgatgactcgtactacagattgcaagtgcttgctctcttgttgcagttggacctgaatcctattcagaaatcctatttttttccttttctagctgccatctttcatgtgtgtgtgtgtgtgtgtgtgtgtgtgtgtgtgtgtatatattttttttttttttttttgtgagacagtctcactctgtaacctaagctcaattgcagtggtccgccctcagctcactgcaacctcggcttcccaggtccaagtgagtctcatgccttagcctcccaagtagctgggattacaggtgcacgccaccacacccagctaatttttgaatttttagta

SEQ ID NO: 114164 - DNA, 1052 bp, Homo sapiens
ggctttagcaaactttatttttacagtaagaggatacttagcacccgtgatccatttcattaaaaatttgctgcaactcaaaaacattagaaaaagtcatataggatatgccacttcaatatttctaaggagtttgagttttttatatgtgtggccatatattagtgtatataaggcttaaaaaataattgatttgagattttccagcctaagtttagttttcagccatcaaatatgtctatattttcactctgagctttaaaatgttttaatatttaaatttatttgagtaatatgcccattaaagattaaagatggccacaataaagtagtgtataaaatgaagttctcctgtctcctctcttccctcctctctcctctcttccctccagctacctgttccatttcccaggagtagccagaagtaatatgtcagggttgaacgtgtcacagcttctgtgcacaggagtttgtgcacacattacatccgtacacacatatgcatgtctcatcagccccttgccttgctggtttttgtagtgctccttgtctaaaagttacccaaacagtgtaagtttcacagtccgcccatgagtgtattacaggtgttttattgtaattgtccttaatgttgctgattcttaagcacactgaatgtccctgggagcagtccctgccacagtcaggattgaagggtagaaatctaacttccggatcctggtagtaacaactcctgaagaaattacactgaagaccctaaaacttaaactagacacttcctttaccaccaaaaatactatgattacagttcttaaacttagtatcaagtagaatatatgaaagtgtttcagagacatcatcgggtgaaaatggtatgtatctgaagtgcgtgcctgcagtcaagggtttgtcagaataatgctatgattaatacaacatcgtgagaaagggatggagcccagaggactccttcctgcaaaaggagctgggcttggtggagagaacattctaatcctagaagaaagtgagatcactgaataattttgttgtat

SEQ ID NO: 114165 - DNA, 1029 bp, Homo sapiens
ccgctgtgttccagtaaaactttgtaaataaacgaaataaattcaataaaatttgaattttctgcccttttcatgtatcacaaaagtttttttcaaccatttaaaaatgcaaaagccattcttcactagccagccacacaaaaacaagctactgtgctttcctgactcctgatgagtggacgtatttactggtgggactagttaaacaatttcgttgattgctgatttttaaaattattttgaagggatagacttttatatttctgaagtaaaaattgaatccctcccgttgctctaagcaagagtgcttagaaaggatgtttgtatttcacttctcttggttgttaataacaaaattattctttaaatagagcaattagagtatcagtatcaaggttgagatctcagatacgattttgcaagttggttagtagactgttagatctcttctacattgggaagtaattgtttctcattagaagataaattttcctagattttgaggttttcctactttttctgtgttgatgtgtcctgttaagttttcagagctcccaatttcagctcaaacagttggctctaagtatacttagcaggtctttatcatctcccccattttgtttattctcttattctgtgtcgacatgttatactcaaattactcagtttccatttcatatgctttttagaggacggcgttatacagtgttctgttttttattcgcttctttacatgtaaaatcctgtatttagtatagaattattttatgtttactataggaaatgtgatttgtgattgcagactgggcagcgatgtatagtttatgtgtggtaatccctaaagcacgcagtaaagttacaaaatggtagaatagctggtaggtatactgggtgctcatcatgtgttagtccagtaacactttacaactatttttttctgaaccagagtaaatggcattttattgtggctggaacgaatactgaacaaactgcaataggaaatagctaaagctgcaaacaacttccagg

SEQ ID NO: 114166 - DNA, 1077 bp, Homo sapiens
ttgtttgactgtgtccatcatcagttacagggtaaatgtgcttcttttaacttaagttgagcacttgctcaaggtggaagagagacaggagcatagaactcagattggagccttggcagctgcagcgcctgcaaacaaaagcatcacagctttgtggtgtgtcaaggacagagaagaaagggagtcccaaacaaaagagactagtgtgagcttctcatgactcattattcacgaacaacctcgggaaatcgacaccacccttgcaaagagtctttttagttaaagttattgctttgaacttgggggagttgatatgcaacttacaattggcatttattaataattttgaagtgttacttttagacatgtgtgtcctttagaagagaccatggtcttgctctcttatctgtatgtttgatatttttcacgtttttgctacaaaccaagtattgatctttatttttaaaaagcttttttgaggtgtaattcacttacagcaaattgcacatatttaaagtctacaatttgataagctttcacatagcttttacacctgagaaaacatcaccactatcaggcagtgaccacacccatcattcccaaaggtctcctcacacttctctgtattccccctcccaaccctcccacctccatctctagtcaaatgctggtgtgctttctagcactaaataatagtttgcatttcctggaattttatcttggtgaactcacatggcatatactctttttggtaaggcttcttatacttcgcatgtttattttgagactcatgcatgttttggcgtgtatcaagactacgtttcttttcattgctgtgtatcctttatatagatagattaatattataatttgtttatccactcacctagtaataggcatttgtattgctgccagtttttggcagtttgtaaatccgctgtgaacattgagtacaagcctttctgtggacacatacttccatttctcttggacatcacataggggtgcatagctgtctggaaactgtctcaaggcagaaagctgctgcgatcgtgggtgtcccctcatctgtttctc

SEQ ID NO: 114167 - DNA, 1077 bp, Homo sapiens
tcctctttgctaacagactttcttttggatgtaaacccttgaaataagattgctgttttaactactttaaaaacaaatcattaaaagttgttttctttcagaagcatgtttttagttcaaaaagtctgtcttcatgcatacgcatcatgttagaaacatttacaactttcttttttttttttttttttgagacagagtctcgctctttcactcaggctggagtgcggtggtgtgatcttagctcactgcaacctccacctcccgagttcaaggaatcctcctgcctcagcctcccgagtagctgggattacaggcacatgccagcacacctggctaatttttgtatttttagtagagatggggtttccccatgttgaccaggctgttctcgaactcctgacctcaggtgatccacccgccttagtctcccaaagtgctaggattacaggcgtgagccaccgcgcccggctaacatttacaacttttagcaattcagaagataagtaataatattttgaaagaaatcttaggaggtgcctgattcctagtcctgaatctgggtggcaacctaggttttcttcccagctgttagataaggagatcatccaacgtcccttatcgcctccatatgacaactaataattttatatatttggtgactaaacacgaactattatgctttacttttattttggtaatcatgatatcttctagcaatgacttcttttgaacttggttagtctttacttatagatccgtaaccagttctgagaaagtagttgtgacaaaatgtaacgaaaataagtggggaaagatagttatggaggcaaaggtggactaatgttcctttctgtgtcccagaaattcctaatttgacttttcctggtttttattgtcctttcatgtttgaaatgaaactttgaaacgttttataaaagtagctcttcatttggggctggagggaaagtttgtggcagacctcactgccacttcagcggtattgatgcatactgtttcaggttaaaaatgctttacgctgtcagttgaaataactcatcgatgtgtctcagtgaacaa

SEQ ID NO: 114168 - DNA, 1053 bp, Homo sapiens
actaatagaagttgagcatctttatctgaaatacttgggactagaagtgttttggatttatttggattttgagatatacgcattataccagttgacatcccacatccagaaatctgaaatccacaatgcccagcgcaccatgttggtgctccaaagtttcagattttgcagcatttcagattttttgatttgggacactcatcctgtttgtatagtaatactcaatttttgaatatgtaagttccttgtttgtgtgtatctctgttgccttagcgtaaataacaggaagtgaaattgctgggtgaaaggtaatgaaatttttaaaagctgttctttttttttgtttgtttgtttttatgagaactagacatcccatcagcagtttgtgagtgcccatttctctgcattcttgctgccactgaatatttggatttagaaacagaaatcaaaatgatggcagatttatgagtggaaaatactaattcagtcagggaactatcataattgaaacagtggttgttagttttgtggctgtggttctggttgtgtgtttaaaaattctgatttttataacccaactttttgggatcatattctctgatttaacttaccttttctcgatctttgtccccagtgcatattgaggcttatttcttcacattaattaattgtttaaaaagcgtctcttgtatgccagataaaggctaatgagggatggacagactgtaaaacatgctttcactcttcatttcattggccagatgctacttcgtaaaatcagaagtagttgaatttttcgttttcgctgctatcaggcttgtcaaattaaatttaaaaatgtaattttgctgttgaaatcaagaatataagttctcttttccttcccaagtatccctatgagttaattcactcacctgtgtccatagtgtataatcagcagtgtagtgattggatccaaacagatagactgtttcatgggatcatctgagaacacattatcaaggatgtgatactaggcaataagcagttccttggcagctattaattcatgtt

SEQ ID NO: 114169 - DNA, 1090 bp, Homo sapiens
acttctttttgaaaagtagttgctttctgtaaacttgacctttctgttgtttcaatggcctgtttattcttttcagagttaaaaaggtcattttcaggtttatggaattttccatgtaaattttgggatctgcatgctggggtgattttctgctttatatttattgcggtactttttgtgtccttgggtttaaacgaatacaggttatgaaaacctaccctgccacattgtggctgctgcctttgtatctcacagatacacctgtttcatttgggcttcatcagtttcacgtcaagagttgtgactgaagcttaagtaaatatgtttattttgtgccggctgctggctggaaagtctactgtagcagctgaagggtgtgtgtttttttgggggggggcggggggggtactcttgctgggtgaaccatcattgtgacaggtaaatggaattcgtcaataaagcttgaattgcgtcccccttcatttcttccgagctgttgaatgtagggattgtcttgcttggaaccctattgattaggtcacagcctggtctgcagaaaacagagctgcccaggggccatctcactgcaggggatttgccgaagcccctgtgaaaggaccacatggggtccgcgattaccttatgaacaggaatcagttcagggagcagatacatattaaggacctattaacttctacaggcttctctttgacttgagaagcactggagagtgaagattccttcacacataatgaaaggaaattattgccaaagccaccgaaggtgcatcttgccatatctctgtgggtgcctctgttgagttgcaaatttatttcctgctggggcatctgcttagctttagaagtcccatttaaggtcatgaaaagggaatttggaaatgattacatagtgttggctttttttttttttttttttcagctttgagtctccatagcatttggacagaattagcgaactcccctcattaaaaaaatgatctttatttccaataaaaaggcagtatatagtcattgtagaagcctgggaaaatgtaaactactggaaaggagaaaacatgactaaaatttta

SEQ ID NO: 114170 - DNA, 1049 bp, Homo sapiens
ccaaagtgttggaattacaggcgtgagccactgtgcccagtccagaatttttatttaaatggacttgccgtatgttctttgacctctatggaaaatagccctgccataagttcttagttaaaagattctccaaaatgcatttgtgggtcctggtttgcttttagctttctattaatttttttacttgcctctttattcttagggctgcttgacattactctgtctcagacgtccgtgttcctcttatcacagtgcttggcacagggctggtaccgagtagctgcctgctcagggggtgttcatcttttcatagatcctgtgcatgtttgtcccatgatcctcttctttcgatttgttgcccagctgaaggtgtttacatatttaagtgaaaaaaggcgggtttgtcatgtaaataccaagttagtctgttggttgaggcaacaaaatggaaatcagttattttttaaggatctaaaaaattttaaaaggaagtgctttttcttaatagtgtggcaagctcatttagaagatggaaactgattaggaaagtatgaacatgagtaatatccatatgtggttttaattggcagaatgttgatttcagaaagaagtcacacgaagtttcatatctacaaagtatcaagattagagtttaaggtcagtaatttttaaaataagtgttctagggcctatggccgggcgctgtggctcccgcctgtaatcccaacactttgggaggtgaaggcgggcggatcatctgaggtcaggagttcaagatcagcctggccaacatggtgaaaccctgtctctactaaaaatacaaaattagctgggcctagtggcgcacacctgtagtctcagctgctccagaggctgaggcaggagaattgcttgaatctgggagctggaggttgcagtgagtcgagattgtgccactgcccttcagcctgggggacaagagtgaaactccgtctcaaaaatgtgtgtgtgtgtgtgtgtgtgtgtgtgtgtgtgtgtgtgtgttttatatataatacatattaaaaatt

SEQ ID NO: 114171 - DNA, 2031 bp, Homo sapiens
aattaggaggacaggagtttgaattccgtcgcggtggcagtcagcaagtcaagatcaggccagcgaaggcgtgggtgaatccaggtgagtgcctgtagcttcccttgtctcattggccattgaagagatggacaggtgtcatatttgtgtttgcagttgtaaaagtgtgatttaatcggtaaaaatgctgcccatctgaactggacaggacgttaattgttggaaggcttttcttgtggaaaccatgtttaagatggtggttaggtcccagctttcaggcctgcacgccaaagctaacgtgatttgtacctccctctgcatcgagttacatgaggccatcgttctcttgccttgtcctccttggtgccttggcatcagcagctgtcctcttggccatctagtacggggcaagaaagccagagtaagcttactcaccgtcccccttgccagggaactgttttttgtcctaaggatgtttaaggattgggtgttcgtaatttgttgagtgacctgtgtgtgtagaggtttaatgttcacttaatacctggtctgttctttccgtattacctaccgtgtacaactatgaaaattgaaaagattttaagctttaggtgttagtttaaatgttggagattttcttaccatttagttcccattgtttttactttttggattattttagttcgtagggctggatttgtcacgtttttatttattagtgtgtgttttgtgtactgttattttgcagttgcctttctggcatttttttttttttttcaaacagcagaccatgctgcttataaatagtgcatgctccatacaagacatagtgccacaaagcgcaatcttttctgtctttgttactaggaataaatggacttggaaagattgccgttcaagggcacatgcctgtacttgttgaattggcagttctccagtttcacagcagtgacagtaagtctaggaaactattcacatatatacttcaagggccagtcttatcaattaacttgccttgccagttcaacagtaccatatctcctcgaatatctgataccatgttgaactcggtccattgctaggcctccgagtggctcaacctgttgaatgggattctttagaatgtcttactcatttcatgttggggagagtctactaatacagtctttttagttttaaatcaattggttttttgtttttttttaataaaagttactcagctatttatgtagtttctgaagactgctttctggtttgtgataatttaaccatattcttatcacaggtaagctttttcttcttaatcatcatcagcatgtaattatagttaacgtttagtgagtacttgccgtgtacaggccctattttatggtctttccatagactgtctcactagattgtcacaattagtgagtaaaattacgtggtgttatactctgctcatggagttcatgtctgtgccaaattataaaaacacgacaaatgatggaaatatgatgcacgtcgacttagtgccattgaattttgaaatattctgttgcattttttaaaggaaagtagcgcgtgccagttgatgtagtttatggtgtgatgcgttaggaggcattctgacaatacagacgtgattcttgagctgaggtgttcatctgtcacggaatcctccttaacccgtttcactgtctcccatcgcacggggtccagtctctccgtggcggagccgcattgccctaacaggcctccctgctctcccatttaacatcacccgtgcttccctcactggctcctgtgcagccctggtccctcagcccctgccctgtgcagccctctacccctctgtgcctcgccgttttctgtctccctgcctttgggcatacagtggtcagctcgtattatctcataactctacttaataaagctttcttgacagccctcttcgttacgtggagctgtttcttatcttttatgtacttaaacatatgactgcagtatcactctagtgtaattgtttatttacacgcgcctttcctctag

SEQ ID NO: 114172 - DNA, 1945 bp, Homo sapiens
taatattgcgctaattaatatgagcctgtgcaggagtgctgtggctctggggaccaacaacctgtccacgtaactgtttgcttcttgtctttgacttaaagctactagtgttggttgagtattataaccaaatttttgtcatattttacctatttcaacctagtcaaatatgtgtatcatttatatacttttcacagaacagagaacctatccagcaagctgaatgaagttctattttaagatctttccttttcttctctttaaatctgcttaaattggaaacatcctctgaaacgtagttttctgtttttgtagaagtagaaattctatggactacctaaaaatctgtcaccaaacggacagtcctgttagctctgtgttcttagctccgtggtttgtacatgttctgcaaatggctttgcagcgagagaaagcgtagtggcagagtggggatggcgggcgtggactctgcaggtctcacggtatcatctgcccttcctggagaggcctctggatgttggtgaactgttctgacagatccatgccacgtgactgcccttccatgtgaggtctggaaggggagagggccatgtgaacaattatttggaaagtcggtctcgttagagagccagtttccagagctctaattaagattctcctcctcagattgctatctgtaaggtctacagtgaggattataaagtagatttaacaaagatgtttagcggagtaaagatctttgaagcatgtgtaatcccacattcagggttcggtctgcctgccatgcgtctcagcatccaaccccctcttctacttcagatccattctctgttgctttgttgtaagcttcaacaggttttcctgtaatttaagcagaataaaatctggagcatccctcttgtgggtgtgtggaataaatttggtgtagtgttcttagctgatgtgtacttagcaagttaattattacttgagcaccaatgaaatgctgcagctttttgttcatttttaaaactaagggaatgtctagaaaaatgcctggccagaagattttgtagaaattgtgaatagaagttggtgttgaagcagtgttgggttgaggtctgttccctgatgtgtgtattgcgtacaggacgccctggaatgtgtttgaccttcagtctagagtagtttggttctctttttggctgttaatgttagtatacaaagcagcccaggacgagtgtttccccttctgactctacttatttggggagcccgtgtttttcattaagataagagcagatctctaaacatattactgctgtgttacttttagcatcccaatcctggtttcaggattgaaatttacgttttgatgaaaagactgggaatgaattaatatggaagtacagccgttgtcacaacttaagtcagcattcatgaaatacaggaagggaaatgaggacatttttcttaagagaaaatggctgcattcacacgatggagagtgttggagcaccatccctgtgtcacctgtgtggaggccggctcctggcctcatgtctgtgtcacctgtgtggaggtcggctcctggcctcatccctgtgtcacctgtgtgggggtcggctcctggcctcatgtctgtgtcacctgtgtgggggtcggctcctggcctcatccctgtgtcacctgtgtggggtcggctcctggccgcccggcttaggtgcacacaggtgagtgcgtttctacagtgggaacggaacggaattccggcccaggctaacctgattgttgacctcagtcagggaaaatgtttctggagcttctgtctggttctgcagaactctgaatgtttcagctatttattattcattcaagttagaaacccttttcctcatataaagtaggatattttacttacatcctgggatccctgctcctgctgcacgtcctcctgtgacaggag

SEQ ID NO: 114173 - DNA, 1052 bp, Homo sapiens
gcactttgggaggcgcaggtgggaggattgcttgaggccaggagttcaagaccagcctgggtaacagcaaaacctcgttcctaccaaaaaaaaaaaaaaaaaaatgctggggtggtggtacacctgtagtcccagctacttgggaggctgaggtgggaggatggcttgagtccaggaggtcgaggctggagtgagctgtgattgtgccgttgcactccagcctgggcaacagagccagactatctcaaaaaaaaaaaaaaaaaaaaagttattttggaagttgtaatatattttttgtgcttctattaatgcaaggaattctttctctgttggttatgtgccactagcatatggcctatgtattaagtctacagactatatatcactatctaaaatacccataattagtttatttcaagagaaactagcataatcaacagcatttgataatcctctgaagagtagaatgtcttttttatcattttatctgtccagtataagttagaattttcaaatactgtttcaacatagaaaaataccccaaatttaacaactgaagctgagtcaaactgtttttgtaaaatttttgaagaacagttattcctactttttttccttctccaaagtaggtttcaaaagcctataaagaactgttaaaagttaaagttgagacaaaatggaaccaaaaccttaatttaaattctcttcatgactttgtatgaacactgccttttgggttttttctttcaagtgaagaagagtatttttattgttgctttttaaggaatcatttcgaaactagtatttttcacctacacatttaagagattgggatatttttactaccaagaaaaaaaaaataaggaaacaaccagccaaacgaggtggtgtcccaaaatagatttatggtattttccagaaagggcagtgccagacttttccagtagtaatttagtgggaggcggggaggtgttgggattgtgggcagtgtggttggtaagtatataagaaactgtgtgtaaatattgagatttaaaggtgagagagaagct

SEQ ID NO: 114174 - DNA, 3470 bp, Homo sapiens
ttttaacagttgcttatatttgccttaacgatttaaatataaaaatataacttagttgttacagttagtagcctttcatttgatactcatgaagatttttgagtcgtttaaatatgaaagagaggaccttgtcgttcaaaaatgaaaaggaagtttttgttaagcttaataattctagacatgttacaagaatgttgatacttatattggaaaacatgaaaaacatcccaaaccgttgcatttatttatattccatgtgtatggaaaatatttttttaatgagaagtttaaaacaatgtacacacttttgcttgttttatttccccaaggtaacgattctgatttcttctgtttcagattcccgacagttaagcaatggggagacatttggctttgctcctgcttctgctccttctcttccaacattttggagacagtgatggcagccaacgacttgaacagactcctctgcagtttacacacctcgagtacaacgtcaccgtgcaggagaactctgcagctaagacttatgtggggcatcctgtcaagatgggtgtttacattacacatccagcgtgggaagtaaggtacaaaattgtttccggagacagtgaaaacctgttcaaagctgaagagtacattctcggagacttttgctttctaagaataaggaccaaaggaggaaatacagctattcttaatagagaagtgaaggatcactacacattgatagtgaaagcacttgaaaaaaatactaatgtggaggcgcgaacaaaggtcagggtgcaggtgctggatacaaatgacttgagaccgttattctcacccacctcatacagcgtttctttacctgaaaacacagctataaggaccagtatcgcaagagtcagcgccacggatgcagacataggaaccaacggggaattttactacagttttaaagatcgaacagatatgtttgctattcacccaaccagtggtgtgatagtgttaactggtagacttgattacctagagaccaagctctatgagatggaaatcctcgctgcggaccgtggcatgaagttgtatgggagcagtggcatcagcagcatggccaagctaacggtgcacatcgaacaggccaatgaatgtgctccggtgataacagcagtgacattgtcaccatcagaactggacagggacccagcatatgcaattgtgacagtggatgactgcgatcagggtgccaatggtgacatagcatctttaagcatcgtggcaggtgaccttctccagcagtttagaacagtgaggtcctttccagggagtaaggagtataaagtcaaagccatcggtggcattgattgggacagtcatcctttcggctacaatctcacactacaggctaaagataaaggaactccgccccagttctcttctgttaaagtcattcacgtgacttctccacagttcaaagccgggccagtcaagtttgaaaaggatgtttacagagcagaaataagtgaatttgctcctcccaacacacctgtggtcatggtaaaggccattcctgcttattcccatttgaggtatgtttttaaaagtacacctggaaaagctaaattcagtttaaattacaacactggtctcatttctattttagaaccagttaaaagacagcaggcagcccattttgaacttgaagtaacaacaagtgacagaaaagcgtccaccaaggtcttggtgaaagtcttaggtgcaaatagcaatccccctgaatttacccagacagcgtacaaagctgcttttgatgagaacgtgcccattggtactactgtcatgagcctgagtgccgtagaccctgatgagggtgagaacgggtacgtgacatacagtatcgcaaatttaaatcatgtgccgtttgcgattgaccatttcactggtgccgtgagtacgtcagaaaacctggactacgaactgatgcctcgggtttatactctgaggattcgtgcatcagactggggcttgccgtaccgccgggaagtcgaagtccttgctacaattactctcaataacttgaatgacaacacacctttgtttgagaaaataaattgtgaagggacaattcccagagatctaggcgtgggagagcaaataaccactgtttctgctattgatgcagatgaacttcagttggtacagtatcagattgaagctggaaatgaactggatttctttagtttaaaccccaactcgggggtattgtcattaaagcgatcgctaatggatggcttaggtgcaaaggtgtctttccacagtctgagaatcacagctacagatggagaaaattttgccacaccattatatatcaacataacagtggctgccagtcacaagctggtaaacttgcagtgtgaagagactggtgttgccaaaatgctggcagagaagctcctgcaggcaaataaattacacaaccagggagaggtggaggatattttcttcgattctcactctgtcaatgctcacataccgcagtttagaagcactcttccgactggtattcaggtaaaggaaaaccagcctgtgggttccagtgtaattttcatgaactccactgaccttgacactggcttcaatggaaaactggtctatgctgtttctggaggaaatgaggatagttgcttcatgattgatatggaaacaggaatgctgaaaattttatctcctcttgaccgtgaaacaacagacaaatacaccctgaatattaccgtctatgaccttgggataccccagaaggctgcgtggcgtcttctacatgtcgtggttgtcgatgccaatgataatccacccgagtttttacaggagagctattttgtggaagtgagtgaagacaaggaggtacatagtgaaatcatccaggttgaagccacagataaagacctggggcccaacggacacgtgacgtactcaattgttacagacacagacacattttcaattgacagcgtgacgggtgttgttaacatcgcacgccctctggatcgagagctgcagcatgagcactccttaaagattgaggccagggaccaagccagagaagagcctcagctgttctccactgtcgttgtgaaagtatcactagaagatgttaatgacaacccacctacatttattccacctaattatcgtgtgaaagtccgagaggatcttccagaaggaaccgtcatcatgtggttagaagcccacgatcctgatttaggtcagtctggtcaggtgagatacagccttctggaccacggagaaggaaacttcgatgtggataaactcagtggagcagttaggatcgtccagcagttggactttgagaagaagcaagtgtataatctcactgtgagggccaaagacaagggaaagccagtttctctgtcttctacttgctatgttgaagttgaggtggttgatgtgaatgagaacctgcacccacc

SEQ ID NO: 114175 - DNA, 1024 bp, Homo sapiens
cagatggtctttggagtttaatttccataagcaaaggagtctaggcgataaggtcctttttagatgaaatggtgttggagtctctccccgcttcagctttactgtttgttttgcatgagagccacagccattgttttgatcagggtggtttttatagtgaaacctgaattcgtggttcttggttacattactgcacggttaacaatgtcttccaaaaagtgtattttttcatttaataatttattctactcacagtagcattctgttagccaagtttgcagagtacattcaggtttttcaaagatttcagttaggaatgtggtccacaagtccgtcccagctgtattgtgtcccgtgagaactgctgagtaggatgtggaaggtaattgcatgtttgggaatccagttggggatgagtgggtggtggtgggggctgtggtgggactgagcacctgggacagcatggggagagaacagccaaagcagtctgacgtgttggccatggtctgtgtgtcttaggggatggaacagtgccagagccttctggtggggggatggagggggaagcagcgtggcgcatcagcaagtacttttttttttgtttttgagacagagtcttgctctgtcacctaggctggagtgcagtggtgcgatctcagctcagtgcaacctccgtctcccttgttcacgcgattctcctgcctctgcctcccaagtagctgggactacaggcgcacaccaccgcacccagctactttttgtatttttagtagagacagggtttcaccatgttggccaggatggtctcggtctcttgacctcgtgatccgcctgcctcggcctcccgaagtgctgggattacaggcgtgagccaccgcgcccagctggattagtgagtatttatattatatagaactccaagttctaatgttaggcttcagctgtagaaaaatctttatttactcactgtttcttatcacaccactatgctgtggttccctttcctccctcagtggccgacatc

SEQ ID NO: 114176 - DNA, 1011 bp, Homo sapiens
gttctcaacctgaggttggttggatccatggatgcagaactcttatatagtgaaggccaatcgtataacttaggtttgatggtattttaggaggaatgttacgaggtgtttgagagaggttagagctgaaattgcagatttggtgcactgatccttcatgatttgaggcagagtagatgagatctttaagggtggtaataaatgcatgtggaggaagagttggaagacaagtttgtaatgccagagttgtaggtgagtcagtgtagagtataaaagagtatggaagagaatcaggagaatgttgtcattcatttttcatacctgtggattgcctctttgttttgggggactctgtgaccgaatgaaggatcaggagtgttggggaggggagtgagtggtgtcaaaggtgtcatgaaatcaaggaggatgagcactgagaaaaggtcattggtttgacattagcttgtgatgcgggaacggctgttctgccagggtggacctgcaggatctctgtggagcagcgtttggcggagagggagttctaaggaagccagggcggtgctgtgaaactccttttcttgcgatctttgccagtataaaaaaagagaagaataagagtgtttgtttgaaagaagcaaaggtttgaatgaagtttattttattttattttattttatttttttgagacggagtctggctctgtcgcccaggctggagtgcagtggcgcaatctcggctcactgcaagctccgcctcccgggttcaagcgattctcctgcttcagcctcctgagtagctgggactacaggtgcatgccaccacgcccggctaatttttgtatttttagtagagacggggtttcaccatgttggccaggatggtctcaatctcttgacctcatgatctgcccacctcagcctcccaaagtactgggattacaggcatgagccaccgtgtctggccaagcttattttttaagtaggagaagaacctgtgtgtgtgtatggattc

SEQ ID NO: 114177 - DNA, 1056 bp, Homo sapiens
accaacctgaccaacatggagaaaccccgtctctactaaaaatacaaaattagcggagtgtggtggtgcatgcctgtaatcccagctacttgggaggctgaggcaggagaatcgcttcaacccgggaggcggaggttgtggtaagccgagatcgtgccattgcaattcagcctggggaaaaaaaagaaaagaaaaagaagagaagaaaaatctttaaaaattatgcacaaactaattctgttttcattcccctgatcatcctctacctttccattgcctttagactttgctttgaggtccctttgaagcagtcgtttctttgaatgttagaggtggataggatcttagagattatgttttaacactttacccgcttgctttccacccaagtttggctgattttacgtagaatcaatcagccaaatcaaattagtacattattattgcattagattctgtctcagtggcataatttgtagcctaaaggacctgatttaatagcagggagccgtaaggctggatgtgctgtttaatctttatgagtgggatttgcgctagataattgttcttttgaccaaattatgtagaagttgaagccaaactctatcttttggtctcacttaattgttcagtttgcaagtgcttatttatccttagacactggagaagagtttttgaaatgagtgatatacatcagttaagatcaggaagttgccattttctcatacctgaggggaacttttcatttcaaaaatatattctgatgaggaatctgcatatttcactcttttaagttttttaagtcatcttttactgtaagtcccagatttaaatacattgcctgaattcttgcttaattccaagggttcattatgtatgtgaagataagtctataaagtaaaaataataaaggcttctatacactgcttaggaaatattagtcatgatttaatctgtatccttcatagaatattaaggttagagctttgtgataatctgcaacacagacactgatctggcattatctatagccaattttgaggcagcgtaaggtgg

SEQ ID NO: 114178 - DNA, 1045 bp, Homo sapiens
taagatctttttaaaagaaagagtttttggtccttcattgcctttaaaaaaaaatgctttcttttagagagccagctttctgctgtgtgttagatttttttgttcccgctgatgtgaattgcaaggctttggaaacaaggacgcaattgtatgagttaggaaagtaaactcataaatattttctatgcagttaagtttttttttttgtctgaactgtggtttcattaagtggcttttgttaagcaattcccgggtgcctgatagaggcgattttttaaaagtggatattaacagtgattattagtatgagaaaagattgaaaagaaaatgaccttcagatattcatttccttttcaaaagcagattcttaatgcttcgtatattcagatacaggtttcgatagtttaagaaggtatctgtgtgtgagaactaggtaatggtgatgtttttcacactattcttaatgagtttggttatgctgtccaacacatccagttgttacagggacgtttgaaaaggtgtttctccagttaatagttaattgtgatatttgtctttgtctttttgtcttaggaagacagctctgattccacagttagaattattcctttgtatttaagatgtaaaaatacttaaagcactatgtaattttttaaaacaacaattggtataagccttgagtgatgctaaacatggcatttaacaagctcaaggtaaggtttgatttgaatgaagtttgcatttgtataaccattttttgaaaaatgaacaccttaaatgagccaaattctttggcactctggaaagaagtgtggttgttagaggactttataaaatcatttcgggccacctgtatattcatttgtctcttttgaagtatccccgttgggttctcatcatgttagtagatcatttaaatccatggtccggacaggtgccaacagaaaaatgtttaaaaattatggccgggcgtagtgcctcacgcctgtaaacccagccctatgggaggtcgaggcgggcggatcaccggaggtcgggggtccga

SEQ ID NO: 114179 - DNA, 2432 bp, Homo sapiens
agcaaaaatctggcaggcgacacatcgcgacgaatttcggctgcagaagaggaagagcatcacctgcagtccgcggcgtgggaaacgccgccggaggggctccgcgagccggggaagtgcgcgcagcggggctccaggcggctccaggcgctgagtgcgaggaacgcccgcgctcgccggcgcccgggagacgcagccgaaggaggagggcgggcgtttcacccgcgccacagctgcggccggccagagagaccgcagaggccgggacccccgcagcctccacggccgctgctgccactgtcggggtggcgcgcccagccggagaatcccgtccgcgcccggggcggggggcgaggcggggcgctgacgtcacctcccctcccccaccgcctccaagggggagggagtggggaaagaggcagcgagtcgccgcagccggcggccgcaactcctcaactcggcggctggctgcctgggcacgtcctgacaaacttggctgctcccgggccctcgttccggccccgcgcactctcttttcgcctgcgtttggtgcttaagtttgccctggtcggaagcctccggagatgcggccgcctgggtcccggcggcacggacgttggcactctggttagggacatgctgaagatcccggggaggcaaagttggtacttcaaacccggctcttaacacatatctacaccgcgaggggatcacggagctgccgaggactttagagcccagggccgaggactcggctagactggtgagttctttgttcaaatcgtgcatgccttttggcatttaagtttaaacgttaatgaaattacgtggggtgtgtggctctaagcgagtgcggggaagcgtgtgcgccctacgggttctcggctccaggagctgcgcatccctctggctttgtgcggatcggcgatgaaagattcgtatgcatagctttgggagttcataaaatacatatagagcactgttaaaaagaacttgagaggcgatgctgtttgtgcattattttgaatgtaacttattatagcaatggtgcctagggagggcgcatcggggccgcgagatttgcaggggcgcagcgccctctagtccgggcacctggcgaggcgcgctccttgcagggttctgtgcggaggcgaacctggacctccccggcgctcggcgacgtgggcgcttgctcaccccagtcttcactgaccacccacccgggcccattctttatatgagttacaaaaatcagcttgggtggactggatgtagaggccgtgctggaggaaagcgttttgtttctggaaccgtctccccaaccccctccctaatttccacgagcctttggggacagggttagggagggtcgattatttaaaggacaaatgtggaacttgaaccacatttctctctctcatataaaataattcgatttgtggtagctaataggcatgtccatttcgttctgttggcgcttaaggatcagtagaatcgtggcagagtcctaagtctgaaatctccatccctggctctcggcggctcctgtggcgacgaagtgcaacttcttccaggcagatagatttctcagggagcctggaaaatcgggattcccagacagatgtaaaacatctagtaagccctaggaagcgttattacttattaattaatggtaatcttctccaggaattctcttgtgccatttaaaaaaaatcccgtgattttacgtcagggaatggtatctttgtactttttttactgttcttcttttccccttttagcattactcccgcttcctcgctcccaggaaacggctggagttccggtgtgtttgggttttgctgagatttacaattcggcaagcggcacaagccggttgggcttggagatcaggtcacccactttcgaggtgttccatgtatgaaattgacctgtaagcacttggagcaattatggccgggacaaacacgtctttggatgatggagtttgcatttgctggatgtgtgaatctatgtgtattccaactggtgggcagggaatatagggctacgaatcggcacactcatcttgcaggcattatttttccttcccagccacaacctgctagacacctttattattattattttttccggtcacctctaagatggcttataaggtgactgcgttaactttgaacccaggaaattctctttcacacttgactgccctgccgttcccctccccgccaagctcccctcaccagtcccagggaaatcggatctctttgtcttcccagtgttaaaatgcctgagtcccacaaactttccgagatcaagtccgccctcttgtccgggctgcgtcccagcgcctccggccctccgggcttcggccgagtccgccctgcgccgagcctgcggctggagccctgcccgcaccggggatgggctcc

SEQ ID NO: 114180 - DNA, 1062 bp, Homo sapiens
aattttaaatttagtataaaatttccaagacccatttatttaatattccattttaggatggcagagattctctccttgactgaaatccagccagcctcctctgagctctcttctccactagggcccgaccttggcctatcaagacttgaacaaacactagcacagtttcccacagctgaaggccgcaaccctcaggtgaccccagtcccccataagtgcctgcctgagcaaactcaaggctgccaaaagaatttactgtttgttccagcccacacctgaagctggagcccctgcttcccagcctctgtgtgagggtaggagcctaacgttaactcatgtccagctttggcaaagagtacattttatttttatttgctctgtcactagggcatccacattagccatagtgctgcaggatttcacatttcagaaaatctcaagcaaaatgtaatcatagctcctgtgaattgtgcatctgctgtgacccagacattgtgctttcctttactcccacccattcctcatcacagccctgcaaaaagaaaacaacagcaacaccgtgcacaggccaagtggcttggtgatagggctagtacacggtggcggagactgcggacccagcgtggcacatcacgggatgtatcattctgctcagctcgtcaggctggcctgcaccagtgagcgctttgtgtgctaccaactgtcataattattgagctaaggagctcgataattatcagtggagaaaattccaaggctgatcatattagagctttacttaatttttgatacctgattgccgacagttttgaagcctgacctctccctcctcctctttgctcacatctgcgcaagctgatgagaatgtgtgggctgctgtcttttggcacccacaggaaggctctgccccaccagggaaccctcaccccagccccaccttcaagccaccacaccagtctcctttcctggctcgttcaagacatttttggatctgcctgggaattgctccctgatctccccaaaagctctcattatgtgagaaataaagcttttcctgttctc

SEQ ID NO: 114181 - DNA, 1110 bp, Homo sapiens
atgcttccgctattacagatttttgtcaatcttctccttggtgttaatcagtcatcaagagggctttaaagaactacaggtcccagagcaacccaaaccctattgaatccaaacccttgggagtgggtcaaggaatctgtaaagggaaatgtcgtccaggtcatgccagtgagcagccgagtctgtgaatggctacttcacatgcgtgctattgattaactgagaataattcagtcccaatgtcagaccatgctgtgcatctacatgttgacacaaaatttttctctcttaagaaatggagatatgtgctgcattctatcaatttattatctggaaaacctattcaattcatggatattgtcttgatctaggcaatctgtagtgcttgcatttaagagttcttatttttcataagctctttacttggttttgaaacatatctgctggtgcaattatattttcttgcttccagttttctgtgagaaatgtcatgagagaagaattttgttaattataccacctttacactgtcagcatcaccttttgggataaaaattgtaatagcagtcagagcagatggtaatgaaaaagaaagagtgacttcttgagaaataaaagaaggaaccaatttatatgtgctttgctctcctgactttaaattttaaaatcaacagtataaagcacaaaagagattgcattttgcaacgacattttttcaagtgatacatacattgggctggtgaaattacatttttatgcaatggaaaggcattttttatatttaacttttagtttttattgattcttgggtagtttattgttaagcttttgtatatttcctagatacaccaagtaaaaagtgtgtgtgtgtgtgtatacatatatatatatatatatatacctaaatttttattttattttattttaaattccgggatatatgtgcaggatgtgcaggtttgttacacaggtaaacgtgtgccatggtggtttgctgcacctatcaactcaacacctatgtattaagccccggattcattcgctatttatcctaatgctctccctccccttgtgcccccaacaggccccagtgtgtgttgctccactccc

SEQ ID NO: 114182 - DNA, 1111 bp, Homo sapiens
gaaagatccttgaaaaaagaaattagaataccaatgggaccgatagtcatagaatcaggtgacatgcaacttatctagaactaatttgagaaacgccttttgttgttgatatttatttagccaacatcatagagtgccttttggggtgattaagcactttttggctagtcacagatgcttatcatcaccatgagatgctacccctagtacagttgccttcgtattaatgactcttattttcatacgtgtagttaacataattataccaaatgtgaagatcccatagcagttttataacaatatttgttgctgacatttattaagcagttattatgagataggtactatataatttcatttatttatattaacctgccttatttatctatacagactcatttatgcatttagtcatttagaatctaggcagtgtctgacacatggcaggcactctgtaaatactaatgaaattaagggtttaattaattctgtttacctaaattcaactattttaaatttgcatctgtcctcttatcttaatggttgctttaaatgtgttttcttttccctgacctatgaagcaaagtaatacaagaaattaggtaaaatattgtatttggcatacctgatacaacattatgctattacaattcttgtgtttctagtctgtagatcaaaagggcatagcctattacccaagataaattgtctgtataaaagatgtgaaaagataacaagaaattttatgaaagctttgggtaatcatctttttttttccacctcactcttcattccattataaccagtaagtgtccattaagttttgccgcatcagacattttcagtgtttaatgactgttataaaagaggcaacaatacatcagagaacaaacattggagaactggaattccataaaaagctgagttgttgctaagtaaaacacccagtaggcaaatcattccttcaaccgcagtgccagacattaggtcctactttatgttggagcttcgagaaatcttccagccaggggcagatacatcaataagcctgaagacatgtctcttttttttttttttttgagacggagtttcgctcttgttgcccaggctc

SEQ ID NO: 114183 - DNA, 1014 bp, Homo sapiens
ttaatgcttacactgggccatcctgagcaaatcaagttattcattcagtctacttctggaggatatttgcagatggcagtctattttttcaccccaaatttccttgctacttcccccgtagtattttgtttcctataggaaataatttaaaaagaagaattttctctattttgttaaaaggccctcaaagtacacgtcggattggaatcatgaatatctatcaatcaactctttcatagtccatttctgcagagtggatcttctctgacctattccatgctatatcttttggttcaatttagtatctatacttcattacacacttgaatagctatttaatcttgcacaaacacccatatggtgaggtttgaaacctggcacaagagataaaggcaaataattactatcctcacttaacattttatcttcttgccatttaaaacctttttgtagaagtgctgataatctggatgattaaatggcttaggtccttctgatagatttttatggcctggactcaacaaaaacttaggttttaaaagttcagttgcaattttatctgaaacctgaagatagtttcttatacctgcaaaaaatgaactcatatgaaatgaaaaatatgaagtgatgttgtagactgagcacgttattacagactctgctcacacaatggaagtgctaagaggaaacatgaactatttttttaaaaatggctgagaatgccacaatcatgcctccttatttgcttcctgtaatacaattattttactgacatatgttcaaaatgtcctctttaacaatcattttggaatactgtttaaagcatatcagaagtagagtggaaagtgtattaaacatggaggaagggatctgtgtcacaatccagattccgatattgattagctctgtgatcttgaaaataaaaatcaccttgctgaagtctgcatgcctctttgtgtatgcgagtaatcctcaaaacaggcaagctgcagtggctcatgcctggaaccccag

SEQ ID NO: 114184 - DNA, 1035 bp, Homo sapiens
catttggtctgaaaagtcattttgatttgcttagattttaaaaaagaacctgagatgctaatatagactaaaacaaaatcagctgctatttaaaacacaacccccaaagtcacacatatctaaatatgcatctattttttacaataaaaattataacttagaggccgggcgcggtggctcacgcctgtaatcccagcactttgggaggccgaggcgggcggatcacgaggtcaggagatcgagaccatcctggctaacacggtgaaaccccgtctctactaaaaatacaaaaattagccgggcgtggtggcgcgtgcctgtagtcccagctactcgggaggctgaggcaggagaatggcgtgaacctgggaggcggagcttgcagtgagccgagatcgcgcccctgcactccagcctggacgacagcgagactccgtctcaaaaaaatatatatataacttagaggtgaaagaaacctcagaaaatcattgtctaccctttgccttttggtggtttggtggtggtagtacttcctttgtggctgtgaatgaggagggggtaagaagggaataaatgagaagcttgaatttttttcattgttgttgcacagcttcatcattagtactggctataagaaagtctttcatcatagaaataaatgcggaaaaacgctttttaggaatcttgcccttcacctatgaccgcttgtattagtcactttgtgctgtaaccgaaaccctctgttgatttcttcttcacactgcacgcggctgctaggcagctgaatctctgctgggctctgcgtgttttctcatgtcagggttcacactgaagaagaaacctctgttgtgactgaggcggagagacacacttacacacacacacacacacacatacacacacacatacatacccacacatacacacacacacacacacacacacacagaggggaagcagtaagcatgtaatcacatttaacccagatagaaacaattacccatttacaacactattattaactgtttggtatgt

SEQ ID NO: 114185 - DNA, 1244 bp, Homo sapiens
accagcctggccaacacggtgaaaccgcgtctctactaaaaatacaaaaaattaactgggcctggccaacatagtgaaatcccgtctctactaaaaatacaaaaaattaactgggtgtggtggtgtgcgcttgtaatcccagctattcgggaggctgaggcaggagaattgcttgaacccaggagtcagagattacagtgagccaagatcaggccactgcactccagcctggacaacaagggcgaaactccgtctcaaacaaacaaacaaacaaacaaaaaacacaaaacaaacaaacaaaacaccaagtaagcagcaatctggtctgagaggcggaaaatctgtattttttggaatattcctcatgtgttaatatatgatattgttgttaacttagtgtgatgtttactgaaagtcgcaagtcagcaataatagatatgtattgagtggccactatgtgtcaggcactgatctaagcacttgggaagcatccacaaatacccctttcctcccggaacttattaatacagtcaaatagaaagcatttgtttccaataaataaaaatgataagtgtaacaaatcagtaaatgatgtgataattaggtgatacgcacatacctgctatggaagaaggaaaacaatagaacatgatcagagcaattgggaatttaaaatgagttgtaattttaaacaggatggacaggttgagtcttattgggacggtgcatttaagtgacaatgtgaagcaggtgaaggaatttgccaagttgatctggggaaaggaagtcctggacagtgagaagagccagtgcaaagccagtgcagagagcgtgccaactttgtccgaggagattgaggggcagggcagcggcagattaagttaaactggtaatggggagggaaagctcctcaggccttgtgtggactttgtcttttattctgagtgatgctgagagacagcatctgatttaggtcttacctggatcactctgactgctatgtttagaacagtctttagggcaaaaaggaggcagaagtcactttggtggaagtgaatgaggtcagatgtgggatatgtgcaaacttcaggtaactaggattccataatggattggatgtggggagtgagaaaagcagagtctaatatgacttccagggagtttggtctcaggaatagagaagaatgaacttgtcatcaactgaaatggggaaggctgcaggtttagggggaaagtcaggactg

SEQ ID NO: 114186 - DNA, 1170 bp, Homo sapiens
aaatgtgggttggaaatagaaaagaaagccagaaatcatttgaaatcatgcagataatgaccacatcttccaccagtgggtcacagattggctttaaactttgtagcagcaaactcataaagagaaaacggattagttacatgcttcctaacatccacaagataacaaaaaatccttattgctcgagacaaatgtcactcctttaagaatcagaagaaattactcctggaaatttgccatgaagagaaaattgtaatgtactccacatgcttgaaaataccttctgagttagtgagagtcctcaacaggacgaatgtgactgggtcatgtattgtaagaacaaataggctggtggtggcatgtggaagcctggatgcggagaggtcaagaagcttctgtaggatactagtacagttcagcgccggtttccgattctcagctgatctagctgatccaagagtggattttaggaaaagctggaagaatatggagattgctttaggaaagcagcatttaagtgaagcctggagagacaaagccaaaactgcataaaagcagattgagggagtgacatgagcaaaaggggggaaaagattctttgactggagcaaggtcagtcgctcgatgtggtgaaagccgtggttctcagcacagcccacacgttagaatcacccggaatgctccccgcagagcccagaccttagaatcacccggaatgctccccgccgagattctgactcagtcggtctgggctgggtcctaggcataattattttatttttattttttatttttttgagatggagtcttgctctatcacccaggctggagtgcagtggcgtgatcttggctcactgcaacctccgcctcctgggttcaagagattctcctgcctcagcctcctgagtagctgggattacaggcatgcaccaccatgcccggctaatttttgtattattagtagagatgaggtttcaccatgttggccaggctggtcttcaactcctgacttcaggtgatcctcctgcctcggcctcccgaagtgctgggattacaggtgtgagccactgcacccagccataatttttaacagctcccaaggtggtcctaaagtgcacccgggaatggggatgctgggccagcactgtgttccttaagtgtggacagtgg

SEQ ID NO: 114187 - DNA, 1043 bp, Homo sapiens
tccctgtacgatatgcatctttccccagtcttatccccagagcattttgcccccaacaaaatagcctagtgaggaatatgactgcatcccaccgacctcaattatcggcctacggggtgggcgttcaggccaaccagggccagccagggcttttccgggcatctttcttctgtgttgcttagctgggagactgtaaatttgttgtcaccagcactcgcttttcctgtcattggaaaaagtcaatctacataaagccaagcagagatgtgaggtggatgcaccagataacagctcctggccatactgaactctgccttccaagcctcgatttttggcagggcttcttccagttttgtgagcttcatcagtattccttttagtcctgcaaaccaaccaacttccattctattgcttgaactggtttaatgtatatttctatcctgcgctgtctaaggagtcctgaataatatagaaaggaagcaaagatggaaaaaagagcatatagaattgaccagcatgaaggttattttgttataactagagtagctaagtattgttactagcttcttagaatgaaggaactataagttgagattataaataactttaaatccagtctatttattgtggaagatggcatgcaagaagctgtacataaccgtcaatacagagacagtgttcagaattctcaagtctttttgccccaattaaagcaccccagtcatgcattgtaataagagatgaatactacttgaatattgttattaaggttccagtaattataatgatcgaaacaagattatcataaaaatttctcactgagtgtaggacacgtcacctgggtgggattgatcctaggctccagcaaagttaatccagctcctttgcataatttgaagatttcaggacagctttttgataaattgttcccttgtgtagtaacattctctctctctctctagctatatatatatttataaaatatatgccaatcaataaatatttgagtctttatctgaaagtaggagaaaagcttataggct

SEQ ID NO: 114188 - DNA, 1032 bp, Homo sapiens
tagctaggactacaggtgtgcgacaccacgcccagctaatttttgtatctttagtagagatggggtttcaccatgttggtcaggctggttttgaactcctgacctcgtgatctgcccacctcagcctcccaaagtgctgggattacaggtgtgagccaccacacctagcggattaccctttcgatagaccgtgttgaggaccgtcttgcctggagcaaggatatcaatgcttacaatggtgaagaatccacagaaaagttaccttttcgcatcatccatgataagaatcgggaccttttcatcctgttgggcatgctggatccagcggagaaggatgaaaaggacatgcctgtgacagctcgtgtggtgtttgttattggtcctgataagaagccgaagctgtctatcatctacctggctaccactggcaggaactttgatgagattctcagggtagtcacctctctccagctgacagcagaaaagagggttgccaccccagttgattggaaggtggggatagtgtcatggtccttccagtgattcctgaagaggaggccaaaaaacttttcctgaaaggagtcttcaccaaggagctcccatctggcaagaaatacctccgccccacaccccagccttaagtctcttggagaagttggtgctgtgagccagaggacatccgctgccaatcatgttttcctgctgcaattccatgaaaacatcctggtgtcatcacaccaaggtttttaggttgctatactactggcttattaaatgaaaactggcactaaaagtttcttgggattctttacactctgtcttcaccagcattcaattctgttcatacatcagcactctctactggttctctttgaaatatgttctgtatttaaaactcaaatcttgttggatctctgcagggcttgtgaccaatgaggtcatatttgttgatggttgagaaagcttgcttccctccatcagagaatgactatccctccatcagagaatgactatcaatttttttaactgtcc

SEQ ID NO: 114189 - DNA, 1057 bp, Homo sapiens
tccgctaatgttaacatcctacacaaccaatgtacatttatcaaaatacagaatcaacaatggtgcaatcctgtcaaccaagctccagactttatttggtcttcatcatgcttttccactcatgtactttttatttcttctaggatttgatccaggaggccattttgcatttaggacacagctaatgcacagatatgaactccacaatctcattccagttctagcctagaaagtataatttacgccttgcgatatcctcgctaatatcaccctttctataaaatttaccaccctcccattccaagtttataccttttacaagactcaaatcaagaatcaccgcttgtaagaaagcctttctttcagaaacttcaatattatcccttcctacatggaattacttggcttttagggatgtattttatatcatatcatcagcctttagatgtcttttgtatccataatgtggattttaaaccaatactttaaaatgcacatctgtccaggaaaatatcattgaggcacattggagcctccaggttttacaaggtctatatagtctaaatagggaaattgtagaactggttattgttttatattatgtctgaaatgatgagaacaaatgatatcagcctgtaaataatacaggttccaccttatttgggcaaagaaaaaggtataaaataagcagttgtgggacacacagttatgtatagttttcttttaattttaggatttaaatctatgattttcattataagttggaaccaattagtgggtagtgaccagcattttgtaatggtcagaaaggtttgaaaaatgtgtttatgtgtgtaattggaaatggatcaatatgagtaaatatgtgagcatcagggactcaaaccatatttgatttggaacttaaatattttatcttcttcttttttttttttttttagctgaaagaatccaccaaatgtgccttagaacaggttgacttaggtgatgtagtcgatataaagaaaccagtgcagcccctcagctcttcaggcatgccgtgctgtcccatccccag

SEQ ID NO: 114190 - DNA, 1384 bp, Homo sapiens
acttattcctgtataaagtttctttgtgcctcggggttattttaaaacgcaaatgaaattataataacagtaataataactattttagaaatttgatttcagataaaatgagactgtgcgtgtattcaatttatattagctaaatcaaatagaaataagctgaagctctaataatgaaataatgttttacaagtttaaggttaataagcatttatagataaggcatgttttcttacaatattccgttcccagggctcctggactgaagatcgaagttcttcccatggcctacggggtcccagagtctgggcctgcatagcctctccacactcgcctccactcatctcaggtccttccataactattccctctcctgtcagggaggctctgccgtccacgctgattcctgcagatcagggaaacctcccctaacttcccggctctcctatgtggctcccacagcaccacgcacctctccttcattgtgctaataatagctgcattgtgacacttacaatcatgattatttggctggtatcctctgactgtctttatttacaatgtggatattttgttctctataaattgttgcgttgattttgattcttttacatgccaggttaaaatattactaatactgattactgagggtgttttgtttacaagtgagttactcacctcaatctagttcttaccctcctgttctgacctggccattccgcattcaaaccccaggaggccaggaatacgtatccaccagggcctagaacctccgcctgtgtaggggagaaactcaaatctgtatagagtgaattaatgcatatctatagtttttgcattttaagggttttaaggaaaatattgatttgtaacacagataaaatggtcgaaatacaagtgttttaagtgaccatgatgttactggcagaagaatcactatgactaaaattccagcaatggacaacactttttctatgcataacctctttgtggtcaatttcaagacagcccacttctgtttcacggtttaattggttctcgagctcatttaggagaaattcaatttcctttgagctgagttcatatcacaacagatgagttcattcgttttggtttcttcttcaggcccatggaaaggaaagctaaacgataatgggagcaaaaataatctatggaagaggtggagtgtgaaatgtaaaattagattttctaaacatgctgtctctaatgcccaaacagagccacacccaagcgatcaaatggaatcagtggtaggggaggcgattataaatcaatctagtttatgggatgcactgtgtgaatggttaagggagtgataaagggtggtttccgacaacccaaagaaaggatcctcggcttgagc

SEQ ID NO: 114191 - DNA, 1437 bp, Homo sapiens
agggtaaatgtgattacacccacgcgtatttgttcaacagacatttattgagcgctcaccacgtgccaacgccgggcgtctgggctctggaggcgctgccacgtggcggatgcgcagtgcccggcggccgggctgaggggtgaacgcgggggtcagggggccccgggctgagggtttgcgtgcgggccgggtgcctgggggccccgggctgagggtgagcgcgccgcccaggtgccaggcggctccgggcagagagtgaacgcgcgggccaggtggctccagggcggcgccccagggcggggccggccacgccctccctaaccctggcggagctgatgggtggctgtagcctgattagaccgcgtcagtccggagggtgggtcttgggagggggcgcagggcagtccacgtttccactgcagtttctcctttgttttacgtttgggaggaggtggcattggaaatagcagagtgcttcgcggtaacaggggtgagtcttgtttcatggaacttttttcaaatggggagaagggggttgtgttgctcactacttggaatgtgtcggtcaaaggggttagatagtcagggaggggaagcgtgttctcatcctgggaccaggccggagccggcctcgccgggagacttgtagccctcgccctgcggtgacccgtggctggccactggcctcaaatgttgaaaacgggcagatgggcaagtaatacactctcaagaaagcaagtgtctggcggtgatttcctaaattgcattttttattttatttcaaaacttcatgtaaatatgtttccttacaatatctggctaagtcttttctatattaacatgcttacattgtgatcaagacaccagtctcttccctttcttttcctctcctcttatctctggagatggcaatacccccaactcaaattactctagcaaaaaacctaggagactctttcttttcttttttctttttttttggagacagtctcgctctgttgccaggctggagtgcaatggcgcgatctcggctcactgcaacctccgtctcccgggttcaagggattctcctgcctcagcctcccaagtagctgagattacaggcgcccttcactgcgcccggctaatttttgtattttagtagagacggggtttcaccatgttggtcaggctggtctcgaactcgtgacctcagatgatccgcccgcctcagcctcccaaagtgctgagattacaggcgtgagccaccgcgccgggcgagactcattcttgattcctgtttcccttccgctcttcatccaatccaccggcgagctgcagggcgagggggtggttctttctcctgttttcccgctctccctgcatttcatctcctctgccgccatctgctccaaacccctggcagcccttcgcgggattcccaaatctaatagattt

SEQ ID NO: 114192 - DNA, 6302 bp, Homo sapiens
agtactttgagaagccgaggagagcagatcacctgaggtcaggagttcgagaccagcctggccaacatgatgaaatcccgtatctactaaaaaataacacaaattagctgggtgtggtggcggggcgggggggcgcctgcctgtaatcccagctacttggggcctgaggcaggagaatcacttgaaccccagaggcggaggttgcagtgagctgagattgcgccattgtactccagcctgggcaacaagagcgaaactccatctcaaaataaaataaaaggacacaaaaaataacattagtagcatataacatatatgtattacatatttttaaatacattttaagaaatcttaaacttttcccctacagttggaacacattttgtttttattatatgtatttgttttttaccaaaagtaaatgacatgcttctgttgaggtgttttttttttaatgtggttattttaattttcatccaacaacttttacctttgcctcttttttaaaggcatataatttttcttcctacagaaagacatcaggacaataaatagggagatcttttctcaggcacacaattgtaacattaagtaagagacttttatagtcaaagcaataacatattcatgctataacttttataacgtcattgctgttaaatgtttaaggaaatgataggaaagtcttcagggccaagctaccccgtgcctttattttggcatggattcctaaaagtgggagcaccattaatttcatgtgtcttattctctggatccccattttttagaacaatgagtgggcacacgatggcccatgggccagtctccctgttttactggaacacagccaccctcattcctttatgtgttatctgactgcttctgtgccgtgctacaacggcaaagttgaatagtttcaacagacaccacaggacccacaaagctaaaatctggccctttgcagaaatagtttaccaccccagtctagaaagaacctggcgtgtagcaggatgcaacatatacttgtagaatgaataaaaaggtaataaaataacacgagctcacatagcggccagcatttgctgtgcaccataatccgtgctaagcactttgcatgcgttatttaatttgaatttcataacagtattacataagaaaacaatagggccaggcatggtggctcacgcctgtaatcccagcactttgggaggccgaggcaggcggatcacgaagtcgggagctccagaccagcctgaccaacatggtgaaaccccatttctactaaaactagaaaaagtagccaggcgtggtggcgtgcgcctgtaatcccagctacttgggaggctgaggcaggagaattgcttgaacccgggaggtggaggttgcaatgagctaagattgcaccactgcactccagcctgggcgacagagtgagactccgtctccaaaaaaaaagaagaaaaagaaaagacagtattttgctccctcaccgccttcaggcttttaaccaactgccacttaccaccctagtgaaggtttgcccgagtgccctatttaatattgcaggcttctgtttcctaccagcccctttgcttactctttcacacttagtcaccttctaacgtggcatacattgcttattttctatgctcatgagtatgtctactccatggaggcatagatgtttgtatgcctgtttactgatggatcacaaactgtgtagcctaaaatagagctagcacatagtcccacccaacacgtgtcaggtgagcaattagatatagagggttccaataacttgtggggacacccagataagatctgtttatgactcatgtcttacacagagctcattcttggtctcttggttagtttatcagagaagacaaatgtattattggaaaatgtgtcttaggtcattttttgacagtggctctaatactggaatctattttaactaaaggttattatcataaagcaggtgtttgctgaagacagcttactcagatcactactgcctggaggtggttgatatatcctggtgtaaaccttcaagaagggcacaggcaggaaaacatgagccagcaactgaagaaacgggcaaagacaagacaccagaaaggcctgggtggaagagcccccagtggggctaagcccaggcaaggcaagtcaagccaagacctgcaggcggaaatagaacctgtcagcgcggtgtgggccttatgtgatggctatgtgtgctatgagcctggccctcaggctctcggaggggatgatttctcagactgttacatagaatgcgtcataaggggtgagttttctcaacccatcctggaagaggactcactttttgagtccttggaatacctaaagaaaggatcagaacaacagctttctcaaaaggttttcgaagcaagctcccttgaatgttctttggaatacatgaaaaaaggggtaaagaaagagcttccacaaaagatagttggagagaattcgcttgagtattctgagtacatgacaggcaagaagcttccgcctggaggaatacctggcattgacctatcagatcctaaacagctcgcagaatttgctagaaagaagccccccataaataaagaatatgacagtctgagcgcaatcgcttgtcctcagagtggatgcactaggaagttgaggaatagagctgccctgagaaagcatctcctcattcatggtccccgagaccacgtctgtgcggaatgtgggaaagcgttcgttgagagctcaaaactaaagagacatttcctggttcatactggagagaagccgtttcggtgcacttttgaagggtgcggaaagcgcttctctctggactttaatttgcgtacgcacgtgcgcatccacacgggggagaaacgtttcgtgtgtccctttcaaggctgcaacaggaggtttattcagtcaaataacctgaaagcccacatcctaacgcatgcaaatacgaacaagaatgaacaagagggaaagtagtcctccaacaggatgaagcagattaacagaagagtgatcagtgacaaacatgcctcattgattattgtttctaggaaggaatttctaaatcaatattgcaaccccaaaagcggttataatttggtgttactaagatgctcctacactttgtgataccgttttaaggacatggtgcatttttttttcttttatttgttttatttagaactttttttatttgttttatttagaactttgtgtgttcttaaagtgtgcttccaacaggaaggtcagtgataaattttcaaaagcataaccttcaatatattatctgttggattattggatataagacttattttcatgtactataaatatgaaaataactttgatttttaattgtgtagtttccatttcttagcttttgccttttaaatttatacttcagccaggcatagtgactgatgcctgtaatcccaacactttgttgggaggccaaagcaggaggatagcttgaggccaggagttccagaccagcctgggcaacatagtgagatcctgtctctacaaaaaaatttgtttttatttgtatttatatatttttatttttgtttttgttggtaggcgtctcgctctgtcacccaggctggagtctagtgtcgtgatcttggctcactgcaacctccacctcccgggttcaagtgattctctggcctcagcctcccaagtagctgggactacaggtgtgtgtcaccacgcccggctaatttttgtatttttagtagagatggggtttcaccatgttggccaggctagtctcaaactcctgacctccagtgatctgcccacctcggcctcccaaagtgctgggattacaggtgtgagccactgtgcctggccccccacaacatgtttaaacttagctaggcctggttgcatacgcctgtgttcccagctactcaggaggctgaagcaggaggatagcttgagcccaggagtttgaggctacagtgagctgtgattgcaccactgtactccagactggataacagcaagagcccatcttttaaaaaaagtaaaaattaaaaatatacttcatggttcatgtcatagccctagagaatgaaaaatttgcagtagatagtcaataaatgaatcagtagttaaatattccttaaagtcaactgtatttcattgtgatttttgttttctttttatcattgtatcaaactatatggaaatcatatggttagatgtgattatttgataatgttagtccatttgaatccattttagatatttcacaattaaagaatatgaaacttcagaaatatgccaagtctgtattttaaaaaatcaaagtctacattgaaaagagataccatttatttgttcttaaaacttagcaaaattcaacagactgatgttcggtataggtgagatatggcgggaagttgggcttacgtgtggttggataagggataaactgtcacagccagtttggaaataaattttgtaattgtgctatattcgtttttgagctgccgtagcagtactcccaagctaggtaacttagcagaaatgtattgtctcggttccagaggctagaggtccaaaacccaggtgttggcagggttggttccttctgaggctgggagggaaggactggcccaggcctccctttttggctttaagtgactgtctcgtgttcacatggcattcaccctgtatccccacatcccttcactctgcctgtgtccgaacagggacaccagtcatgtgggattatcacccgtgctgatgacctcatgttaacttgacaaactctgaagaccctaccttcaaataaagtcacattctgaggtactgaggttatttgtactaatgtacaaagggatctgttcaagaatgttaactgaatagtatttttaatagtgataaacccataacgtaaatgttcattaaggggatatgggctgcataattcatgccacttttgttcaacagcaaatgtgcaagtctccttcagggagagggtcacagctggaggcaagccacaaagaggaagtttcttgttactaacagatgagacgggatctggtgtattttcttgctgtggaaggaaattcagagaaagtagttacatacggataaagggagaaattgtctgaaggtagctgatctaatgtaggggttaactcatttttatcattattaagtgaatccctgattggaatcatctcataatggccaaaaatatgctgccatcaaacttgaaatgcttatttgattttaagatttaagacatctctggaggtagtgctaagtgtaccattaatttaatggcttttcaggaaataacaataccacactaagtaaatatatcaaacttaagattaatcttgatttctaaaatgccaaagtctaaaatatgtctttaaaacaagtaaaaaaaatcaaaggcttacattttgacgtcagtatgagctaattgctactatggactatggaaattacttcttaatttggtctagaatttctagtatcatttttacaggaatgtgggtactgagtgaggaacactgggtacataatccatttgtaagtggaatttcctccaaatcaaacacctgagtatagaacttgagatgggaatttggtatttgatcaagatgacaaagcatattctcagctagttttgctttcgtagcactgtgtttgatttgctcttctgtgggtttctacttcagagatgaattagcacagagcacctctgaagaccaggcaaaaggcaggactgaatagcagccctcaaggccagaggaagtcaggggcagggtttaggctgcaagctggagagccgagatgcagggcaccgagagggatggatggagatgcttcttcctgaaccatgagcatttctaaaaggtagatcagcctttacatagcgggagccagtctccatccctcttgctgttctcagatggctgttcctgttcagctcttttctagagctgaagggtccgaaactccctgttaacaactctaaagcttaaatgtgtaagaaacagcaatctgagaaaatgcttgtgtatctggatcccaaggcttagttaaatcctgactgaggaatagggtgctacttagctagcttcctagctgttcttgtttttgcttttcttccaaaaaggaaccctaaaactgctaagaatgtaagaggatgcatgtggatgcaatgtggatgtaagatgcatgtggatgcaatggaaacaaaaaaaaaaaaaaaggaaaaggaggttagctaatgaggatat

SEQ ID NO: 114193 - DNA, 1797 bp, Homo sapiens
attcctacttgttcaaatcagttgttttataccgtgcgatatgtgcacagctctcccagtgatatctgactcctgtatttcaccacagctacaatatacatttgtggacataggatttacagaattctatctgaaagcaaatttgtcaggttgttatattgttgacaaatactcttgtttctcagatcattttttgctggctatatgcacgtgcaggaatctgtatgtgcttgtgttttaattacctaatgcactggctctgactgaataaattgcatgattacctcctacactggacacagaacagtgcaagtcatattaaaaagccattatatttgcaactctgagcaagagactataattaaaaggcagttggatgaaattagctttgagagtacaagagtttaagcaagatttggtaaatgaacattaatggttaacatgtggtttttattaggtcttttgcttcttctctccataaccccggagttgaatttcttagatgtcagtggaccagacatgtgagaacacctgtacaaagctatactttaccatgtggctaaaattatattcataaaacaagccaacataacttttgtgactttagtaaatcaaaggtattagactagaatgatcccctgggcattaataaactattcttaatgctcctaagattttagttatatgtcattaaaagcatactgtgtgctccatgcaacttaaaatgtttgtcataaaatacacatatacacgtcaaagaagtaataaaacttgagggcattttaattattctcaccgttaaatataaaaaagttaaagttgtatgcagtatgtgtaatagcatcccattcttatctgtttgcagactgttgaggactccgcatggtagtgatatttttgtagaggggaaagctttatggagtatgtgtatgtactcaataggtcttacacttaggcagattaaagatgcctgcaaattctggccgggggcggtggctcacgcctgtaatcccagcactttgggaggctgaggcagggggatcacaaggtcaggagatcgagaccatcctggttaacacagtgaaaccccgtctctactaaaaatacaaaaaattagccgggcgtggtggtgggcgcctgtagtcccagctactcgggagactgaggcaggagaatggcgggaacccgggaggcggagcttgcagggagccgagatcgcgccaccgcactccagcctgggcgacagagcgagactccgtctcaaaaaaaaaaaaaaaaaaaaaaatgcctgcaaattctttgctacttctcccagtgagagtaggggtctatttccttccccttgagtttgggctggtctgtgactgctttgatcagtacagtacagtataatgtaaatggtgctgcaatggttatgccaattccaggcttagtttgtaagaggccttgctgtcttggaaacctactgctagtttgctgctgccttggaaaccaactgccgtttaagaagcatgactaccccaagaccaccctcctgggcacaatccaagccagccacaggcagaggccctgtaggataagaaatcatgtggagagagaagctaaggagcaatgaggtgctgggcttgcaagtgaagaaggcgactggaaaagccatctagcctggatcaccccaggtgacgccacaggagttggtccctttccaagtttctaacccacaaaatgatgcacagtacaaaaagattgccttaagccgcttaatttcgggttagtttgttatgcagcaatgaattacat

SEQ ID NO: 114194 - DNA, 1611 bp, Homo sapiens
actaaaactcagtctctaaagattggtggagggagaatctccacttgggaggaacagtttttcttcacggaaccagttctgaggctgggcctggtggctcatgcctgtaatcccagctctttgggaggccaagatgggaggattgcttgaggccaggagtttgagaccaacctggacaaaacagcaagaccccgtctctacaaaaaaaattaaaaattagccaggcatagtcccagctactcaggaggctaaggcgggaggactgtgcaaactcagaagttcgaggcggcactgagctatgatcacaccactgcaggccagcctggatgacagagccggaccctgtctcaagaaccggtcctgccacctgggtgggtcaccttcttggaggaatatcattaattgctgtcaccacaagcactgtccttaaagggccatgctgcacttcacactctgacccaagcctgagcacctagctctttctttatttcttagtaaaactgagatgaggttggaacatgtaaaggcctctattaacggcaagaaaataataccgcttggattctcaggccacaggcttaagagaggtgcacctgtttcaagatctagagttaagaggctccaatggttcatttctatctgagacctggtttaggtttctggctgggatctaccttactcagtattctaccttacccggtatgtctcactgacctcttcatgaaagtttatctccacgcattgtgtgacttcacatttcacttaacacgctaacaacgtaaacggctcaacagccccaaaacgtagataagaaatgaatacattctttatgaactttttctgtaaatctgctggcgggattaaagtattagatagagtatttaactagaagacccctctaaagttacccaagatgggaatagagaatgaacaagagagagaactttgcccctggcaaggggcagttttgcaggctttgtaacccatcgtaaagggttagaactttgccttgtagtcaataaaggaagcatagaagggattaataagcaagtaagtgacatgatcaaattcactctttagaaaattcatttagggtgcagagttaaagatggattgggagaaggaaaagatgaagctgttgccataatctagaggtgaggtgacatgtctttctggacttagtttccagcacaggcacagagcacagtaagtgattatagatgtttgaatatatgcttgactagacaaagctaaaaggatttccaagcagtagtaaacatagaaaagtgacagatgcactaaacttaaagtcagtgacacacaacaatcaaaaggtaaatacacccatttaaaatgggcatagggcttgagtagacatttcaccaaagaagacagaaaaacaaccaataagcacgtgaaaagatactcaacattattcatcactagggaaatgcaaatcaaaaccaccctcagataccatttcacactctcaaggctgcctataatcaaaacaagaagtattagccagatgtggagaaatttgagccttcattcgctgctggtgagaacgtaaaacagtttaatagttccttagaatattaagcatcgtta

SEQ ID NO: 114195 - DNA, 1067 bp, Homo sapiens
gtgctatatgtgtttaatattgttatttttattactatcggttttaagggattaagcagctgttgaaaccaatgagactacttttttttctttttctttttcttttctttttcttttctttttctttctttcttttttttttttttttttttttttttttgtttgagacggagtttcgctcttgttgcccaggctggagtgcaatggcgcgatctcagctcaccgcaacctccgcctcccgggttcaagccattctcctgcctcagcctcccgagtagctgggattacaggcgtgcaccaccaagcccggctaattttgtatttttaggagagacggggtgtctccacgttgaagctggtctcgaactcctgacctcaggtgatccgcccacctcggcctcccaaagtgctgggattacaggtgtgagccaccgcgcccggcaagactactctttaatacacgcacacacacacaaacacaaaacctggaaaaatgtgctcaaatagtttgttagtactttatataacaactgaaaattctttggatttaatcaaaatggcatatttgaagtaaaaacacctatacctactctctcaagcctcttaggtagaaaatatttgatagaaaggaaattaattggattaccaaaggacagtaggtgaccccaattacttttgcttttaattataaaaaaagtctgagccataaaattggaaaactcttcctgtaatgaaaaatgtagagaagtagtttcacaattttacattttcttttttttttttttcttttgagatggaatctcacgctgtagcccagactggagtgcattggggcgatcttggctcactacaaactccaactcctggagttcaagcgattttcctgcctcagcctcccaaatagctgggactacaggcacctgccaccatgcccggctgattttttacttatttatttatttatttttatttttaatagaggtggggtttcaacatgttggccaggctggtctcaaactcctgacctcaggtaatctgcccgcctcagccttcctaagtgctgggac

SEQ ID NO: 114196 - DNA, 1059 bp, Homo sapiens
tttggtcataattctatacattttcatctgttttttttcttttcagatggagtctcactctgtcgcccaggctggagtgcagtggcgcgatctcagctcactgcaacctccgcctcctgggttcaagcgattctcctgcctccgcctcctgagtagctgggattacaggcatgtgccaccgtgcccagctaattttttgtattttcaatagagatggggtttcaccatgttagccaggatagtctccatctcctgacctcatgatccacccaccttggcctcccaaagtgctgggattacaggcatgagccacttcgcccagcctttcatccatatttttaaaaaatgcattcataatgtccaaaaactccaattccaactagttctacatcctgcaagaccccctttgaaccttccaacccagaccctgtgtctttcccctctttctccatctgacacactgataagactgtcaggttgtgtgcttatgacagagagcctgactctgtcaaagctctaaagctttgttcgatcaacaggattttcggatgatcaatctttcaaggagcccagcagtcaacatttctcatcttttgagcaacaaattgcaaattcaccttcacctattctttctcctttcttctgtcttgcaataaaccaattttttcctaccttgtatttcctccaaattcctgagggcttttaggaaatcctcacctggagatcagggcttggcaaactttttctgtaaaaaactaggtaattaatatcttagactttattggtcgtactgtccctcttgaaactaactctgctgctctagtgcatacacagccaggacagtgcttacattaatgcatgtggctctactcttccaataaaactttataaaaacaggggccacagtttgcctacccctgctataggtgattcgttttctcttttcaatattgaaactattcctcaatcaggaccttctaaaattaacttttaaaaagctaatgtaggccagacgtggtggttccttctgtaatatgaacacttcagcaggcccaggca

SEQ ID NO: 114197 - DNA, 2002 bp, Homo sapiens
atgagtagctgggattacaggcgcctgccaccacactcggctactttttgtatttttttagtagagatggggtttcaccatcttgaccaggctggtcttgaactcctgacctcgtgagccaccgcgccacgttggatgaaggtgtttctaaaccttccttagctcattcatctttgttttattcttcccgctcaggtagactgtgtccctttccatatcttatggactttttcctccatgaggtccatattgaagttcagcagttccttttcctggaccctcccaaattgcctctcccgtatctgggcctgggacttgtgcccactcagtgggaagcccaggtgtgttagaaatcatgtctctggcattggcattggtgaactcctaggttaacgagggttttctctcctgataggacatttaacattggatcctgaaacagctcatccctgcctggcactatctgaggacctgagaactatgagattgagacatgggcagcaggatggggctggcaacccagaaagattggatttcagtgccatggtgctggctgcggagagcttcacctcagggaggcactactgggaggtggacgtggaaaaggcaaccaggtggcaagtgggcatataccacggctctgcagacgcgaagggcagcacggccagagcttccggagagaaagtcttgctcacggggtcggtgatggggaccgagtggactctctgggtcttcccccctctgaaaaggctcttcctggaaaagaagttggacacagttggcgttttccttgactgcgaacacgggcagatatcattctacaatgtgaccgagatgtccctcatttacaatttctcccattgcgccttccaaggagctctcaggcctgtgttttccctctgtatcccaaatggagacacaagtccagactccctcaccatcttacaacatggtccttcttgtgatgctactgttagcccttaatcttctgtgtgtaaaatccaagaccacgagacaccagaaagttggagaacaagactttgaaagaatttgtgtaaactaacccaataaaaagcgttccaggagtaggagcctgatttaatatccagagcctttgcatttgtgtaactgtcaacacctgtgtgtagtggaagaggttgcacttaacctgaatcatgaatgataataacggggagatcctatgctaatgagaaaaaatgcatatgcatcgtaagcttggggaattagagaagaaatacagtctggggtccttagaactaggttaggaacttgatgtatttctgaaaacatttgcagaatcaggtataatcaggaatgaaagcgggactttagatatgagcatgccaccatgcggaacaggtgtccattactgacagtgagtatcaggacttcctaaagtgttttattccaaatagagaataataatttatatagatattttatgtggataagaaggagttgtggaaaatgtgaatatttttaaattttcttttctttttcttttttttgagacgaaatttcgctcttgtcgcccaggctggagtacagtggctcgatcttggctcatcacaacctccccgggttcaagcagttctcctgcctcagcctcccgagtagctaggattacaggtgcccaccaccacgcccagctaatttttgtatttttagtagaggcggggtttcaccatgttggccaggatggtctcgagctcctgacctcaagagatccaccagcctcagcctcccaaagtgctggaattacaggtgtgagccaccacacccggcctacctctctttctgataggaacaatttgatttattagaagaagcccgacaggtaatggtttgaatcaggtaagtaataccgatgatgcctggtgttcaccctcttctttctctgtttggtggtctacaggcaaatgccttctcttacatccttgctcagggatggttgtataatgctgagaaaataagtatctac

SEQ ID NO: 114198 - DNA, 1109 bp, Homo sapiens
ccaggttcaagcgattctcctgcctcagcctcctgagtagctgggattacaggcacccgccaccacgcctggctaatttttgtacttctagtggagactgggtttcaccatgttggccaggctggtctcaaaccctgacctcatgatccgccggccttggccacccaaagtgctgggattacaggcgtgagccactgcgcccaaccgaaaagcaggtttttaaaaacatggttgaattaatctataggagaagttaccgaactcttgttcctgaacttgaggttgttgaatagtaacgaagaaatgcttctgcagagactgggccgtgtggggagagagaacatggagaaactgaaggagagtgaagccagggcttctgaacaggtccgcagcctcctaaagctcatcgtggagcttgagaaaaagtgtggggaaggcaccttggcattgctcaaggtaagatgctgggaaaaagaaaataaaattcattccagtatttgagaaatgagaagtggacagtactcattaggggttgctgtcagaacacaatatccaatgatcttcaaccacaaaagaaggctacatgactttctttcagctgccaaaagctttaggaatggtcatagctttgtgggatagtgtggagctgcttcatgagatgaattctcaccttaaaattatcagcagtaagttagggttgagatgtgacacaatgtggttaatacctccatgcaatgaaatattctgtgatcataaagaataaaacagctctataggcactaacagtatttcaagcactcattaagtgaaaaagaaagatgcagactgctttttgtttgatctttggataataagtatatatacacacacatatacatgtgtggttgctaacattcacagactttctggcaaaaaattaataaatgtatagtcatctgtgataatcttgaaacaagggtgagattatctgctatgatctgaatgtttgtgtccctccaaaatatatatgttgaaatcctctcccccaaggcgatggtattgggaggtggggcctttgggtagtgagtggggcctgggggcagagcccctgtgaatgggattagggctct

SEQ ID NO: 114199 - DNA, 2089 bp, Homo sapiens
ctgctcactgcaacctccacctcccaggttcaagcgattctcctgccttagccttccgagtagctgggattatgggtgctccccaccacgcccagctaatttttgtatttttagtagagatggggtttcaccatgctggccagtatggtctcgatctcctgacctcgtgatccacccactttggcctcccaaagtgctgggattgcaggcgtgagccactgcgcccagccttccttgtctttatattggggttagagatggaaagaatacattgtggtcagtgtaagatatatatatctatatatagatatagatatctatctattatgacgtgtgtgtgtgttgttaatctatcatgtttaacctgaagtctatcatgtctatatgaggaaggaagaggaacaaaattttaaaaagatgattgagtctgagtatagtatgagactccggttgttgaatgaagagtgtgagcagaatctccagagacagcaggaatgcatatctgacttgaacctgagagaaacccttctgaatcaagcgatcaagcttgccaccgagctagaggagatgttccaggaaatgctacaggtgagatattgaaaacaacatcctcatatttgagaaatgagaaaaagaagagctaaacattatgtcaattccaaaataacatagccagtgacaaccacacatgtattaaatgaattatatacctacctggcaactccatttctatgaatttatcttgacatgcatataaaaagacataaataaagcacaatatacctataaatatatttgtacacatattactgtattatgcttcaaacatacttacacacatagaaaaagacacctgggtaaggcaacactgaaactgagtttcagtttagagccatggtttagaattcacctttcttttttttgagacagagtctggctctgtctccaggctggagtgcagtggcgcaatctcagctcactgcaagcttcgcctcccgggttcacgccattctcctgcctcagcctcccaagtagctgggattacaggtgcccgccactacgcccggctaattttttgtatatttagtagagacggggtttcaccgtgttagccaggatggtctcgatctcctgacctcatgatccacccgcctcagcctcccaaagtgctgggattacaggcgtgagccaccgcgcccggcctagaattcacctttgaagccggatgaatggagttcctatctgagccagctgtttactggctcctgggtggcctacgacctgctgcttaacctttgacttggttcctttagctgtaaactggatataacagtgacccctaatttataaaattattgtgagatttgagtgagataatctgctaaagcttattaaatcgtgtcttgttcatgttaagcagttgatgagtagcagatgttacaattataacattcatagcaagaggttagaaacaccctgtatttgtcaatagaagactcacaaaatgtgctccatacatacatggaagaatactcttcagcatgttaagatgatgtcatggctctgtgtatatgaataaggaatgttctccaagaataaagtaagttgtcagattagtaatcaaatataataaactatcacttatgtttatgttttttccccctaaataacatactcaagttgcgtatgtgactacgcagtatatgtaaagtatacttggaaggataaaaagaaaattgatatcagtaacgtaattatttatttcttattagttaatctatataccttaattttaattgatttcaagttaatgaaaaaatagggaaccttctgaacaaacagccacagaaaaaacatgaaatgttttaggtgcatattaatgtgagtaagggctgcgtgcacacacatctgtattggcttaaacatacataacagggggcaaagaatcaactgtctcttgagaggaatcctgcttcagcagaagaatatcatggccttgcctaattatgtctgttcctggggtagcaggcagaaaagcagggtttttttttttttggttttggttttggtttttttttttgatttggag

SEQ ID NO: 114200 - DNA, 1847 bp, Homo sapiens
gcggagcttgcagggagccgagatcgcgccaccgcactccagcctgggtgacagagcgagactccgtctcaaaaaaaaaaaaagaggagctgttttcccttatttgcttccccattccttctgttgcatgtgttttgtcccagctgtagtcccagctactccggaagctgaggtgggaggatcgctggagcctgggagttccagaggctgcagtgagccgtggtcacgccactgtactctagactgggcaacagagcaagaccctgtctctcaaagggaaagtattttaataactttttcagatacttgtggtttttttctgtaattctatcaacgaacctctttcgcactctgttacctcactctagtcctgaagttccttcagtaattagcgcgatgcctttagagcactgttttcccctgaatgactcgtaagtgagtgctgttccttgtaattaattttcagcctattgctcaagattgtcagaagacctgagggaaacccgctggtcttagaacactggcctaactctgtcttttccccaagcaggcagctgccagaaatttgttggatttgaggagtccagagcgccgacccgctctgtctgcgtggacttatttccttggatcttcgtggactctgaagttgccaagtgtgtgtgcctgctccagaaaacaaaggaagccaccattttttctcattcacagtgcagggagatacctcagtagaagcatacagtccagtcttcaactagggacccctaccaggatgtccaaaaggctcagccctcagttacagcacaacatcacagaagatgcctattgtgaaacacacctggaaccaacacggctgttctgtgatgttgaccaaatcacactctgcagcaaatgcttccagtcccaggagcacaaacatcacatggtgtgtgggatacaagaggctgctgagaattacagggtaagagtcactcacgcaaatcccaaaacactctggccaactcctatatggatgaaatggacagacattctggtcctccaaaaccattaccttagttgatgtttattacagaatattagataagttcgttgaaccttcaacctaaaggctaagaaaatatatactcagagttgttggctgtttaaggtcaggaatccaactgttctaaatcaatgatctcacctggaattctgtgctttctctatagaagttattccaggaaatattgaacacatcgagggagaaacttgaagcagctaaaagcatattgactgatgagcaagaaagaatggcgatgattcaggtcagtgagtgcttatcttgattcttggggggaaattaccagtaatgttgttagaaaatagtgtatcataaacaaagtcaaaagacaaatcacaaagcaggaaaaatgtgaaatctataggaaggaaaagtgctaatatcttaatgtataaaaagctctttaaagtcagtaagaagctgggtgtggtggctcacgcctgtaatcccagcactttgggaagctgaggagggcggatcacttgaggtcaggagtttgagaccagcctggccaacatggtgaaaccccatctctactaaaaatacaaaaattagctgggtgtggttgcacgagcctgtaatcccagctactcgggaggctgaggcaggagaatcgcttgaactgggaggcagaggttgcagtgagccgagatcacactactggactccagcctaggccacagagcaagactccatctcaaaaaaaataaaaataaaaaaagtcagtaaggaaaagactagaaatttaattttaaaaaacgatcaaataagagtttgcagaaaagaaagt

SEQ ID NO: 114201 - DNA, 1017 bp, Homo sapiens
gtcgtatcccagccgggcactctggctcatgcctgtatccccagcactttgggtgaccgaggcgggtggatcacttgaggtcaggagttcgagaccagcctggccaacatgggaaacctcatctctactaaaaatacaaaaattagccggaaattgcttgaacccaggaggcggaagctgtagtgagccaagatcgtgccactgcactccagcctgggcaacagagcaagactcggtctcaaaaaaccaggacaaaacaaaaacagtcctgtcccctttgttagccacatcaccttcaccactcgccccaggctggcatactctcggcttctgggtgggatgagtatggctggtgccaaacaaggctgtatttgttactttggaccaaatctgcggcaggagactaccacctcctcccattccagaaaagaacagctggaggcgggggtgtgctggttgtggtcccagtgttatcactcatctggaaggtgtggcttctctctggctccttttctccaaggctgctccattagaagcaggggcttggctctcactggtttacttcccacagctctaagaggtccagaagtcatgttcaactgcttcttccttgcttaagaaagcattaaaacttaagaatcaggccaggcgcagtggctcacgcctgtaatcccagcactttgagaagccgaggcaggcggatcacctgagttccggagttcgagaccagcctgatcaacatggagaaaccccgtctctactaaaaatacaaaattagccgggcgtgggcgcatgcccagctactcaggaggctgaggcaggagaatcacttgaacccaggaggtggaggttgcagtgagccgagatcgcgccactgcactccagcctgggcaacaagagcaaagctctgtctcaaaaaaaaaaaaaaaaaattaagagtcaaacattatgggggccgggcactgtggctcatgcctgtaatcccagcactttgggaggccgaggcagttggatcac

SEQ ID NO: 114202 - DNA, 1035 bp, Homo sapiens
acagagtctggctttgtttctcaggctggtcgcaaactcctggcctcaagtaatcctccccgccaaagtactgggatcacaggcgtgagccacggcgctggccctgttagaacatagagctagctttgtcaatgctttttcatcagtagtaggtagaatgtagggactggttaaatgttacggtgattacaatcttgaaagaaagtaagtggtatcattactgccaaataacttcttctttagcctgtaactatttcagtgcgcattatgattgtaactagaaacaatggaggcaggagccaggcctacattttatctattattctatctgcttagtgcaaaagtccctgactcctaatccaggatttttttttctcagagggttaaaaatagttttctttttaaagatttgtggactgggcagacaattaatggtacagaatccccacgcatattgtgggaatgaaaaaaaagaagacaggatgcagagttctaatggcacaattggcaaacagagtaggaggcagtctctaatagcatcataaacgaaaacagcccccaaatacctaggaagagctcttccttgtctgtaacaagctttgtttgaggaactaatagtaaagaatgtggttacagaaaatacagtggtgtctgccaagcacctcggcaaatacaaatccacactggagaaagagacgactttgtcttccgagatacctgcctgactcctactgctcagccacgcttctctcccacacgcacccccagtaatgactccagaggtcaagttctgagttctcacgatggcaggagaatcagcctgtcaagacggtcacctcgattaaccacacactgcaaatctgaggactccgtgagggaagggctctgttcctatccagggtttaggcactgggattagagttctccagaaagacacaatcagtaggataggtagagagatgcatgagaggaggtgtattaggggaactggcttatgctattaggaggctgataagtcccaggatgcgacacacc

SEQ ID NO: 114203 - DNA, 1103 bp, Homo sapiens
tttactgtcacacatagctgaagctagtacattggatacattgactgtcctaaagttaagatctggaagatctaacatggacagctgagcatgggatttatttgagtttgggataactcatgggatcattctgagttttttggcagtgatggcgaggggaggtggcttaggaacaggagataaagctatggaaaaagcagtgttaatcgtggaggaggactcagactgtctctgccttctagactatgtggctttaataatgaagagctgcaacataaaacctgcgaaccaaaagcattttcttgaaactgatagttcctgaaaagagagaggatagaaggaaaccgctatttctatctaagtcctgtgtcccatggacagtttcatttgattttaatcctgtatgggtaagccttggtcttttcccttgactgctccaagcttggaggtgcagtacagtgatagaacagccgtgaatccaggccagctcgcctgcgccactgctgacttcgcctgaaaattctctcatccattcttaccatcttgctgcatgctcaggccttctcaaaaccaccttggggacgttcttcatcttggaatggtgcctgtgaacaaagatggagttattctgtttaggtaatgctaagaaaaaaatttgttttccttactcccttccctcactggatacctgcagtaagtaggccatcccttagacacaggcagatagagaagaggcactgtggtgggcagaaatatgagaatgcccccaggattctcacccactagtacacatacactttctcccagtttttcaaacacatactaatctgggtgctggccaggagcggtggctcatgtctgtaatcccagcactttgggaggccgaggcgggcggatcacaaggtcaagagatcaagaccaccctggccaacatggtgaaaccccgtctctactaacctccaaaaattagccaggcatagtggcgtgcacctataatcccaggtactcaggaggctgaggcaggagaatcgcttgaacctggaaggaggtggaggttgcagtgagccgaaatcacaccactgcactccagcctgggcaacaga

SEQ ID NO: 114204 - DNA, 1085 bp, Homo sapiens
tcagtgactaaggagataaagaaagaggattagaagtggattcttcaagcaacgcctacatcttatgttgggttcaggaaacaaatcaagccgggcgtggtggctcacacttgtaatcccagcactttgggaggctgaggtgggtggatcacctgaggtcaggagttcgagaccagcctggtcaacatggtgaaaccctgtctctactaaaaatacaaaaattagctgggcatggtggcacatgcctgtaatctcagctattcgggagactgaggcaggagaattgcttgaacctgggaggtggaggttgcggtgagccaagatagcaccactgcactccatcctgggcgacagagtgagactgtatctaaaaaaaaaagaaaacaaatcaagaattctgttctaactcaaaattattttattagaccaaaatgatagcctcaacacaaacctagaatagctttgacacagaacttaacctagaaagaaaatatactcggtgaggattttttcatgagaaagtagtaaattttacccttcccctacaagggtgaaaccctctccctgaaccaaagttctttagaagatacaaagtatttgttttccaaaaattcaccctacttgtcactatacctgttcacacaagacaatgaactaaatgtcttcacatgttcagtgaaatgagcacaaattgctaccagtttcagtagttttacattttattttaagaattttcttattttaagaaaacgtggaatgcttcacgaatttgggtgtcatcctcgcacaggggccttgctaatctctgtatagttccaattttagtttatgtgctgctgaagcgatcatggtttccgtttttttctgaccagattctgcataagagaagcctcctgcaggtattgacagattcttgcattttctttgtttttctccacttcctactcattcacgagaggtttcacgtttgactactggtagttaactgtgtaatccacgtggttgaagttcgttccacgaagttagtggcgtacccgctctcagtcttacagaggctaacaacaggtagtcacagattgttacct

SEQ ID NO: 114205 - DNA, 2461 bp, Homo sapiens
gtgaactctaaggcagcagatacccagggtgcttctcctcagcacccaccacggaactgacctcccaccacatgatgctgatgcttcccttcctatgtgattttttggtatttcttttgcagcctgcttgaagtgacataatgaccagatacgtttgtgaggatgctgactgggatttggtcagaggccccggtaggcccactgaattcttaccgtacatcagtgacctcataacctttcaagctttctattcatgaagctcaaaacacccctctcagtaacatacacacatcacttgatagattttgcattttcttggctcttaatatactcaaatgcctttttcatttaaatctagagtttgatctggatgaaataatgcatttttccatatataggcatttctgctacgtgcaatgtattttcctaacaaacaaacaaaaagacaccccactctgccagataatgtattaaaataatagtgcttccgtaagagttagagtggaacactcaatccctatacaactcaaaccagatgcttacaaaatgttaacagcccttaaaaaaaggccacatatagagtcgaggacacataaacttctaacaacgacaaaaacaaaaatacagggtaactattgaatctgctttttttggaagtgaaagttatttgataagaaatttgggaaagggttgaggctgccgagttagggtggccaggacaagaggcacataggaacagcaaaatcagcatctctatgacagagtatctggtcaaactgagccaagaagagtgtggtgtggatggctgtcgtgatctcatcatagcagagagatcaccccactgagggcttgctgccttggctgcgttagtgttctctgccttcgactgctcttacttacaaccaaacttcagtgtgccagggaaaggacatgtttgaatcaacatgattttcttgtcatactaaaacaagtcctttactttgcattatagaaacatgttatttttagccctacagttgatttctaatcctcgtaggacaattcccaaggatgtttaagatctatttgaactttgagtttcacctgccttctataatcatgacagtggagactccccattctacatattctttctggacagttacctgtgatctagtcttcagctaccttctgtatgccagaacttcatctctagtttaggtccctctgttcgtcttcaggctcataaggatgtacatattgatcactggagctctctatccagatattgtgcaggacacctcaaagtcaaggtgtccaagatgaaacatgtacatatatatacaccattctctccccgtgtcaaaggcaaccacatccactcagtttttcaggaatgccagtattgtctaggaaagactatctgcgtcatatttctatagttaattactaagttttagctatctaagactttttttttttttgagatagagtctcactctgtcgcccacgctggagtgcaatggcatgatctcggctcactgcaacctctgcttcctgggttcaagcgattctcctgcctcagcctcctgagtagctgggactacaggtgtgtgccaccacgcctggctcatttttgtatttttagtagagacagggtttcaacatattgcccaggatggtcttgatctcctgaccttgtgattcgcctgcctcagcctcccaaagtgctgggattacaggtgtcagccaccgtgccctgcatgtctaagactttatacaacattaaagtccacttatctctatcccactgccactaccccagcccagcttctagctgagaactgcaaccaaatatcaagttttgtgacagtgtaaactattttgatcccaacctgaagccagtcaaaataaataaataaataaataaaaaataatctttctctgccaatctcttgtttaccactttggtggatatatatttactttggaattaagtacacattttttagatgtgcaaggccctgcctattttctcccaaataacttttgctgatgaggagcttgacttactcctccttccagtcctttctacgtaataatggtgccctctgagccttcttgttccttcaaaccctattaggatggaagaagtgacgcttgagtagaatccttaactatttctttgaaactgtttctggctttggtgctttgtgtactcactacagccattttaccatagtttctagatcatgactgtccagtgacttttctgactcttccatgaggatagtttccttgaggcaagaactcgctatattttctggcctttatatagtttgggtgctcacatttggccaaattggtgtttacactgtggtgaggagaagctgcagcctgtgaccctggactcactgaagactcctcgttaatcaagcggccatccttattcggaagagccccaagcatactcacctgttca

SEQ ID NO: 114206 - DNA, 1025 bp, Homo sapiens
cctggtgtgatggctcacgcctatagtttcagcgctttgcgaggccatgacaggtggatcacttgaggtcaggagtttgagaccagcctggccaacgtggtgaaactccatctctgctaaaaatacaaaaattagccaggcatggtggtgcacatctgtaatccccagttactcgggaggctgagacatgataatcgcttgagcctgggagccggaggttgcagtgagctgagatcacgccactgcactccagcctgggcgacagagcaagattccgtctcaaaaaaaaaataatagtaataaaagctattattttaagtatacattcatgtaagactgctccataatttcagagtatatatttgacaactgttgcaaattctctttcctagaaatatataaataaggtgaaaaaagcaataaaaaaggaaacatatgagtagaaattcatacttgggaaaaaatagacacactcccccctgcccacgcacacacacatatatcctgtatttatctacctggaatatacttcggtataagttgctgggtagagatcaactgaatttatttttccagatgactccctgactttccctaaactgtgtgttgagtaacctatcttttccagactggcatgaaatgacagatatacagaggacccttgaacaacctgggtttgaactcctcaacatggacacttatacacggatttttctcaataaaagtgacaccaagaatgcctgcctctcctgctcagccttccacttcctctacctatctggcctctgccacccctgagacagcgagaccagccctcccacccccacctcctcctcctcagcctactcaaagtggtaacgacaagggtgaagacctttatgaggatccgctttcacttagtgaatagattttctcgtaataacattttcttttctctagcttatttgataagaataaaataatacatgtaacaaaaaaatatattaattgactgtttctgttattgataaggcttggtcaacagt

SEQ ID NO: 114207 - DNA, 1934 bp, Homo sapiens
cacccgccatcacgcccggctaatttttgtatttttgtagagacagggtttcaccatattggccaggctggtcttgaactcctgacctcaggtgatccacctgccttggcctcccaaagtgctgggattactggggtaagccactgggcctggctaactttatttttaaagctaggctttcaagcaatgtatttttcaaataagctcccaactagtccaccgcctcatcaacaaataagcccttactgtatctataaagttcatttttttctgcatgtgccaaccctgatggcatctgggtgatagttgtgacagtgaccctcttggagtactcctagcatcaccctctcaggagagaaaggccagagaagaagctacttgagttgttgatctcagaagccgtgtctggtagtgtgattgggtcatatattttgggaaggctggtctattctatgaatgcatttcatctatgaattaagcccaagcaaaatgttgagaaagatggtaaggaagtctgccttcccaagagtgaatgtggtcagtgatttcagatgcctgtcacaccatcactccataatgacagctgtctgacttccttctcacagcaattggacaatgttcatttttttttttgagatggagtcttgctctgtctcccaggctggagtgcagtggagcgatctcggctctctgcaagctccgcctcccgggttcacgccattctcctgtcttagtctccctagtagctgggactacaggttcccaccaccacatccggctaattttttgtatttttttagtagagatggggtttcaccgtgttagccaggatggtctagatctccggacctcgtgatccacctgccttggcctcccaaaatgctgggattacaggtgtgagccaccgcgcctggcctgcaatgttcattttattgagataactggaaattttcacccactcacaagtcaacaagtggatgcagtatagtgtgttgacaaaagagaaagactgggaggtaggcgctccagtttcctagtcctaatccggcgtatgtggtaagtgagtatcaggagatgaatttaatttattctagcctcagttttcctcagcatctgtagaaggtagttggactatatgatctcttgacttccagctaaatataagactatgattccataataatatagttcctctattcatttataactcattaacagaaaaatcgagccacgtgcaaagaattcttgtagtcatcaatgaataacacgtggttattgtgttacgatgcctataaaataaaaaaaattatctggaagagggaaacgggatagagcagatcagtgtgacttgaacagagactatgccagcctccctattccaaattggaatactggctctgtgatgtgctataactgtattgtgaggcttattctaatgattttggtaaatgttaaagactcctcctggggttgtgttgaaataacacactgaatggagatggtagttcataaattctttttctagtggtggcagttagtgttattgtagtctttttttttttttttttttttttttgagatgggatctttctctgtctcccaagctggagtgcagtggtgggatcttggctcactgcaacctccacctcttgggttcaagtgattctcctgcctcagcctcccaagtagctgggattacaggcgtgcaacaccacacccagctatttttactttttttttttttttttttgagacagagtttcgcttttgttgcccaggctggagtgcaatggcgtgatctcacctcactgcaacctccacctcctgggttcaagcaattcttctgtctcagcctcctgactagctgggattacaggcatgtgccaccatgcccggctaattttgtatttttagtagagacggagtttctccat

SEQ ID NO: 114208 - DNA, 1048 bp, Homo sapiens
gaggctatcttggtagaggtttcatgatgccaccctgatgccacctctcttcctctttacagtagtataactctttgctcttattttttcatagcttaaattctcatcctagcaattcacgtatgctttacaagggatgtataggattgaaacattttgaattaatgatttcagaaaggtgagttttgactaggagaaaggaaggtggaggaaaaaacattctcagccagaaaacttctttttcccaaagttcaagataagaaaacatccaacatcctgttggaggtaagtgggaaagaagtagcagttggagccttgaaagtcagaaaccaatgaacggaacagcctgagtaatggacccgactcgtggaaggctgccaagctggagagtgaggggacggagacagaaatatggcgtgatgagttcgtgggaaggtcaaactcgctggcctttgaggaagagcttttgaggtgcaacttcctggcatgcagtgagcagaaggcaggccaggacaggagctgactcccgagcaggggacacagtgaatttgtggcatttgttaccaatctcggagttcactgtgcacagtctccacactaggcatttactttttcatatgtccgaaaaaatgtctgcacacttcatttctgtccagtaagaactgataatcagggatttgaaggggcctagtttggaaattttcaatgggtgaaaataagtgagcaaaattacatttatactaaaatataattctttccatctgctccatagtgggatagcctcttgaggcaacttccaattagaatgtcattttagatgctttccaagatggcagatgggtgagtactagggtgtgcagggaagatcaataaacagctctggcaattcatcgtgcgcctaacaccaaggaatacttcagtggaagagctctcattttgttgggatgaataaaattaaataaaagtacacagtacccaataaaggaacaaaagcttaggctttggtcaagcagaacaaaaggggctaatgagaaaaggactatgtatt

SEQ ID NO: 114209 - DNA, 1045 bp, Homo sapiens
tgtcagctggtgaaatcaggcacagaagagataagggtttcttgtcataacaacataggaacaggtcacccgcgtgttactcaaaactgtaggacggcagtgagggctttgctaatcccagaacagaggtgtaacctggctgcatatccagcctcgagaaaatgtctacagcagatctgatggagaacctcagggaggaactcacctgtttcatctgcttagactatttcagcagcccagtgaccaccgagtgtgggcacagcttttgtctggtgtgtctcctcaggagctgggaggaacataacacacctttatcttgtcctgagtgctggaggaccttggagggcccgcatttccagtcaaacgagcgtctggggaggctggccagcatcgccaggcagctccggtcccaggtgctgcagagcgaggatgagcagggcagctacgggaggatgcccaccactgccaaggcgctctccgatgacgagcagggtggaagcgccttcgtagcccagagccatggtgcaaacagagtgcatctctccagcgaggctgaggagcatcacagagtaagacagctgctcagcatgaaccccacgactcatcgcagctaactccgttagctttcctgacgtttcctaacgtcctctgtgggggacagtcacgagggcccatctgagcaccacatcacaaactggcgtgggtccagtttacacccttttttttccctttttttgtttttgagacagagttttgctctgttgcccaggctggagtgcagcagtgcgatctcagtcactgcaacctccgcctcccaggttcacgccattctcctgcctcagcctccccagtagctgggactacagtcacccaccaccacgcccggctaattttttgtatttttaatagagacggggtttcaccatgttggccaggctggtcttgaactcctgacctcaggtgatccgcctgcctcggcctcccaaagtgctgggattacaggcgtgaggcgccgcacccagcctgccctttgttttagaggcct

SEQ ID NO: 114210 - DNA, 2410 bp, Homo sapiens
gtgtaaggagaaaggaagctcaggctgtactaacccatgagaaggagagagtgaaactgtgccaggtcggtgtctgtctgacttttgctgcttgtatatgaccccataagggggactaaagggaaatttagtgaaatatcaggaaaaaaaaaagacaaatttttccagtctcacctctaaaatatgcagtttccttgcattgggctgccttcttctgagcgtcctcgtgggagtctcaaggctcagctgcaattcgccccctctaggagcctcctttgcataactagacaacgctgtggcttcctctatgatggctctggtagaattatttaaaacacaagtgatacttatagacatgtaacatgagacggaaagcgattttaaaaagaaatatctcaaaaacatggaggggaaaatgcaaattaaaaaaaataaagagacagagatataaaagcaaaatagtggtttaaatgatacctgacaagtcctcaaggttggtcacggacttggatttgagctctccagcagtcaaagcaaaggactaaatatcaaattatatattttttaaaaccatgtatctgattctcccaatagactttgaaatctgtttttttttttttttttttggagatggagtctctctctgtcgcccaggctggagtgcagtggcgcgatcccggctcactgcaacctccacctcccgggttcaagtgattctcctgcctcagccttctgagtagctgggattacagacgtgtgccaccatgcccagctaattttgtatatttgtggagatggggttttaccatgttagccaggctgatctcgaactcccgacctcaggtaatccacctgtctcggtctcccaaagtgctgggattacaggtgtgagccaccgtgcttggccgtagactttgaattcttaagtgagagtatttgccatgtatgtttctgttcctttttggttatctgacacctactttcattgaataaatatttgttgaataaatgaacacacatttttcataatttttcttaattttgttttatttgtatcatagtcctgatcactacttgtcatatttcttactcatttttggttttctccactagaacgaccgcctcctgggaatggagattttggttttgtttactattgtatctatagcgcacatacctccgaaaacatcaacctctacacccagcgcatcaacagattaaatgtattatatgttggatttcaggaattgttgccatgaaactctaggacttggccaggcatggtggcccacacctgtaatcccagcactttgggaggctgaggagggtgggtcacccggtcaagagacttgagacaatcctgaccaacatggtgaaaccccatctttactaaaaatacaaaaattagctgggcgtggtggcacactcctagactatagtcccagctactcaggaggctgaggcaggagaatcatttgaactcaggaggcagaggttgcagtgagccgagattgcgccactgcacttcagactggcgacagagtgagactccatctcaaaaaaaaaaaaaaaaagaaagaaagaaactctaggacttgtaaggattaaaaatctacagacaagggcatttctcttactaactttatctcgtgtgtgtgtgtgtgtgtgtgtgtgtgtgtgtgtgttttggcaggaagaaacaaagacttgtaaacaggttgttgtgtcagaatacatgaaaatgcaccagttcctgaaggaagaggagcagctgcaactccagctactagaacaggaagagaaagagaacatgaggaagctgaggaacaatgagatcaaactgacccagcaaatcagaagcctaagcaaaatgatcgcacagattgagtcctcaagtcaaagctcggctttcgaatctcttgaggtgagaataacattcatgagagtaatgggaaaaattatagtaactcatagtacttcaagccataggaaataatgttttctttattcatcttaaaaactaagttctggtccaaaagtagttttcctaaagaattgacattctatatgtcaataaagccttatagaagagagagagagagaaaaaaaaaaacacatccagaggaataactatcccaaacaagcctgagagtggcttcaatttcttctgtacctgcctctctgcaacctcagctttgttaatttttttttctagtttattaatgtgtatttactatgtgctgggcacattaaatttaatcttcacaaagacctgatgaagataagtaccattatgatatgaactctaggtctagatgactgtcatctacaggatgggttaatagcggcactgatttaattattcatacctgtggtactaacgagatctgcccgcctgatagttaataga

SEQ ID NO: 114211 - DNA, 1310 bp, Homo sapiens
aggatggtctctatctcttgaccttgtgatccatccaccttggcctcccaaaaggctgggattacaggcgagagccaccggcacccggccgtggactttcttaaacataagccatgtgatccaactccagcttcaggtctgttttgtagactggttccacagagtgctactatttaatttagtgccttccaaacacaccaccccgacctgacacaggcttggttagcctcagttctcaccagcccattttcctttgttatctctgcctctcactggatgatcgagactaacaggttggcttgtttgcagaacaggttccctggacaaggtgatgatacgagaaaaagaaaaggacaaagtattctctagtcattgtgagaaacaccttgtgttcaccacagcacatccctggaagaaactggggacgcttttctctgctctctgtgctcccactcatggtgtgcttcatgggaagcagattctgtgagctttgcaaggactgtatgcaaaatgaatttcgtctgtgttatgatcaaagcgcaccatgctaacttctttcttttttacccgtaggaagtgagaggagccctggaaaggtaggctttcattctgtgttcagttatgcaagctgcggggcagtggtgctgatggacagttctgagtggggataggaggtctgcgctgttgctgggggagaaatgaggtggactctccagctggagcaggtcacgcggtctgtgccgaggagtgaacctctctgctctcttgcaggagcgagccactcttgcttcagtgtccagaggccaccaccacagagctgagtctgtgccgcatcacgggaatgaaggagatgctaagaaaattcagcagtaagtcagcctgatttgttacccctccggggctcgaagaattaacttcagcataccttcttccagtgtcagacattcacgatctgacacgaggctcctggttaaggaatccgggccagcacggaacaccagggagggctggggccacagaccgtctctgagcgtgagcagagagaagcagtgagacttgactcaggctttatctggctttgttttctgtctaaagggtctttttttttttttctttgagacggagtctcactccgtgtcccgggctggagcgcaggggcgcgatctcggctcactgcaagctccgcttcccgggttcacgccattctcctgcctcagcctcccgagtagctgggactacaggcgcccgccaccacgcctgggtaattttttgtatttttagtacagacggggtttcactgtgttagccag

SEQ ID NO: 114212 - DNA, 1062 bp, Homo sapiens
actagccgggcgtggtggtggacaagactactactcgggaggctgaggcaagagaatcacttgaacctgggagacgaggttgcagtgagtcaagatcgcgtcattgcagtccaggctgggcaacaagagcaaaactgtctcaggaaaaaaataaaaaaataaaaggaggccccatatgtgactgtcggttcacagactatgtgtgcttcatcacatggtccctgggtgctgcactgaactcacaggaagctgcatttgtcatgacataatgaaaaaggctgattagggattgtgatttgtgatttgaacactcagtaaccgtgtaatcttggtgaagtttcctaaccttcctgaacctgttttcttttttgtaaaaattatagaaaagaatgcttgcagtgattaaatgagataatgtacagaaaatgtttggcacattagaagttcagccaaagataagtgctattttctctcccacccaaactgaagaaccagaacctcccatggctaatatgatgcgaacaaccaagggtgtccctatgtggacgcacagctcggagctctaaagatgtcctgtgaacagagcgacgcccattccacccacagggattctcctccccacctcaggcaggctaaagctccttctccacgtggctcttctctctgtctccatttagagcttcatgctatgtgttgtggaacagtcaaagaagagctcagaaattttgttctcaaccaaatactgtttttttctgaaactgagtcttgctctgtcgcccaggctggagtgcagtggtataatcttggctcactgcaacctccacctcctgggttcaagcaattctcgtgcctcagcctcctgagtagttcggattacaagcacgtgccaccatgcctggctatgttttgtatttttagtagagacggggtttcaccatgttgcccaggctggtcttgaactcctgaccttgtgatctgcctgcctcaccctcccaaagtgctgcattacaggcgcgagccatcacgcccggccccaaattacatttaaaaaaccaggactaa

SEQ ID NO: 114213 - DNA, 1048 bp, Homo sapiens
acccctgacctcaggtgatctgcccatcttggcctcccaaagtgctaggattacaggtgtgagccaccgtgcccaggctttttttttttttttttttttttttttgagacggagtagtcttgctctgtcacccaggctggagtgcagtggcgcgatctcagctcactgcaagttctgcctcctgggttcacgccattctcctgcctcagcctcccgagtagctgggactaaaggcgcccaccaccacgcccggctaagtttttgtatttttttttttagtagagacggggtttcaccgtgttagccaggatggtcttgatctcctgacctcgtgatccacccgcctccacctcccaaagtgctgggattccaggcgtgagcccccgcgcctggcccagcctttgtttttaaatggaatgttcccttgctagtactgcagaatgtccccggtcacagagggtatccctttacctcctctcatctctcagataagccattgtcctaaggcaggcaagacagtggatacgatttaaccaccactccagactgtgttattactaagatgtttaggaaaaatgtttatcagagttttgtctgtaaattggagactcggttggaaagaaattaataattcaacctgttaatcagcacacaaggccttaaaaagaggtctgtgaaataaagagggtttactgtagggtgcgcttatccttctcacccatctgaatctgctttctcttgccactctatacgtttcaatcttgtgtcctcgaaggcaggggagcaaagaagaaacaggctcaagagtctgggaaatgctgtctcctgtgctttgcattcaccatttaattcccaccctgaattcagcatttaattcccaccttgacatcacgcacaatcagagtttgagacttgcagaggggagcccagcacgtcctccttagactatctgtggcccactgtgtttccttcttatttatgtatttatttatttatttgagatggagtctggctctctcgccaggctggaatgcagtggcgccatctt

SEQ ID NO: 114214 - DNA, 1292 bp, Homo sapiens
tcttgcagatgggaatgaaggcccaggtgctctggagaggtgactctcctctaggtgaggggtgtgtgtgtgagaggagtgaggtgcggtgtgggagggtccttgcagggtccggctgctttcggaggctgtttttctcagctccccgttttgtccctccaaattgtgcccctctccttccaattgtcactctcctttcccccaaccctccctgtctcccagttgtctcgcttctcagaaaggaaacactggttctgtaaacctgtttgagaagaaaagctcgaggtttcttggcctctctgcttctggagccaggggaaaaaatagccccaggctgaagacaggagggaccagattgctgcttggtgatgcgatctcactgcagaggcagccaggagaccctcctgagacgaatcggagagtccatgctgcttttacacacatcctagttcttttataactagccttttcctattaacggacatcattcaaaagccagttttaagcaacataaatattgaaaacaatactatactatttagaattaattataagttttgtttttaaagcctaaatcttttattgttgtttgaaccctgggcactgaagctaataatgtaacttttctcccttctttcttctttggcatagatttaaagaactgttagactcatttaaaatgctattaggcattttaaagagtaattgttaaatgtgttgtctcttgtgggactggaaatgttctgttcttatctggcgctggttacatcctgtttttcatttgggaaagtgcattgagctggaaatttatatgttcaatttctgtatgtaaattgtacttcagtaaaaattttcaaaaaagtggctgccttttatagcaggtgtcccatgcgcatatatatatatatatatatatatttttttttttttaagaagatgacctcaagaccaagacctgtttaaaggtggggaaggaagcaggatttggcagagggataagtctagctgccatgcagggacagctacaggctgcctcagccacacacagggcgccctggagctaaattggctctgcaaactagcctggctggagttggactgagatatcctagccgttaggcactcttgggcaaggtggctcccccagccgaggcagttcctgaaggggctgacagctgcagtcagtctatctgcccaggggattcccagcaaaagaggcaaccaattgctgggaggaatctgggacatgcatcaaagtgtccacgttggcctggcgcagtggctcacaccca

SEQ ID NO: 114215 - DNA, 1034 bp, Homo sapiens
cggccggaaaaggcatggaaacagctccttcgcttatcttccagaaggaatgcaggactgcctacacctaatcttaatcgagtcaaaataatgtcagacttctgagacctccagaactgcgagataataaatttgtgttgttttaaaaccacagaaggcgtggtgatttgttagcccagctatagaacacttaacacgaatcaagggtggaagcagaggagaaggggaagaagggggaaagaccttcaattcgtcttggaaagtaaggctcacagtcaactgcacactgagtacaaatttacctccagggactgaggccaacctagctcaggaccagggcaaaagcaccttgaagtgctgagaccagtctcatcatatcaccaccaatagcacagggaggctcaattccagcagacacaccctgtgactccattgatgacacagtctgtctgcaattggcaaactcttctttgtctgtgagtaaaatgatgttgtttacaagcaaagttgaaagcatgaaagattttcgataaactcctcagggctcattacaattggaatcaattttatgcactctggtttgggtagcatccttctatgattagagggtggatgccaagcagcctatcgtgttaaaaataggaaaaagactataggattgtctaagcagagtggaaaaacaggctgaaagagttcagtgggtttgtgtaactttgtcttgtaacaaagtcagcaagtgaaaagctagggaaggttttttcctcctcttctgcctcaattttctttttttttctgcctgaatttgaatatagatttcatctatttaaacagaaatacagtctatcctctttgtatactgatctcttgtattccccgcttcttcacttttgtttcttcctcattacttacaagcaggatggaagtcaggtagagccgactgcattccaagtccttcactttctcttcgggtagctgggccctgggtctggcatcttgtgaatgtaaaatgaaggttgccttttgtctggtccttc

SEQ ID NO: 114216 - DNA, 1019 bp, Homo sapiens
ttaactttttgaggaaccccaaactgtttcctgtagatgctgcaccattttacatttccaccaggaatgtgtgaaggtacatattacctcttaatcctcacaatagccttaagagttaggttaagttactatcctaattttttaagtggggaaactgactcagagagattcagtaccttttccaaaaatcacggagctaagaagtgaaagaatcaggatttaaaatctggcagtgtggctctacaatctgctttgaactctaacgtaatatgtgcaaagcctgaagcaacttctcagtactgtatttaagagggcatatcaatgtaagtcttcctaaatcaataatttataaatgaaacagcttaaaagactttcaagtttcaatcttacaatatttatcgtacaaatcaatatacctaaactcgtctatataaattatgtcctgtagtaagaagaaaaagagcaaagataagaaaagaaaaagagaagaagatgaagaaacccagcttgatattgttggtgagtcagttttcagtgctctattctgaaaaaagttaatgtttcttgagatctccttgaaagtgttttcctagttagaaatttatgatgtattcatatttgtcttaaagtgcttaaatattacctacagttataaattccatttattctttaacacagtagatgctactgatgcctttacttcattatcaggagagaaaaattataactctctgacttagtaggcaccattagactgcttaatagccagagattctaatacataattttaaaggcctaatgtaaatgttattcaaccaaatatcttttacaagttattttctttgcacatgtatgcattttaattgtagaagtcggttgtctcttaaaggaagtatcttcacaggaaaaatcattattttgtgaactctgaaatgaatgaaaattttaaatacaacatcagggtagcctgtaaatgatactagaaataaactgacctaaacacacttaaccagcctgtt

SEQ ID NO: 114217 - DNA, 1291 bp, Homo sapiens
tgttttgttttggtctttttttgagacaggaccttgctctgtcactcaggctagagtgcagtggcatgatcatagctcactataacgttgaactctgggctcaagtgatcctctttccccagctccccgagtagctgagattacaggcatgcacccccatgcctggctgtatgttgctattttatgttttaaaaacctaatcctgactgtgctggtagtcgcatgaatctctgcacatacatgcaaacaagtacatgtaaaactggtgaaatctgaataagcttcatggattatatcaatttcagtttcctgattctgacagtgtatgatacttatgcaagatttaatcgagacaaagtgagtaaagaatatgtgagatctttgtattatttcttacaactgcaaaataagaagtttttaaaattaagttataataacaaaaaaaagaactctgtgtcaaaactaaaatataaagttgaaatattgattttattttttaggaatctggtggacagtaacaaactttggtgaaatttcaggaaccatagccattgaaatggataagggaacctatatacatgcactcgacaatggtctttttaccctgggagctccacacaaagaaggtttgtgtctggaagggaagaggctgccacaagtgtagattttaggacattcattcacttaggccaaactctaactagtctcaaacattttccaaaggaatggaaccattgcatttgactcttccatttttttttaattccttaatatttaccagccattggcaagtccctctttctaatataagcatttgaaaacattccgtatagttccagaagagtatctttggaaatcaaaataacatgaataattaaaatagtaagtggaaagaaaaaagaaaacctatttgagtcaaaatgtttgaatttcttttttattcagacctattgccaaaactaacctgggtgcgtttaacagtttgaagtttcctcattttctttagcccattagaggaagcactaatgagatatgaagtaattagaagataaaaagcagtatcatttggtcagcaaggccatcccttgaataagtgaaagcatttagctttttaaataagtgcttatttatgactgtattttaaaacataaagagaagctatctcaaaagttattaaataagcattatatcaccctgtcttactcagtgtataaaattaacactgtagttaaaagaaggtaaaatagatcttgattccaaagatacagtattacagtgacatcagtatatc

SEQ ID NO: 114218 - DNA, 1058 bp, Homo sapiens
tgtccaacatggcagcaactagtcacatgtagcttttttcttttttttttttttaaaggcacagagtctcactctgtcacccaggctggagtgcagtggtgtgaccgtatctcactataacctcaaatttctgggctcaagcaatcctcctgcgtcagcctcccaagtagctggtatcacatgtgcatgccgccatgcccagctaactttttaaattttttgtagagatggggtctcactgtgttgtccaggctgatcttgaacttcttgcctcaagcaattctcccgttggcttcccaaagcacagagattacaggagtgagtcaccactcagccacatgcagcttttgaagacttggaatatgtgcagtctgaaattttagatatgtacacagccacacacatacgcatgtcctgttttgatgtcctataattaattttctctcagtctttaacttttatctatgttattaatgtacagaatcgccctgaagtctggctatggaaaatatcttggtataaattcagatggacttgttgttgggcgttcagatgcaattggaccaagagaacaatgggaaccagtctttcaaaatgtaagtgctgttattgtttataaaaacttcctgtcagtttaacagaaagtctgttaacagtcaatcataatatatttaaaaagaaaaagtaggatgcaatagtgtaatacattaaataggaataaatcaataagaacatagagccttaaagagatctcaaaatatagtgcaacaaaaatcgcattagtccttttgcccacaattatttctgtatacccttagtgcctagatatggatctcatttccattgaagaaccagtcaattttaggtctcagagtaggaaaacagagtagttcctaagtatctttgtagcagaaatcatggatgctttcagaaacattagagactgtaagcgaacagtggagcttgctaagaccaagttgtgacaatttgtgcataaaataaataataatagttcattgaagtaaattatctctaaaagactttcagttcataagctt

SEQ ID NO: 114219 - DNA, 1049 bp, Homo sapiens
cgcagtggctcatgcctgcaatcccagcactttgggaggccaaggcaggcacatcgctcaaggtcaggagttcgagaacagcctggccaacatggtgaaaccccatctctaccaaaaatacaaaaattagccgagcatagtggcacgcgcctgtagtcccagctactcgggaggctgaggcaggagaatcacatgaacctgggaagcggaggttgcgatgagccgagatcgcgccatggcactctagtctgggggagagagcgagactccatcttgggggagaaaaaaaaaggtctaattgtatttttttaaataagctggagcttttcaacaaagatgaccttcatgacctctcaagaggagggccactcattgactgggtagcacaaggccccacttctattagggcatgctggctagagtcccctgtgtcctggccatagcacagcctttgactggcatcacacccattctatgaatgaatagagagattgactaacctgagtgactagctttgggaggtggtaggatgattaggaaaactgaagcctcaagaaaagaaaagcatttagctcagtgctctgtcctagaggctacattgtgtcgtctcttcttgtccatcagtttcattttttcagacacggtcttgctctgccacccaggctggaaggcagtggtgatcagagctcactgcagccttgaactcctgggctcaaacaatcctcctgtctcagcctcccgagtagctgggcctataggcatgtaccaccatgcccagctaagtaggtaatttattttgaaagcactttgagaagcacttcactgtcaaatctgtaggtctaaaaggaaaagaatacatacacataattgatttcacattgttttacatttcctttgtcttcttctggaatgtcatcttttttcttggtttctctttcagcacaggatctaatctagatattggaaaagagaatccaatgggttatatgtttatcttccaccttccccactttacgtatcacataagaacattcgagatgatttcttat

SEQ ID NO: 114220 - DNA, 1049 bp, Homo sapiens; identical to SEQ ID NO: 114219

SEQ ID NO: 114221 - DNA, 1021 bp, Homo sapiens
tttttttctcccccaagatggagtctcgctctctcccccagactagagtgccatggcgcgatctcggctcatcgcaacctccgcttcccaggttcatgtgattctcctgcctcagcctcccgagtagctgggactacaggcgcgtgccactatgctcggctaatttttgtatttttggtagagatggggtttcaccatgttggccaggctgttctcgaactcctgaccttgagcgatgtgcctgccttggcctcccaaagtgctgggattgcaggcatgagccactgcgcctggcctacaattagacttttttacaagtgaaaaagaaattaacagtatttataaatttaatagtaaatatgtataatcagagtttgaggtatttttcaatgaagacattttctttacagaaagaaatttcagagcttccaagaccacaaacttaaaataagtaaagaagacagtaaaattcttaaaaaggctcggaaagatggatttttgcatgagacgcttctggacaggtagctatttatttacttatttccactattttcagtagccaatagaaatggcatgtagaaaacctacattctcttaaattactgtagtttttcacatttttgtctttatttctaatttatgagtgtggcaatattacctaaagaggacatcgtaagtttgggaaaagactgtcatgaaagaatatctaaaaattataaccgattctaagtatatacttgaagaaattcaggtttgactgtatctacttcataaatttatcatctttttataactattagaaccagagttagaagcagtttgactaatataaaaattatgtggattctgttagagtagttcaggttccttaaaataagaatagatcaactaaaaaactaagtataaaagctaaacaagtgaaattgaagcagttttattataagatttggaagagtgcaggatgtttatcataccacattattaatatttattactcttcctaggtagataagtaatgtcc

SEQ ID NO: 114222 - DNA, 1034 bp, Homo sapiens
gattagaatccattttttatagaaaccaaatttaaaagtatacatattttaataaaagtgttgtggtaataaccaaaattgaacacacagttttaaagctttttatatttagtagcagttgaatatatatggcatgttttacatagattaattttatttttctttgtttaaacaggagagccaaattgaaagccgacagatactgcaagtgactgggatttttgtttctgccttatctttctgtgtttttttctgaataaaatattcagaggaaatgcttttacagagttcttgagttgtgaaattattgtttagctagtttaaccaggattaaacaagtttaatcaggattcttcatggatgtactttttagctaactacagtttttcacatggaaatgaaacttacagttcacacttaatgtaccacagaatttttttctggatttcctgtcctgaagcatgaagtgtactagaaaccaattcttcctgcgctacttgtggaatctgtcttactggatcataatcttactttactttatataatagatgcttaatcagtgcctttaatagaagttagaaactcccaatccaatcaacaaggctttggttctaccttctaagtactacccagatcacagacaatccaaatatcagaactagggggctgggcagagaggacaaatcatctattagggagtgggacagaaagcagaaacattacaaaggagcaagtaggctcagaacagaggggagagtagtactggggaaactccctgctgaggacaggttagccacagtggatatgtatgtgatgcctttgtccttgtgggctggaatggaagctggtaagggaataggaacagctccagtctacagctcccagcgtgagcgatgcagaagacgtgtgatttcttcatttccaactgaggtaccaggttcatctcactggggagtgtcaggcagtgggtgcaggacagtgggtacagtgcaccgagcatgagccaaagcagggcgaggcatcaccttacccag

SEQ ID NO: 114223 - DNA, 1821 bp, Homo sapiens
tttttttattgttgaaacacatccaactcttacttgtgggatggacaaagggttggtggctctatacggagccaggtgcctgctggccagcaggctgtgtgagtcatccggtcttagaggcgctggatttctctgcagtgcaggccagccctgctgctccttggtgtagggggcagagccgggcagtgccccctccagcctcccagcaatcttcgtcccgttttcgtgagattccagcagtctccagtttgaggaaagaggcccactgtgtcttgaggctgaacttcttaacccactttatttttatgtgtccttatcagaacataagcagtgtctcaaactcaggccgtttactagtcgccaccgggcaaagctaaatacaacttttataagaacctggccaacggtagttgaagtcgacccaaacattttaaactttgccaattgtactagagccggagcaggcaaatggtggtagatcttcttagcaacaaacagttagaagacggaaagggctagggttagggtcttttggtcacccagcccttacctggttttcagataagaacttggcctgttacacattttcacgtagaagtgatcttcttggtacagccgaggtcttaagcttttactgaaacactatccttagctgccttatgatttaagtgaggattatagaacttcagccctaactttttcattatgtgtatttttcttcattcatgtcaggttggatttggtctagggagtcccagaaagaagtagaaaaagagagagaagcctaccgtcggagaactgctgcttttcaacaggatctggaagccaagtaccacgccatgatctcagaaaatcggcgtgctgtcgctcagttgtccttggaactcgaaaaggaacaaaacagaactgctagttaccgagaagcccttatctctcagggacgcaagttggtagaagaaaagaagcttctggaacaggaacgggcccaggtgatgcaagaaaaaagacaggtgcagcctttgagaagtgcgtatttgagctgcctgcaaagggaagaaaactggcaaaggagagccaggcttttgctgaaagaatttgaagctgttctcacagaaagacagaatatctactgcagtctgtttcttcctcgcagcaagcggctggagatagagaagagcttactggtgcgagcgtccgtcgaccccgtcgccgctgacctagagatggcagccggtctcaccgacatatttcagcatgatacatactgtggtgatgtctggaacaccaacaaacgccagaatggcagactcatgtggctctatctcaaatactgggaactcgttgtcgaactgaagaagtttaagagagtagaggaagccatactagaaaagtaagacaagagtgaaatcaaactgcttttagtgactcgaggccaggcagtcatgcgccttctgggtctccggcgtcttccgttcccgtgctgcccgtgtcatggccacaccgtcacccttcagcagcgacctccactcccgccaccgtctgagcagaagtgcaccgaagcctcagagacagagggtctcctcccgatgctctgccgctgttggggatatggtttcttgaagcatttttaggctgccagtattgtattaagcagaacagtataacctcgtattttagctccagggtaaaaatggttttttaaaaagtcaaatacaatactggtccttaccacaagtaattttctgtctgtttcatcactccctaaatactttctcctcaaattatttttctctgtcaccagattacattaagaatttgtca

SEQ ID NO: 114224 - DNA, 1030 bp, Homo sapiens
tgaacgcccagaccgcagggaatggggtcggaggggggcgctcgtccgcggaggtgggcgggagcggcccggggcctccgacctcttgtttattatacatcccttgattaactaaactattttgtaattgtgtgtgtttgtggaggtcacatgtaaacaaacttaaagtgactctactttgtgaaaatgtgaaacttcgtgtaggtactcagtaaatcagtaaattcttactaacgttagcccccagcctagctatggagggtgcatgctgagcccgaagcagagaactctgtaatctctgcattcatcaccaccacgaggaggcctcagaagcttctagcactgtttgcaccttccccacatcacccctccctgccttcctcacagtcttccttctgatcagaagaccctttccttctttctctgcctgtcaaaatgctgctcactcttcaaaccctagctcatatgaaagtgtccggtgtgagcccacttttatcgagttgattctgtatctttgatacaactgtatgagggttctccagagacacaacaaatagaagggagacgtgaggaattggtttaaaggttcaattgctaatctcatccaaaaacacccttacagacacgcccagaaataatgcttaaccatgtatctgagcacctcatgatgccgtcaagttgacaaacaaaattaaccatcgcagcagccatacatttaaacatatttgtaccagagaacttacctgattctacctgcacttcagatgcttaagacatgtctgttttctccactttccccaaccagattgtgagtcgctttcatcttaagttcttgttttttttttcctttttctttttctttttttttgggggggacggagtctcgttctgtcaccaggctggagtgcagtggcgcgacctcgactcactgcaacctccacctcccaggttcaagcgattctcctgcctcagcctcccgagtagctgggactacaggtgcccgccaccatgcccggctctggtctagttt

SEQ ID NO: 114225 - DNA, 1028 bp, Homo sapiens
ttaatcaagggatgtataataaacaagaggtcggaggccccgggccgctcccgcccacctccgcggacgagcgcccccctccgaccccattccctgcggtctgggcgttcaggcccttcggtctgggcgatcccggagaaccacccacggggctttaaaaatgttggtgcccaccacctccccggaacagggcccgctctacctcggtcggggagcgcgggacctcagcgttcccttaacgccaccgtccgcgggtccgctttgcgcaggcgcggcgcccccactcagtacccgctccgggcgtggcatggtgcgcaggcgcgatgtcccccactgcagccccgctcgactccggcgtggtgcgcaggcgcggtatcccccctcccccgccagctcgaccccggtgtggtgcgcaggcgcagtctgcgcagggactggcgggactgcgcggcggcaacagcagacatgtcgggggtccggggcctgtcgcggctgctgagcgctcggcgcctggcgctggccaaggcggtgagtccgtgccgcggaccggggcggggcaggcgggggccgaggcggcggtaggagcgggacggtccccagcgggtccgagcggagcgggcgccgggtccctgcgccctctgtcccgggatcgggaaggggctgagagagccctgggccggtgcgaggggaagccgcggggcggactcggggacccggggagctcggtccttagtagatagtccgcgtccgggtgaaggtcacaaccccgcgggcttgctgggcgtcccctccgccgccttggtccgggcctggggtcctgggaccccgcgggctgaggtagcccctcgcctcagtgcctggcaggtggactcggggaggagtcgtgtctgcccaaggtcacccgggcggatagcggccggtggccgccctggctgggctgggcctctgccgccctctgtgcgggttgtcctgaggagcagcccgcagcccgtgggtggggccggcggggcgggtgagaccgcccgggt

SEQ ID NO: 114226 - DNA, 1157 bp, Homo sapiens
atctcgttgagttaaatgtgaggattagtcatacagccatcctgccaacatcagaaagcgtgtaaaccgttctagtgtgttgctgtggttggtactgactgagcagagacccctgccgcatcttgggcttttaagagctgctaggagggcgtccacaagcaggaaggaaagcccatggtcagtggggctttttaggggaaatggtagcttgtgattggagaaaagctagagctagtgcctttgtcctcaacccagatggtgcccggtgttccttctgcagactaagaccctgccagcggcggaggcacctcagacgggatggcaagatagcaaaattgaaccaaaatttagtcttgggttttgtaaaagtctttttatcttgatgaagttagcttttcctacagaaattctgcctgcaagcagcatatttatcggcatttcagataggctttttttcctgaagaattggagtttacgaaggaacagcataatcaaaaaattagcagaaaaaagaaagaaattcgtgatagccaactgagaaatgtgtttggaaaatagatgctgaggataatttcagtaaagtccagagagaattttttaacctcattttggccagttctgtggtgttttgatcattctgtatttacaactgctttcaagtgacgaacttatcagacttattttgcttttggtttctttttatggcccagtgcactgacacagcttgcaaactgttcgaaagcagtttaatcagaggaaaaagaaaaccaagaaacttcaatagttactggttaactgcttacttcaggtgaagtttttcaaatcccttaacatgaacatccaatatattgttctaggacaaattgatttcttttctttgaatggattgttctgaatatgtttaatggtgttctagaaatacattatttaggccattatagtagtaaacctttgctttgcttcttgggataattgtaacaacaatggcattccattctgcattcctcatgatgtttttcctgatttatttgaaaaattgtgacttgttttttgatatgaaacctggatattaatattagttgggagtctcagagatttttcccaagggtctttagataggggggcaagtccaggatccagagccaggccggccgact

SEQ ID NO: 114227 - DNA, 1016 bp, Homo sapiens
gatacagatctcctgattcaatgttgagtgccttttgaactgaccacaagccctcctggacgattggaactgtaatgtggaaagggctatgatggagccagttaaaatgcttcattacttgcaaaataccacatacagtaatacaatatacacgtctttccccttctccactaagtagcatacattaagacttcacagaggaagtgtgcctttttcatttcgtatctgagtcagtgagtatcctgtttggaaacaagcttcatcctggttttctagagtgccaagtcagggtggaaacgaggacctgggggctcagtccttccttgccccttgggctgccttcagggttaagtagagggtcccagctgagctctctggatgcacaggagcacctgggtacataagaaggtgaacagtttgcaaggggaaattactatcccccacagcatttgttccttcaggacactaaccctctggatctgtgtcttctgtgtctccagtggccaacagtgttgcaaacaggaacccgaggttttcacttcactgttgatgggaacaagagggcatctgctaaagtttcagattccgtaagttcatgctttttgttccattataaatgatttttttggcttagggggtaaggatctataccagtttgttttcatatgagtcatagacataagggaaaaatttctcataggtatccaatgcatgctgaaattattttcagtgtaataatacttaattgcaagtacaaatataaacatagatgtttacatttttacttgtatctgttatgtatctataaactagatttaaatttagatcaagtaaagcaataaattaaaataaaatgaacagtgtctgctgtgatagatgataaaattcctactgaaaataggacggtggggccagtgaacagtatctgctgtgatagatgataaaatcctactgaaaataggatggtggggcccctcgggtgtgggttgctttgtatttagtgagcctatctctgt

SEQ ID NO: 114228 - DNA, 2461 bp, Homo sapiens
ctacttccacctcctggattcaagtgattctcctgcctcagcctcccgagtagctgggactacaggcgcacgccaccatgcctggctaattttttgtattttagtagagacagggtttcccatgttgcccaggctggtcccgaactcctgagctcaggcagtccacctgccttggcctccgaaagtgctgggattgcaggcgtgagccaccgcacccggccatggattgttttaatattaactgttaacactgaagaaagacttgaggtgacaatagttactgggtaatcagagtcaactttggcatggccaaataatattctgaacggtattgattcagagtaatcaatattctgaactttgttgttttctgatgcatggggacggatcgttaatttgcaggttgttagaacaccagtgacttctctgtggctgagtgcatcgacaagtgtgtggtgggaggagaccgcggctccatctggagcaggagctgtcatgtggggagctggcccaggcttacaagagcgacttgtgctggctgagggaacggcaggtccaggcgggcagcgctgtccggcgcctacctttctgcggtgccggaatctgctcgtctgcaaccgtccgctttggtagctgccagccacatggggctgttgctaatgtggcaggtgtagctgaagagctgaatgttttgacttattttaattaattaagtggttatgtgttgccagtagctcccatctgggctgtgactgcatggtctgcggacctcactctggcaccagactccgagtggagctgcatgcggccaccggacagtgtggagtgcctcttcgggttgtgtagaagtaggaaatgtgtcaccaaaataggagctgttgctgctgcgttctctagcacacctgccttgtctgtactgctcggcgtggaatgcctctcgggctctgacagtgtcactgacactgttgctgatctccttggatttacctggtccatttggatcaagttctttcacctattcacatgagcagataccaccttaaaaccttaaagtttggcttaacacttcttgccctttttttttcctttcttttagtctctgcgatatgataccagctattttgtggagtattttgccttggatctcctgatggagaatggggagtgccgtggtgtcatcgcactgtgcatagaggacgggtccatccatcgcataagagcaaagaacactgttgttgccacagggtaggaatctcatttctactttattttgtttataaaaatgaataaatttcatttagagtttctttattttaatgaaaatagaggcattgtagaataacggtttagacacaggccttgatataaccatgtgagggtgatggcctttcccagccgtggttcctcacctgtaaagggtgaggacaggagcacctgcctcagggtgagaaagcatggtcctcagtagatggtagtggttgccctcaggttcacagcttacctctcccaatttagatgagggaactgtggcccaaagagtcaacatggggttttctggcaaaatctctcttgttttagtgggtactgtattgatactgattcctcgggtgggtaagtccttcttctccacatgatgaaaataagtaactttaattttatacactgtcagttactttaaccattttaaaagttaaaaagtgtcagtacagccaaacaaaaaatcagcaaaactacaggttgggaagaaatattttccaaaccatatgtgtaataatatcttactatctaaaatagcaaaaaaaaaaccctactaaaaacaacctactaaaccctactaaaaaacaaccctactaaaaatgggcaaaggacttgaatagatatttttctagagaagacatacaaatggccaattgatgtatgaaaaaatgctcaacgtcactaagcaccagagaaatgcaaattaaaaccccaatgagatatcatctcatctcgctccagttagaatgactgttaccaagaggacaaaagagcaagtgttggtgaggatgtggagaaaagggaaccctgtgtgctgttggtgggaatgtaaattagtacaactattacggaaaactctggaggttcctcaaaattcataggactactatgtgctccagcaaccccatttctgggtgtatatccaaagggcatgaaatcagaagctcaaagagacacctggaccctatgttcattgcagcattattcacaatacccgagatatggaaacaacctaaatatgtgttggtgtttaatgacaatgtggtgtgtatacacaactgaatattattcggctatgaaaatgaaggaaatcctgtcatgtgtgacaacgtggatgaacccaaagtcattatgttaagtgaaacgagccaggcacagaaagacagatactgcatgtcactcatgtggaatctaaaacagtcac

SEQ ID NO: 114229 - DNA, 1036 bp, Homo sapiens
tcacaaaataaatcatcacgctgtacaccataaatatatagttttttttttaaattcatcaatcatacctcagtaaatctgggggagaaaaaaatccataaaaattttaaaattttcattataaaagtagtatatgcttattggggaaaccttttgaacagcacaaagctaaaatacaaatagggccaggtgtgcagtggctcacgcctgtaatcccggcactttgggaggccaaagtgggaggatcacttgaggtcaggagttcgagaccagcctggccaacatggtgaaaccccatctctactaaaaatacaaaaattaactgggcgtggtggtgcacactgtaatcccagctactcgggaggctgaggcggaagaatcacttgaacctgggagccggaggttgctgtgagccgagatcgcaccactctactccagcctggtcaacagagttagatcctatctcaaaataaataaataaaatacaaatggaagtcctttctttgatcccaggcttctatcctacctgtgcagggtagcagcaccagtggcgcggcccctagtgatatgtgtggggtgtgcgtgagtagggggttgtgtgtgcacagcactgagaagacggtgctgggggctgccgtgtccattctgtgatctcaccagataggaggtccagatgtgggccgctgtgtgcagtcactgctctctattgtttccagaggctacgggcgcacctacttcagctgcacgtctgcccacaccagcactggcgacggcacggccatgatcaccagggcaggccttccttgccaggacctagagtttgttcagttccaccctacaggtagggcaggacgccttgcccggcaggtgtttggcttgtgtgtgtcttgtaagcatgtgatgcctactcattgctcttccatagttttatgtaataacatggttttgaagatcagcttcctcagctctcaggtcctaacttcaacgtcatttacctaaggagacttttcccacactccccttcccctaaggcagt

SEQ ID NO: 114230 - DNA, 1898 bp, Homo sapiens
tctctgtcagtgtcagctttctgatccctggaagggatgaaaataagaaatgaatttgttgtagtgttttttttttatttgtttcgagatggggtcttgctctgttgctcaggctggagtgcagtggagcaatcttgactcactgcagcctttgtctcccaggctcaaacgatccttccacctcagcctcccaaacagctgggactacaggcatgtgttaccatgcccagctaattttcgagggttttttcgtttttggtagagacgggatgtcaccgttttgcccaggctggtctcaaactccagggcttaggccatcctcctgcctcggcccctcagggtcctgggattatagccatgagccactgcacccggcctgttgtattttttattactgtttttaatgaataaaatgtcactgagcccctgaattccctctgtaatttgcttagagctccactgctcatgctttgtcttcagtatgtgagaagtaaccacagaaaaaagagcattgaaacttagaaaatcaaaagacagacaagaatcacattcgttttttaaaagcaagattgccctttttgtatactaataaaaattgtagctttcgaaatacatttagtttagggtttttgatctcctttgttaaaattcgagagcttggcatgccctgtttctcatcgcactgaggagtcacagagccgctgtttggagcacagaccgccggactacccaggtttgggtttgagctctgtcctcagctgcatgactggatgttaccaagtgttaatttgcttgtcactgagaaagggggtcgtactacccagagttgttgtaagacttaaacgagttaatatgtggaaagcagctagaactgcccatagcaagtgcagtgtaaatattatctaaaataatcattattactgtccttgtcactgtttggataatttagatatgaatacttcaagctagtattcttaactagtcaccacagtatcatagtgcaaaagaatgttcaaaaattaaaacaaaatttgaggcatccaacgtacactgggctgtaatcagagtattggccagaggtctgtgggccggcctttctcctctctggggacaccgctctgccccagcctctgctgcagctgtcagccttgtcagtgctttttgttatccagactttctactgtatcttaactgtcttgctgtgcagttttgcacataatgccttctgcttatctttttcctctttcccccaaaaaatgtcttgaaaaaaataatgcatttgaaatagagatctagcaattgttaggtaataaatatgtgtggttttttgcaggcatatatggtgctggttgtctcattacggaaggatgtcgtggagagggaggcattctcattaacagtcaaggcgaaaggtttatggagcgatacgcccctgtcgcgaaggacctggcgtctagagatgtggtgtctcggtccatgactctggagatccgagaaggaaggtgcgtgtgatttaccaccagcactgtctgagcgggcacacgggccggggttgcttctgtgagtttcagcaccgctcgccctcaccttcgtgtgcaggcgcatgtgcacagccacctctcttagctgctggcaggcgtctgttagtctgcgatattttcctaaagacctacattttgaaaattttagccagtttctttctcaaatctgtggaacagagtttctcttagtgtgtgtgagtatgtgacggagtatgggagagagagacacacacccaacctgaagtcggcatgtgagccttgggtgttgtgtctgatacccacagatgttttttggcagctttcaaagtgtgtgggttatttggctttcagtaaaacagtttgcagctctttcattgc

SEQ ID NO: 114231 - DNA, 2430 bp, Homo sapiens
agctggaaagaaggctgggacgacggggcccacctcgcagttgtctctttagatcttacaggaaaagatagatgtttccttcaagaaagtactgtattgttttctagattgcactttaaatttctattaccggaggatggagggggcttaataatttattcctccttagtaaattgtcagagatacatcatttgcagctttttccattttgtaattactttcctatatgatcttgtgttatttctaatgatcttacacatcaagggatctttataattcattcctttgagtggtttgtggttcacacagagcttgtcagtcacttaggctccttgttgggcgaggtgggtggaagctgttgctctccctgcgtagacgaagaggtgaacggggtagaacagtctggaacatcagtctcccctgctgatgttcctccacctgccgtgctcctgggtctgagccggagcacaggtggtgagggccccgggaacatgggacacgggggacagtcgcagatgctgacattggaggtcctctgacctgcttgtaacagcaggtgctcaggggcagaggggaaactgggggataccttcggaagcttccctctgaagaagagtagctatggtccttacttccctcttagatacggtctttacttccctctctttttttttcttggagatgcagtctcactctgttgcttcggctggagagcagtggtgcgatctcagctcactgcaacctctgcctcccaggttcaagtgatttttccgcctcagcctccctagtagctgggattacaggcacccgccattatgccccgctaatttttgtatttttagtagagatggggtttcaccgtgttagccagacaggtcttgaacccctgacctcaggtgatcacccacctcagcctcccaaagtgctgagattacaggcgtgagccaccacgcctggcctacttccctctctctgacctgcagcacagacaccctgttggggaaggtgggctggtggaggcatgggcaccttgacatttcacctgaaatcttcctttccacaggtcctgaggcacgtgaatggccaggatcagattgtgcccggcctgtacgcctgtggggaggccgcctgtgcctcggtacatggtgccaaccgcctcggggcaaactcgctcttggacctggttgtctttggtcgggcatgtgccctgagcatcgaagagtcatgcaggcctggtaagtgttttcttcaggagccagactatttgagaaggcgcaggacgttagaaagtcttttttcttttttttgagaaagggtcagcccaggctggagtgcagtggcacagtcatagcagcctcaacctcccgggctcaagcagtcttcaacacctcaaccttcagagtcccaagtagctgggactacagatgtgcaccaccacacctggctaatttttaaaaaaatttattttgtagagacagggtctcacaatattgcccaggctggtcttgaactcctagactcaaacagtcctgcctcagcttcccaaagtatcgggattacaggcatgagccactgcacccagccaggttacaaagccttgatttcttactggaaatttgcttagtgatcatatagaggtagtctgggtttttcccccagaagtgattaaactgagaaatccagaaattatatggtggtaatgttgagactagatagaggctggttggggatcttaacagttaaggtgacatttttggggttacatttttttttaattattttgcagtcattatgttctgtttagaaaaagcactattagaaagttgttatttttaggggaatcattacatattacttgcctgataaaaatcacttatttgcaatgaaatattttaagtagttggcatgaatgaatatgtaacttcttggtacttagaaaagtaatttaggccattctagaaacaaagtacagctagcctctattagaggagaagggatgacttacagtgaacaggattcccaccctttacggacagattggatttcacttgctggttttcttttcatgatagcatcaaataatgtgcagtaaaggaaataccatgtgtgggagtgtgagtcttacgtgcactaagaacggggcagttagcatctctcccacctccagacatcctcacggtggttatccagcctcgtgtgctcagaacagtgtgaggtggatgaggcactggtggatgtttgcgtggcaaggatggtgggaccccaggcccatgttcttcccgttacctttctctggtgttaactgttagcatcatttctgctgtttttatacaacaggtgctttttgtatggattcaagtgaaataaaaactagcacggctgtaacttataaacgtgcccccttttgtatctgtagttagaaaggtgcag

SEQ ID NO: 114232 - DNA, 1062 bp, Homo sapiens
actcatagtctgaatttcctaatttttctgtttaatttatgtaacttttaagtgaaatgcaaaacaacaggtctaaaagttaagcagttcttggtatggctgcttctatggattaaaagtttacaaataatattttgtgccacagtcaatgcaaaatcatgctgccgtgttccgtgtgggaagcgtgttgcaagaaggttgtgggaaaatcagcaagctctatggagacctaaagcacctgaagacgttcgaccggggtgagcagacagtgggctctgtgcacactgttgggcccttccttctgcagggtgggctggtgtctgtcccgtcagtgctgacttagttccgtgcttgctgtctggatgggtcctggcccacagctataaagccacaaccagtgactccatggactagcaggcccaggctgacagctcggagggcccatgtgactgggtcccgcctgcccctgatggaactttttgtgtccccaggaatggtctggaacacggacctggtggagaccctggagctgcagaacctgatgctgtgtgcgctgcagaccatctacggagcagaggcacggaaggagtcacggggcgcgcatgccagggaagactacaaggtgggccttctcaccacgcccacctgcacctgccttttcctgccacctggtgggactcagccccacccctgcattttctctgcattttctttcgttgccccaaaagtaaatccaaaaaatgcctttttcccccctggtaactttgatccctgggttctcgccatcttctggatcactgtgaccttttccttgctttgggtcggcatccactgatgccagcagtggcatctccaagccaatgtgctttgctgttagaaggccaaggttagaagtgcagctagagtggcaagaccaggaaataaatgccagtttattaaataacgagtaagccatcatttcaagcctgccctgtggaggaaatgccagtttattaaataacgagtaagccaccgtttcaaacctgccctgtggaggaaatgccagtttattaaataacgagt

SEQ ID NO: 114233 - DNA, 1050 bp, Homo sapiens
cacaggaggctgaggcaggaggattgattgagcctgggaagtcaaggctccggcaagctgtgatcacaccactgcactccagcccaggtgacatagccagaccctgtctcaaaaaaaaaatttttttttaataaaaacaggctgaaagaaaagattgaggtagtctcccagcacatggagcaaaaagacaaagtatttgataaactcttaggtacataaaggatgcttaagggaacatgcggacatggattactgtggactcactgctggctgcacaccccctggccagccatgcggcctccgtgggttctgaacatgttgatggtgccaacctcctgggctgaagtggaaatggaatgagttctagggcatctgtctcttagatcatgttaatgtctgctgtgttttttctgtattgctctgttagagtaataagaaacgtgatggtgtttctggcctcaggtgcggattgatgagtacgattactccaagcccatccaggggcaacagaagaagccctttgaggagcactggaggaagcacaccctgtcctatgtggacgttggcactgggaaggtcagtgtggagctcgttctcaccacagcccagcacccacacggccccgcccaggcctgcgggctggccttgctgatggtgaacggggaagagcaggccagatttaaatcaactcccgacagattcgaggcaccgctgaaaaaggcactccgacagcagtcgggcttcgggctggaaacagaatccagttcctgcaggtggttcagaggagccttaaggaagggttgctccgtggtgtgcgccagatggacgtcactgggcaggagcaagtgtccaaggcctggtggtaggggaggagatgatgattgtggacctagcgagaaagcatctgtggggtggggacacacagccattaccagaaaccagtcccacgttaagggagcccagaagagacacctcccctctcctcccacgggctgggccaactggaagcgtctgcaggggagctgaggggatgtggtgcagcctttagca

SEQ ID NO: 114234 - DNA, 1221 bp, Homo sapiens
tcctgtgtgtgcatatttaatacacagcttgagtattccttctctgaaatccttgggaccagaagcgttgtggatttcaggcttgttcagactttggaatatttgcattatacttactgtctgagcatccctaatcggaagatctgactccatagcacatttcttttgaatgtcatgctggtgctcagaaagtttcagattttagagaatttcagatttttggattagggatgttcaacctatataaatatttactttgaagtagaaaaactggaagtagatggtttaaacataaagtgtcttggtatagacaagggttctcccactttacatgatgggagcatttttgtaaagcactgagaatcttaaagttcacatgccataaatctacttttatagttaaaatttttcaaaaggaacacaagagatggctttttgtacatttttgtgcttaacttaccactgactcttcttttcaaggtcactctggaatatagacccgtgatcgacaaaactttgaacgaggctgactgtgccaccgtcccgccagccattcgctcctactgatgagacaagatgtggtgatgacagaatcagcttttgtaattatgtataatagctcatgcatgtgtccatgtcataactgtcttcatacgcttctgcactctggggaagaaggagtacattgaagggagattggcacctagtggctgggagcttgccaggaacccagtggccagggagcgtggcacttacctttgtcccttgcttcattcttgtgagatgataaaactgggcacagctcttaaataaaatataaatgaacaaactttcttttatttccaaatccatttgaaatattttactgttgtgactttagtcatatttgttgacctaaaaatcaaatgtaatctttgtattgtgttacatcaaaatccagatattttgtatagtttcttttttctttttcttttcttttttttttttgagacaggatcggtgcagtagtacaatcacagctcactgcagcctcaaactcctgggcagctcaggtgatcttcctgactcagccttctgagtagttggggctacaggtgtgcaccaccatgcccagctcatttattttgtaattgtagggacagggtctcactgtgttgcctaggctggtctcaagtgatcctccctccttggcctcccaaggtgctggaattataggtgtga

SEQ ID NO: 114235 - DNA, 1031 bp, Homo sapiens
tgccctggcccagagaaggggtccattcagatggggtggggccttagaattttacttttggtttacaactttatgaagagaccattagaaaccacttgaattcacatcatgaaaaaaaatccacactgtaaaaaaggtttgtagattaacacattaggtgaatgccaaagccacagaatatctaaatttctctgaggaatttgaaaactctcaggtatatgccttgtggacaagagagacagaaaaatgggacagaggatgagatagtttggagaatggatagctgatcagatctgtagctgtgcccagagtgctgaataatggatttgcgtccacagggaagaaagtctcaggtgccactgataaaagaccacgtccttggctctgggtccattcaacatcttggtagacaactgagtgaaaattcagagacaaccctaggaagtatgaggatgaaaaaagttagcattcatggaatgaggcactgaagaaactgaaaagctgaaataaccccatgaaataatgagaataattgtagtattctgaaccggggcacaggacacaggaccggggtggaaggcggcacgagactacgcgcgtgggaaagacccagggatcacagtggcccaaagctgggcacttcccaattccgggatttgtgctacaggcactccaggctccaccttagaactgtgtccagcacgaaggcagtgctgtcttgcgggaggcagggctgcaccaccaccggggtgtgaaggggcccagcaggcaggggtgtgaaggggcccagcagtgtttccagctgcacggggtcaggggccgcgctgatgcagagcacgggggcgcaggttaaacctaaaggagggaagcttttgggggcggaacagacaaccgagaatgctgcacactgcctttcccacccgaattgtgttttgacttttttttttttttttttttgagacagagttttgcacttgttgcccaggcctggagtgcaatggcccgatctcggatcactgcaacctcctcct

SEQ ID NO: 114236 - DNA, 1063 bp, Homo sapiens
agctctgggaattagattcgcgttctaggccgagacccaggagccaggggagctggggccacttaccttccccgtgcctcggaagctgagtgtgaagctctgctcttctttctgtcgtggctgcggctggatttcctcacacatcccattgcacggcctgcctcacagctgcaagtgcaccttctcctgggacttagggggtcagggctgggggacaatcccccacacccccacccagggcgaaggtgacaagactttaagggatttcaccccattcacagacaggcatgcattgcccagtccctggttagtggtcagcagtggggccccgccaggctctgagggctgaggtctggtgggaagcctcaagtgagtttgctgcaactgatcttttgctgcttgaccgttcctctctgtctcagccatgtttgaccgtgagaacaaggccggcgtgaacttcagcgagttcacgggtgtgtggaagtacatcacggactggcagaacgtcttccgcacgtacgaccgggacaactccgggatgatcgataagaacgagctgaagcaggccctctcaggtttcggtaactcactcactctggcttgtgtagcgtgtttcattttggaaccttggagccgttgaagttctttaaaccttgttggacttaactgattgtctaaccaggctacgtaaagtttttgttgacgtcatgcaggttcatatttgatattgctcatgtcggaaggcgatcctcgacatggatacgtttattcaggtttttatccaaaatgagataagggctatgcaagccgttcatcttttctgaagtggaatgatgtcgtgagcaaaactgagaatgtggcttttgaaatcatttaaaagtggatccatgaaaataccgtggggcagggcagcttatatttcatgatagatcaaagcacgttgaaaaggcaacagtcacctaagaaacagctgtcagtcaccaggtccaaaccgtgcgcctcagaaggggcgttaggcagaacgcgtgcccattctcaggtgtgctcggcgtgtgtgtgctcg

SEQ ID NO: 114237 - DNA, 1160 bp, Homo sapiens
agccctcccaggccacctgcagctcccagcctgtgctgtgcaggcagggtcagcccatcgccacagtgcactgtagaggccagcacacggcaaattagaaatacaacacgcggagaaaggggtccgtgagcccactcatagaggaatctagaacgttccaggcagcagaggctggcagcgtgggtcccacactgccccacaccgtgcggcaggtgctccatggcgccatgacagagtctgaggccagacctggactggaattgacagcataacccctgttccttctggacatctcccgagttctcagtgggtctctgcggacggttcttcctaatctgcctcttggtacatcacgtaatacagagttcacagactccgggtttggaagtacagagaaacacacaacgtagagagaagacacaggaaactgcgctgcctgtgggggtttctctctggctggctgtacagttcactcaaatgagggttcccattgccatcctaggagaataattagggacaagacagacaagtattaatagcattaaaacagttgtaaaggcgatattttctgagagtaggaaatttggatacaaaagcataagtcagaaagtgaaggtcaccaatccaccaacccgagaacctacagctgatggtgcatttcaggcttcttccacggtctggcctggaaccccacccggctggtgcaggcatcagatcagggtgtagaagtcaccccaagcaagaggaagccaggcagtgaggccctggggtgtggctgcagctgggcccacctgtgcgggggtgggaaggccccatcctcagggagagggcatcggcgccctgacgtcagctccactgggagtggcaggagctgtgggagcccatgggtgagggacccaccaccccgctgcactgtgcattgtgcctcccgtgtggacgccctctctgttgttggcccgcgggtgagggacccaccacccctagggacccaccaccccgccgcactgtgcattctgcctcctgtgtggacgccctctctgttgtcagtggctttgaggtgtcagtgcttacttagatgctggtttaatgctggacccatttgttaaacgcaccttcactttgtcaaaacccaggtttggttggcaggactgggtcttctg

SEQ ID NO: 114238 - DNA, 1040 bp, Homo sapiens
tgtggtacctggtcgggggagttgtccacgctgtatttgtcttcactgagggtcctggtgcagctgcccacaggcctggccaaggtgctgggggaaagctcccgaaatgagaaaccagccctgtcttggggagagatgtgcctttgaggctgacatctacatgctgggtggtctgggacccacatctagaatcttcgcaatgtccatgtctctcatgcctgtgaaacgcccctgctctccccttaaaggtataacttctgcatgtttgtgttacgaaggtttgtttatcttatcaaggagttcctcatcctagttcagctttctttgaggtttcctggattaatgatctcagaggctctgcttgtagctccactgtgatcacctgatagtttgggggaggttttgtacctaacatttctaccgtcctaacaactcctgcagtgcacagagaacacccctagcatgaacagtgtgaggattccaccagctttttcaccatgaaggagacagaccgggaggccgttgcgacagcagtgcaaagggttgctgggatgctccagcgcccggaccagctggacaaggtggagcagtatcgcaggagagaagcgcggaagaaggcctccgtggaggccagattgaaggtgaggccacctgccccactcccaggatctgtcttgggcttcaggttcttgcttgacatcaccatgatgattttgctaaactagcctttatggtaatgtgcaaggaggcagagctggactttcttgagcagttactttcagcagtgtattaccactcagtagctttgcttagaagacagtgggaatggtgaaaacaccaaaggaacaagcttttaaacaccctgaggccgggtgcggtgactcatgcctgtaatcccagcacctcggggaggccgaggcaggcggatcacctgaggtcaggagttcaagaccagcctggtcaacatggtgaaaccctgtctctatgaaaatacaaaaattagccaggcatgatggttgacgcctgtaatcccagctact

SEQ ID NO: 114239 - DNA, 1049 bp, Homo sapiens
ctatcattggctctgctcacccgtgtggcgtctctctttaggccgccatccagtcacagttggacggggtgcgcacaggcctcagccagctccacaacgccctgaatgacgtcaaagacatccagcagtcgctggcagacgtcagcaaggactggaggcagagcatcaacaccattgagagcctcaaggacgtcaaagacgccgtggtgcagcacagccagctcgccgcagccgtggagaacctcaagaacatcttctcaggtaccagccagacgccgaggcacttgcccccactcacgctgtctttgcatgactcactgagtgctctgtgtgcagtgtgctttgcagcccgcactgtagacctgtagacggtaagtgtgattcttgtctgctcagcgtctttttttgaacgtggatggaagtgatcagctgagcatgtaaaggctaggagaaggcttgtagttcagtgtcaggacagaggcccagaagcgggctgcccagcaaatgcagtgtggagggattccctggctgagtgtcgttcccttgcttgcgatgtggctgttagactctgtgagtgcagaagaatgaagacgccgtggcccatgcttaaaaggagctgcaggagaagccaccctgtgcatgggacagagcaagcagatcccagagcagaagggttgaggcgagcagcagctcccaggcaggaggagaagcgtgtgtgcacaggccagggcagaggcggggctgagcgccgtgggggagtgaccctttcagtcttctccctgaatgcctcagttagaaggatgccaagggccctgtaacctgtccctgaacggtgccagctggccctgggtggtggctcccagcatttgtgttcacagtctcctcctgcttgctgtgacaggagctgcttccacagcctcatccctccccttggtccccgctctgtgtcaaggtcagcagcatccttccagtccccaactcagaagccttggcagggtctgattccttccctttctttgttcctgtctctggcctcttggcaagttctt

SEQ ID NO: 114240 - DNA, 1044 bp, Homo sapiens
atttgggctaaaccaactgaacaggattattgcgaaagagaggccagggtgagcagacaccacctatgggatctggggatgaggaacctgagcagatactgagggtgggggttttggccgcactaaactggactttacaaggaagggcacagatggccgaggagaagattcaggagcctgagtaaagttgaattaaaccaagaatctgtgtcagtttctactccatatccaacaccaagaacttgaccgttattataattgttttcaaaataaaagattaaaatcttacaatttttctattcttagctgagcttcagtcattgtctattcctggaacttaccaagagaagatcacccacctgggacattctctgatgagtttaacaggtctgaaatctttggatctctcgcgcaactccttggttagtctggaggtaagttttaggtctctttcttaaaatttattgctatcaacatcagtggaaagtccattcacagcagaaacggagtctgttttgtaaccctctgcttacatctgtatacggtacactttgtgttgcgtatttttgtgtttaccgtgggctacatttcatacacatcacgttacgttgtgttgtcgccctctgatgacgatgattatatctttaaaggaaatgaaatgagaccccagagacttactgagtggcagtgcagtgggcctggggctgcctcctgggctcctggcagggtcaccctggagagagatgcctaggtggtggtgaggggagctgtgcacaactaccatggcctgattggccctgacagaaccgtgggatgcgcctgccctgagcccgatgcctgagcattatggaggctgcgtctgcatggcctgattggcccggacagaaccgtgggatgcgcctgccctgagcctggtgcctgagcattatggaggccacgtctgacaccagctcgggagtctgctccaagtcagatgcggacctagcccaggctacacccagtgctgcctcatctttccccgttcccaggcctcagctttctcat

SEQ ID NO: 114241 - DNA, 1440 bp, Homo sapiens
ataggcgcctgttttatagtgtttatttggccaattaaccaagtaactcataaacagttgagtttggctgtttcaggagctacagtccttattctaggtaatttttggagtcttcagttctaaatcattgcctctgtaatccaagttttagattcagaatcttagtgtttctgcagagaaggagcgcagccgtctcccctcttagtgtttctgtagagaaggagcgcggccgtctccctcttagtgtttctgcagagaaggagcgcgaccgtctccctcttagtgtttctgcagagagtttctgcagagaaggagcgcagccgtctccctcttagtgtttctgcagagaaggagcgcgaccgtctcccctcttagtgtttctacagagaaggagcacaaccgtctccccgcatgtgagagatgcttcctgcagtggcgctggcagtcagaggcgctgcgggaaccacggaggtgcggggccccgggacggcctgctgccctgcgtggtgcctcctggagtgggctcggtccttggctccgcgtgggtcatggaaaggccccggtggtggaggaggcagatagcaagggcctgcgtgtgggatggaggcggcgtctggagagaccttgccagcaggagagggtgggcttggggtgaaggtgagtttgcagttggcttcggacatgctgcattagaatttacacaacagtccagagaaatgttcttggagtacgggatttggaactgactcagaagggaagcgagtcttggtgggcagagagctatgcgtcgttagtgcggggctggtgaaggccggggtggaaaggttgcgggagggtgggattgggtgcaggtctcctggcgcacgtgtctcctgagggtgccctgtgtgctgggtggagagtgccccaggttgcagaggcctctgactcggcatctttgtgtgattatcagaactcctccgtttttctgctttgaacattatattatgctattactcactcatttcttacagtgattctgtagtttttggggcgtgctgtaggctaaatggaggcagcgtgggaacttgtcacagaattcacattacaaatgggggttaagatgtgttgtaagttccaaagcgccaaggttgaaggcctggggaccttcttatcttcagggatttacatgaggaagctccaggagttcttgggtgggagcctggtggccccaggtacgcacgtccctgaggcccagccctaagcacagacccaaaaggcctcctggaagttgcagcctctcgggccgggcaggctccctccgtggaggcttctctgggttacctgagtgtgacttgagaatcccaccccgcacccggtgtgcactttagagaaagggtgtgcgtgtgtgtgtgtgagcctcatctgtgtgcggctgctcccgtgcgcagcagtgagctc

SEQ ID NO: 114242 - DNA, 1028 bp, Homo sapiens
gaggcgtggactgtgaggcgtggactgtgaggggtgactgtgaggcgtggactgtgaggtgtgactgtgaggtgtgactgtgaggcgtggactgtgaggtgtgactgtgaggtgtgactgtgaggcgtggactgtgaggcgtggactgtgaggcgtggactgtgaggcgtggactgtgaggcgtggactgtgaggtgtggactgtgaggtgtgactgtgaggtgtgactgtgaggcgtggactgtgaggcgtggactgtgaggcgtggactgtgaggtgtgactgtgaggcgtggactgtgaggtgtgactgtgaggcgtggactgtgaggtgtgactgtgaggtgtggactgtgaggtgtgactgtgaggcgtggactgtgaggcgtggactgtgaggtgtgactgtgaggcgtggactgtgaggtgtgactgaggcgtggactgtgaggtgtgactgtgaggtgttactgtgaggcgtggactgtgaggtgtgactgtgaggcgtggactgtgaggtgtgactgaggcgtggactgtgaggtgtgactgtgaggcgtggactgtgaggtgtgactgtgaggtgtgactgtgaggtgtgactgtgaggcgtggactgtgaggtgtgactgtgaggtgtgactgaggcatggactgtgagttgtgaatgtgaggtgtggactgagagttgtggactgtgagatatgacctgtgtgcagtgtgaccaggggagagaggtgcatgagagatggtcgggcacggcggggcaacctggttcccctgggcggtagtccggcagctgtgcttcccccttcactgcagtgcgtgttcagttggaaacacggagatttcacctttactccctggctatagggggatggtgagaagggggctgggtgtgaggggatcttcaaggcagaatcttagtttgtcttttaagaattgtgtgccgggacgtggttggaggctgggtgcagaaaggaagaggcgagctgctggaggaggcaaggacaggtcgctctgggcagt

SEQ ID NO: 114243 - DNA, 2002 bp, Homo sapiens
gttcctccccctcccctccccctttcattccctcttcctttcccccgacctcccattcccgctccctcccccactcctcaggctgaggctgccacacttacctgggttcgaccacagtctggtcataggcgtagccaggctctgccccttacaggataaaggccacagacccccatggggcccatcacaggtgtaagttacagaggggaagggtcctgaaagatgagactgggccaagaggagatgcagcggagcagaaggaaggggactgtggcggccgcgggtgcagtgcccagtcgtgggcagggccatgtgactccctggaacctggtgggcctgtctgtggcaggtcaaggtacagttgggggtcattctccttgagcactgtggcctggatgtggacaaggcagggtgcacagctcccaaacatggtggcattgggcttctgcccccaggattcatgctggcttcatccagtcctggcctgcggctcctttgctgtccaagtgaacagggcctgggcctgcacagtggccctgtcagtggggtgcccatctctgtggctaatgtgaccgaggtcagtgggccctgccttgtctaatacttgtaatgccctgagtgtcctcaggtcatcgctgactgggtgattagggcaatttggaggtgacaaagtgggtaaaatgtaatagcactttacttctaaaataaaaatggtcaacagcattaaagactaggactcttctattgcactattatgatgtcaaaattattatatttgactgggaattagaactatttcagtccccgtatattttctagaattagaacattgttttgctagccatgaagtttatcatcttctcataaaaccatgcgtagctggaatagccaaggcgccattcagtcactcattagcctgttcagctcattcattcattccataggtgctgagccgcacctccaaggctgctcccaggggtcaggacagtggttgggaaggaggaggcaggtgggcggtagccagtgggacacagaaggtgatggggccacagagataggtctgtgtgcagggccagggcaccttcgtgcccatgcagggaggtgggcaggcccagcaggtgagggccacaccgctggagaggacggaagtgccaagcagccgcttccctgttgttctgcagctccctggtcagcaccaatgaacacctgctgcaggagctgagccaggtgcgggcgcagcacagagccgaggtggagcagatgcactggagctaccaggagctcaagaagaccatggccctgtttccacacagcagcgccagccatggaggctgccaggcctgctgactcctgccgagaagctgggccaccccttaagcttcctggtaaagttacattgtctgcacctttgtacttctttattgagtgtactggctggcaagagttctctcttctgttggtaattatttaggatttttggaatgtattcaggacctgtagcttggttttctaaagcacctcgtaaaatgatatgattactccaagccctctgcatgttttcagacagaacacattgacatattttgagacaaactgactattaatcttgtatccagtatcctgagatgaagtaaatgcagtgttctactgcctgatgtgaaagagagctatgtatgataattaaagaaaataattttctgtgtaacaagcaatctttatttaataaacaaatacattgttctgaaaagttaactttttcagtggctgtatacaaattataactgagtttgtcattgagttttttatagaacaagctgtgcaccatgataggtgagtgggaataattaagttcaaagacttaacacaagtgacacttatagatgtgggggaaaaaaccttaaaaatattgtcttatgatattaacatatcacagcggaaacatctacccaagccctggctcgctctcttgtttgcagtgtagttctgaaaattatgtcataat

SEQ ID NO: 114244 - DNA, 1045 bp, Homo sapiens
ctcccggggccaccacagccccgcccagctgcgccgggagctgggggtcctaggacctgctggggccccggctctgcctgtgtgtgttggggtcctaggtggaggtgtcccccacacaggaacatggttaggaggggctgccgcccccggacacttggcagcatgggcgcaggcccacgcctcagatgccctggctccaaaacccgccaggcggccccgctgtgcccttgcactgctctggcctcagaggtgcagagcccggtgggccggaggtgccatgagaagcttctggtcacacaacacgccacatctaaacacagtccacgccttacaacatcctcccaccacaggccattcaggcaattttagagggttctaaactgactcttggtttttatataataattctaattagaaaacatttttctcctctgaccagatctaccacaactaacccaaagtggggtttttcagtgtttaaaacaagagatcctgtggatgaggctcagctctgcaaaaggcacctgcatttcaccagggaagcctctggacagcgcgagaaaggctgcacccagcaggccaagcattccgagggcactcccagctgcagaatccacagtgaccaagagtcaggggacaaatgacccataaaaccccagcaagcctttccagaagtcagtgagcagagggcctagaatagccaaaacgatttcaagaaatgagaacagagtcagaagactgactacccaactccaaagctcatcgaggcttgactgcaaagtggcagcgacgtgggcacgggcacgcggccagccccgcagcccagggggagtctggctcagccacatgcatgctgcccccccgatgtctacaggtgcagaggcaagccagagagaaaggactgtttcttccacaagtggagctggagcaactggtgatccctgtgcaaattaaaatgcactttggtctatactgcacactatatacaaaactaactcaaaatagatgacggtcctaattatgaaactaaaacttctagaagaac

SEQ ID NO: 114245 - DNA, 1028 bp, Homo sapiens
agcaattattgtcctgagcagagaggcctgtctggatgggcagtgtgctcctgcccttagggtagacgggccggctgagctcagccgacgtggggtcatgtcctgtttacacagggaaggtgaagaaggagctggaccctgacgacagccatttgaacttggatgagacgacgaagctcctgcaggacctgcacgaagcacaggcggagcgcggcggctctcggccgtcgtccaacctcagctccctgtccaacgcctccgagagggaccagcaccacctgggtgagatgcccccacccacgccgcatccccagagaccccagcacagtcagtgtgacgtctagacgaggtagtgggcagcattgtagttgtgggaaggctggaggctgcatgggcagcggtgctgttgtggaggtcggtttccacagatgtccttgggtcgcggcctcggtgcagagccggagcggagctgggatgctggcctggccgcacgctgggttacaggctttctgccagataccgtccccagttctgtccacccctgtgccctctgtggaccctggttccagtgtttctgctggggagagagcatggcttccttggccatgtgtcctggagtggttttggtgggtggggttttgttcccacttgtaaacactggatcactctgtcggcagagtgaatcttggcagttcttcagctgcagaggtttagctgcaaccatctgcaaaaaggccggtattttcgattccattgaccttgtgatcagggtgttaacagtgcatggagcaggctttggagggccgtaggtcaaagtctgaggcccccgatatcccagtatgactttgggaactgccctgaggtctgggctgtgtctgagggactcctggccaaggagcgttctctccttcagaagcagcatccgtgctgtgtgctgggtcagggcgacccctggctccagggtctctacacacagctctccttggcagggagtgagaggtgcccctgtgtcctgggagtccctgagc

SEQ ID NO: 114246 - DNA, 1048 bp, Homo sapiens
cccttgaaggaactcaagattttccttgatttccatgcttggagggctcgcaggcccctgaagagagggttgcagccaggcgggagtccccaagcagatttctgcagctctgaggagcagccccctctgcagagcctgccccaccagctcgtggttctgactctgagctctggtcaccctcccgtgtcgtggcctgcaggctccttccaggcaggaagctggcccccccaacacagcgttagaatcaggcattgctgtggggtagggaaagtgaccccctcacagcccggaaatgggaaggctctgtggtttcctctctgggttccagttagattcctttcgggaaagtgaacttggatatggagttgagtgaccccgagtgcacccccgcagtaaatgatgctcaggactaaagtgactgaaggcttttggggaaacagatgcgaacaaaacagcagtattcattttctaattaaaagcttgtgaaaatcgatgtcattgaatctgagaaacattatttcgaacaaagatcacacatgatagagtgcatatactacagcatcgctccaccggagcacaggacgggtgtgccacggaggccgacagttgtggaaggagacaatgcacggcccggcccacctgctgcaggcaccgccaggaggtgtctgcctccttcgctcctgcgcccacggcaggcccacctgccacaggcactgccaggaggtgtctgcctcctttgctcctgcacacacctgcccctgcaggactcgagctggtctcaggcaactggtcatattccaggtggaacccacgagacccttcttatcctaagcttcccataggatctaggcacatcttttttcttttgttttaagccacccaaggctgccgaaacagcatcggcgtcctctctctgtccgctccatctcgccctgtggagcgctgtccccggcacacaatcctggcgctgaggagggggctgggcgtggttgggtcagtgactggtgatgaagaaggtttggaggacccccagccttaatccattaag

SEQ ID NO: 114247 - DNA, 1047 bp, Homo sapiens
attgtattatattttattttttaagctgtttcatgtatatggccaagaatcaggatggtactaaaaggagtgccttggaagtgtcggcccacccctgccccacgcgcccattcctcaccggcaggcactgcccactggtgtgcttctgtccacacccacttgtgtttttaaacgcataacgagtggaaagataggagtattcttttacagatgataacatagcacacgtgtgtttctaggctgtgtgcatgtgtattcatgcttttctccctctccccactgagatctttttaacctttttgggtcatggaccactttgaaaatctaatgaaaactatcagccactccccacaaaatacccgctctgggagggtcacggggaccgaggagctgcgctggcacggcaggcttctgtgatcagggctgccgcgagggccaggcgacaagggctcctttcagcgtaccttctcccgcggcccctctagcctgcaggagtttgtgaaggatgctgggagctacagcaagaaagtggtggacgacctcctggaccagatcacaggcggagaccactctaggacgctcttccagctgaagcaggtgggctgcactcgcaccggggttggggggcaggtgcccttggggtgctgctggcgggaagagcctgcagcctgaccaggctttcggggacgaggagctgtcgcagggactctgctgccggctcctcgtcaggatctgcgtgcttctctgcacgggcaggtgtcccccggagaccgtgactgtgtgctcaccactcccagcgcactcgtaactctctatttccatcttcatctttcatctctgtcactttccttcatcctgaagagtttaaaaaaatatttcctgtagttcagatttactgacagtgatctctcagcattggcttctctgaaagtctttatttcatcttcatttttgaaattcattttccctgtgtatggaattttagatgaccttttttcccatctactgtaaaataggtttgacttgcattgttgctataaaaaagca

SEQ ID NO: 114248 - DNA, 1121 bp, Homo sapiens
attcgattctgtggagaaattctagagatagaggctatcactgtgccgcacgcctgccttcatcccttgacttgcacttgaaagaatcgggtcgttgcttctcgttcctgtttatgttctggagaaatgcaagaagcgcaggaaacgctttttcctcacacagcatttgtatgtgatgcttagaaagaagttacaggcttggccaactgtttgctgtaatatttttcatgcaagaccaatgtgcaactaagaaaacttctcttaagttcttaaacgttatgtttagatcagagagcccagttgaattgttttctactcgattgtagctttttccttttggtctcttggtagtcatctagagctttgctgttgtctgtggcatttcaaacctgataagtctttcctgttttcttttcaggcagatttcaagctgatgtgtgataatgcaatgacatacaataggccagataccgtgtactacaagttggcgaagaagatccttcacgcaggctttaagatgatgagcaaagtaagaaactcactggcagcagcgagctacggaaagcaggggctctgccccccgtcgcttgtgcccgaagggagcctcacagtgaacacgtgctccatccacccgccaccctcatggtgttgccccctttgctctagggtagacgtccccggccgccctctctgctcatgacctagctgtaacatctcattgagggttggtggaaagttccgcatctcttgatcttaagcctgggtgtcaggtgtcagtcttgctggatggcagccagcattgcgggcttgttttgcgtgactgcctcactgaatccagacgggacatccttgtcttccttggccatcctgagtggcttcccagatctgtgccgtgagccaggctgcatgcatcccacgtaggagaaggtaaaggggaggtgcggcacctgccgcgctctggcggtgggtcaagcccccacaaccacctcccgctgctccgccgtggaaagttagctcttaggccaggtgaggctgtgaccatccccatcccatcccatcgtcacggcaccctggctgtgagggagaggtaaatccctgctgctctgtcctttctgattcta

SEQ ID NO: 114249 - DNA, 1091 bp, Homo sapiens
ctgaaatacctatcacaataaattaaaagacgctcgtaacttttttatttttaagaaacaaaattcggtcagttgtatccaatttttggattgtaagagattttgtatcatttagaaatctagatttttccgctttaagatgtctttgctttcagaaaagatccccatggattttttgcttttcctgtcacggatgcaattgctcctggatattcaatgataataaaacatcccatggattttggcaccatgaaagacaaaattgtagctaatgaatacaagtcagttacggaatttaaggtaagttactttcattgcccgaagtaatcgtggcatagttctgtgtattcatgtcttgtgaagacttcattcaccttagatcatttctagtttttgagctttcacaggtgtttctgtgttcggatgatgttttacagacacagcattaaggaaatgattggtcgtgaacgttttctctgtgctttggtctagaaactaggtcaggttgcacgctgttagaagtctgtttcttttctttctaagttactgcgctggcgtaaataggacatgttgtttcaagcagtgaggtgtccggtgtggcacggcttgagactagacatttttaaaaacatacttctttttaattcttagttttgtcttacactaattgagcatttagtttttttagcatagtaagtttttctgtctcctgagtactttgctcttagctctgtttcttgctactggctgtgagaattagcaactgctcattggttttgcaacccaggggaagaaagcaaaacaaatgcttgataaagttggcattagtgtagtttagaaaggcattagatttctctcttaggttccattcccctggggaaagcttgacttttctattttatgcttactgaagggtttgctgactcacagaaacacaacagaacagacttaaaggagagtgggagaaaaggaaactcgatgagaggatcaggcagcgcctgagggtagatgttaagagcactccatgcccgaaagccctctgtattccctgcttcgggccccagtctggccattcctagcaacaaagtgag

SEQ ID NO: 114250 - DNA, 1021 bp, Homo sapiens
gagactagggaagcatctgtgctggcttttgtgtggagctcagggagaagctgggctgccctttctcccgcctttccctccctctcccttgctcccgcagcagctccatgggtgtcagcgggcagcacgggcgcctgcaggaagtcaggcgagggtgaaccgaagtgctgggggtttctaggagggagatcgggctccggggttccaggtccctcttaatccatcttcttgaacgagtaatgtgaacaacatcccacagggcctctggtgaggacaccgtggctcgaaagggacctgaagctccctgcggaggggaagggagaacaaggaggcagtgacatgccgccactgtggtcttcccttccgtctttccctgctggttggcagccccgctgtactccttagggaggcctttccctcttagcaccttcacgtctcacctggctgcgtggcgtttgcacctgagcacgcgggtagaactcggtctgtgtctgtgcagattatgccgacaagcccctggagaagcctctaaagctagtcctgaaggtcggaggaagtgaagtgactgaactctcaggatccggccacgactccagttactatgatgacaggtcagaccatgagcgagagaggcacaaagaaaagaaaaagaagaagaagaagaagtccgagaaggagaagcatctggacgatgaggaaagaaggaagcgaaaggtaaaggagcagcggcggtggcccggacgctgcccacgaggagcccgtggggagcctggtcccaggacccaggcagagtgcgcctgcgtggctggaggaggggagggggtgttccgttggtagcaaaacgcgaaccgctgaggcccgcagactcagttccaggatcctgggtgtgctgttcctcagcagaccctgccagggtctctgtgaggagggagcctggcatgaggaggatctcggagggggtttcccttagttctgtccctcccctgagaactgcgaggggattgggcagacctgtccggat

SEQ ID NO: 114251 - DNA, 1070 bp, Homo sapiens
attgctacaaattaatgattaatattcatatataatcatatctaagatctatatctagtataattattcttattttatttattttattatactggaacagctcgtgccctcggtctcttgcctcggcacctgggtggcttgccgcccacatcatgctaggggacgcttggcaggcaggcgtgcaagaagagtgctggcctctgcctcttctagtatggggtatgagcccactgagaattgtcttaggaaagagggtggttctgggggcaacaggaataacacatgacccctccacctccatttatcaagaaaggtgtgtttgatctctgaaaggtgccttgatgagtggatttcataaaggaagagtggggacaaggacaggtgtcagcaaagatgtaggctagaaaatgcaatgttcattcccgacgctaagtgagactgtaggccgagaagctgggagcagtgctgggggtggggaggcgatggaggctgagaccagaaatacgaagttgagtacaaataagaaagagggggagacgtaagtgtattggtaatatttcatagcatttaagtttctaagcagacttcattgtagtaataacattaatagcttttaactgtattccttatattttatggataatggaagttactgttgttttaagaaatttgttgtagcactgacttaaaaatatatttgcttggatctttgtcacaggtcctcctggcactggaaaaacatccctgtgtaaagcgttagcccagaaattgacaattagactttcaagcaggtaactttcggtaatctgtgagaggagagccatgggaatgggatttataacgggaggttgtttttttttttttctaaatcattttacgcaaataatagattcctctccactgtaagtcacttgattcctctgtattcagcatagttttgagttatgatttcagtcttttaagatttgagacttacttgattgccagcacatgatctctgctggtgaattgcacttcagaagactatactttctccccttgctggatgcagtgttcgtctctaattacgg

SEQ ID NO: 114252 - DNA, 1049 bp, Homo sapiens
ccatcctggctaacacggtgaaaccccgtctccactaaaaatacaaaaaattagccgggcacggtggcgggcgcctgtagtcccggctacttgggaggctgaggcaggagaatggtgtgaaccggcgaggcggagcttgcagtgagccgagatagcaccactgcactccagcctgggcgaaagagcgagactctgtctcaaaaaaaaaaaaaaaggaaagtgagatccttgccaaggttgaaggcagtgagggaatgagcgaagtggggctgtagaattcccagaaggccaaggagcagcgagagcaaaggctggggggtctgcgtggcctgtgttggcacaaggccactttccttcctgttggcagcctgctggccatcgtcctgccaacctccttgccagatagggcaggatagaattgggtcaccgacagccgtgatgactgtggtgcttgcttctcggccacaacaggcattccaatgttgtgattctgaccacttctaacatcaccgagaagatcgacgtggccttcgtggacagggctgacatcaagcagtacattgggccaccctctgcagcagccatcttcaaaatctacctctcttgtttggaagaactgatgaaggtacctttattttttttttcctcttgatacaaatggatttcttatatgttcttaattaattaagatagcttaaaataagctcgttccagtacggaggatttcaacatatgcattaactcccttcttaaattgaaaactagttttgtatgtgacaggttgagctgatagttgaaactagggccactgactcaatatttttgttcttttggcacaatacagtcatcattgttcattatttgaggtaccagtcagtgtaggggacgtcagtgaccggctgtgtttacctggctggctgcacaaaccttagttctcagcttaccccgggcttttccaatgccctgcctctcgggggcctgtatccttacctgaaagaggaaacatcacgggcgtagtatgggcctggttttggtcacggggtccacat

SEQ ID NO: 114253 - DNA, 1054 bp, Homo sapiens
gaaagaagcttgcagcttacatctgatcctgggcttccccatctggtgcttttcccatggagaacacacaaccagtaagtgaggttgccccacacagccgtctcccagggaatcccttctgcaaaccaaacgttacttagactgcaagctagaaagccaccaaggccaggctttgttaaaagaagtgtattctatttatgttgttttaaaatgcatactgagagacaaacatcttgtcattttcactgtttgtaaaagataattcagattgtttgtctccttgtgaagaaccatcgaaacctgtttgttcccagcccacccccagtggatgggatgcataatgccagcaagttttgtttaacagcaaaaaaggaagattaatgcaggtgttatagaagccagaagagaaactgtgtcaccctaaagaagcatataatcatagcattaaaaatgcacacattactccaggtggaaggtggcaattgctttctgatatcagctcgtttgatttagtgcaaaaatgttttcaagactatttaatggatgtaaaaaagcctatttctacattataccaactgagaaaaaaatggtcggtaaagtgttctttcataataaataatcagacatggtcccatttgcaggaaaagtgcagactctgagtgttccagggaaacacatgctggacatcccttgtaacccggtatgggcgcccctgcattgctgggatgtttctgcccacggttttgtttgtgcaataacgttatcacatttctaatgaggattcacattaatataatataaaataaataggtcagttactggtctctttctccgaatgttatgttttgcttttatctcacagtaaaataaatataattaatggtttgcatgtgaaattcacttttgaaagaacatgttaccttaccttttgttttagaagttttcaagtattaaaatattttttagaattttcttgttttgattctaagtatctcttccaagtgcttttaattttactaaaaattactcacatgattacttaactttaagcctg

SEQ ID NO: 114254 - DNA, 1845 bp, Homo sapiens
gggcagagccctaagcgttacctttatgtgtttggagtctctgtgagcctgtgtttgtggatgggggtggctctgtataaaggggacctgtgaattttcaagttagccctgggctggaggatgtgtgagatgctggcccagcctaagtcactgccacgcgtgtatgcctcagtggcaccagtcctacctgtggcgcgtggcaggtcagcacttggcttacctgtgggtctgtgggagggtgctgggaggccagcaagcagggccaccttcggatggctgctgaagccaagagaggcacccacaccccctcagtgggaaggcaggcccagagcatcgtcccagctcaggctcgacgtgcacctgtctgcaggtgctgagcccggacagtcccacactcctatcctggggacgcagcttgcaagtgctggagaataacggaataattgtgctccagaaaccagaggactgttcatccatcctgcccagaggctgcggggagggggccgcctgttgacacactcagtgcacaggtggcctgtgtggcctgtgggctcagtgctaggattctggagtggagggccggagggactgtgtctatggggagggggcccaatgatgacacagggagcatctcctggaggcccaggctatgttcccctatctgtgctcctcggagtctgctgcacccccagctctgaggtggtggttgcagttgggggccaccgtgggctggtgagaggagggcacacccggctgtggctggccgggatagggcctccctcccctccgcaggggtcccaagatcgggctctcagctcaggcccgtctggacaggatcatggtgtggtgaggggagagcagcgagggtccccaatggcgggccacatcctccatgtgccctctgccagccccttcgcctcctcttgtccccctagtggcactccccgctgagaaagctgagggccgcgagcacccgggacaactcctcagcgcagatgacggagagagggcagcaaaccgcgagggcccgcgaggaccgggcgggcagcgcctcaacattgacgtgggtctctctccggcctcacttgcgggaacacgtccctggggccgggggctcagggacaggcatgtgttgccctaaactgggcatctgtggacacggcgtagttcactcagtcttccccacagttcaccccgtttaaggcattgaagcagaacttgaatgtgcaagccaaagtcagcaggagccagagagtgcaggatgttgctgtgaatttggccaaaactgactggtctggcatcaaataacttgagccgcattcccagccttggtgcccttggcactacaggagtaatgccaaagctgacttgacggacagcccgactctctgcccgctggaggcagggcacagggcttccgtttcccgggagggctcagggaggactggggtctccgtgtccagtcaagatttctggaattgacaacacttgacggccagtgtgtcctcttctccttctgggtgacgtggagtgcttgcatgagctgagataggtgtcactgtgggggaaccgaatcacagggcacaaagctgggtccccccaagaagggctggagctgggcaagaaggggtctgctggttcagggcttgagctccagccacgctgccctctaggctccgcctttcctagctggcatgagggacccctgggaaaggccccagaagatccttccccctgtggagttgggcgtgttggcgtgggtaggaggcgaggtcccggcccccacgtccccccacaggcactccagtgcgatgtctcggtggaggaggacgaccgccaggagtg

SEQ ID NO: 114255 - DNA, 1941 bp, Homo sapiens
tgcatttctaccccatccagaacattcttggaagagcacccggagctgaagctgtccctgatgatgaaggtgaaacgtcagccctggccatggctccgctcagggccccggtcacctccgagtcactctgttccttgactgtctttgtgtttctgtacctcaaggcactgaagctggaggactctgtccatgcccgtgtcaccctcgtgtgggagcctctgggctcggcaggtccacatttcatgagctgaggcgtgggccagggccatctggaaagggaactcggcttttccagaacgtggtggatcatctgtcgggtgtgtggtgaacacgttcagttcatcagggcctacgctccgggaaggggcccccagctgtggctctgccatgccgggctgtgtttgcagctgtccgagtctccatccacctttagaaaaccagccacttcttttcataagcactgacagggcccagcccacagccacaggtgcgatcagtgcctcacgcaggcaaatgcactgaaacccaggggcacacgcgcgcagagtgaacagtgagttcccccgacagcccacgacagccaggactgccctccccaccccaccccaccccaggagcacggcacacagttcagcctctgagctggctcacacgtgccatccccaccccggtgctccagggaaggaggacacggacccgacgtgggaggtcctcaggcagcagtggcgcctggtgtcaggtctgtctggctgagtcccgggcgtcccctgccatggcctgtgccttgcatggaggcggcggtggcactgaagagatagctttcaagggcccaacactttgcacttcggctggctgtgagtttctgctttgtaggttgtggtcacatttgcaggctgcgggcagtggcaccgacttgggcctccctttctatgtggcatatttatttatttaaacaccccagggagttacgtggtaacaaggttgtccataaagaggttgcttctatatactagaggccccagatggccaggccttgggctacgtctggcttgcatggtctcccaagggaatcagccccatcaacaaagttcaaatcggggcagaggctgcacttgtgcccccagatgtttctgaggagccagactagggctggcattgctgtagagtgacggctgctgcccagagcgtgtcccagacatcacagcggggctcagcagttcccacagcctctgcctgccttggctaagcatgagttaagcagcaaaacgctcctccatgtctggatggggccggcaggtcctgtgtcccctgcacctggaggagagcaggctagaggcacagcggccacatggtgctggctctgaacgttggttggtggctggaaaacagccctgcttctgagggccgctcagttctgcacacgaaaccacctcctgagggctcagctctgcccccgccctgggctgcagcctctgcacgcaagcaccaggcatcctttgtgttgtcaactccgtgtaaccagtaactacagccatttacaattgactccgtttccttttgtaggtttccctgtctgtctgtgttagtagaaaaataaaatcctatgaaatctgagtacgttgaagaatctcttgagtctcattcagcatgaaagacagctggagaaaatgtactggccgccccttttctagcaggagcgtcagggctgaccagccacagccaactcaggtggctgaagagtgaccatatgaattggacgagggcttccaaatcatgtcatcggcttggaaatgaccttaccccaaacttcctagtgctgtgtgttgaagtgacccaatctctgtatttctgagacagtctctgttgcctaggctggaatgcagtggcgtcacctcagctcactgcaacctccgcctcccaggttcaagctattttcctgcc

SEQ ID NO: 114256 - DNA, 3357 bp, Homo sapiens
cagggcctggatgctggtacggccccacctgccccaagcctccctgagacggggacgcctgcgtgctggtcgtgtgggcgagcaggtggtctggggtgaacacgtgtgtggagccccgtcaggtgagggggagactctgccagcacgtgtcacctcctgtcagtacggggtcatggggcctttccagttcagggccagggcgggaaggtgagggggtgagcgtttggtcgggaagcctgggaggagggaggcagtcacgggggcggcgcaggaccagtgtgggacgccaggctgggtcccgggtcaggcacacagggcccttcaggttctgtgagctgccctcacctccggcctggcatcccgggtcgctctcgcccagaggagttttgagaccggctggtctcaccaagtcccgggcccgccaggcccagctgatccacgacaggaacaccgcgtcccacaccgcggcggcagccaggacccaagcgccgcctacgccagacaaggtgcagatgacctggaccagggagaagctgatcgctgagaagtacaggagcagagacaccagcctatctggtttcaaagacctcttcagcatgaagccgtgagtgtccgtgcgtgtggcctggggggaacagatcctggcagtgctggcccggcagtgaggacagagtcccttccctgaccactgaagagcttcggggcaaccctgcaggccagtgggcccgttagagaacagggagccgcctgagtgggcactgaggggtccttttggtgccaaggccgggccctgagttcagccctgtggccgggcgctgagggatccttctagtgccaaggccgggagtccttgtaagacctgggtgccaagtgctgaggggtccttctagtgccaagcgctgaggggtccttctagtgccaagcgctgaggggtccttgtaggacctagggtgggtcctgatgttaaccccacagctgggtgacgagcagtcctcctggtacctgggccagccctgaagtcagccctgcggccaggcctgctttactcaggcaagcctcactgcagcaggcagatgggtctgttccatggaggcgaggaggcttgtgccgctgggcacagaattcctggccttcaccctgtgggtagttcaggctgctgtcgggccttagggcctgccctacgccaaggctcccacctgtggccttgggctgcgaacaccagggctgtacagggtccttgcgggtgtgggtttggttctgcagacgcagcctctgagttccagatgagagcgcaagagacacctctcacccggggtcagagccagaccctaaagccaggttctcaggaagggctgggggctcctgggccctgtggggtgggatgaggcggcgtcctcctgggcagccatgcgatctggaacagcctggtgctctctcctgaagtcagtaacacactcttgtttttttctcctgcatagagaatggggaaacctgtaagtccactcgctacaaccaggtcgccttccgggcccggttgccctgcatgcctgtgtgtgtgtggcctgcgtgtgtctgtgcgcgtgttctaggcctgtgcctgccccgtgcacggtggcttgtgtgcgtccgcgtacagccagagctcacccagagctgctgcggctcccacgtcagtttcctgttgccttcgctcccctctgttcacggtggctccagcacacgcctgaagcctcttcctaagtgaggcccaggaactgagacctgggaggtgtccgagccgctccggagtggaggggaggcgtgcgcctcgcagggcccgtcagtgagtccatccacgtccttctgggtcaggcgctagctgagtcgcgttcccacctggaatgccttccatgttaaagctgtccagcctccaggcggagaggggtgcagatcagttctctgtgtggtcggaccctcggcaggagctacctgcgtctgagctccggggcaggtgggagggtgtaccctggacggacccccagggtgctccctgggagtcctcgatgccgtctctgtcccctgcctgcccccgccagtaaccgcctgggccatgttttccttgtgggcaggcagtgcctggtgcctgagtgaggaacgccttggctgagtggccacacttcccttccctttttatctttaaccccgaaacctgaattaatcagactcaagaaactgtgcagctatgtgcgaggcgtgcagggaatccctgtacttcctgctccgttctgtaaatctgaaagtgccttcagaatagcgtgttaattaaagccgaagaacgacgtagacccaggagtagggtttgacacacacatgcacaggcacacacactcggggaccctcagtggcacctgtgcctcctcccagcgccggggcttgcctccccttggtcggggcgggggcaggtccccacaggcctgtagggtcaggagaaggtgggccagaatggacaacgcgtgggctttgtattcatgtgtggcgtgcgtctgggatggcattgactctcttggcccagcagtttctcggggttgggctgggagaagccctccgaagatctggaggtcggccctgacctcttctgggcagtgcgggcgtgagatgtgcgtggcttactgtgacgtccccgggagcacacttaacggatgtctgtttgtgtgcgtgctcgcatgtacctgtcagcgcacctgccggtggacgtgtacctgcctgtgtgcacgtccacgtacgttagtgtgcatgtctgtgtgcacatactatgcatgtcttacatgttagtgtgtctgcacgcatttgcacattgtgactgcatgcctgtttgtacatgatagtgtatgcacttgtgtattagtgtgactatgcctgtgtgtgtacacatcagtgtgtctgcatgtatgtgtgtgtgcgtatacacattagtgtgcgtgtctgtgcctgtgtctgcactggtcctccttgctgtggcggccggcatactccaccagtagccaagggccaggtctccgcctcaccccagcactcactggctgtggacacgctgcccactccgacccccctgtgctcctggcctgctttcacttcctggagctgctctttgtccccaaacacactggtaattgtggtctatccagaagtcgaattcaaagttccaagttcctggcacgaaagccccttgactgtgctgtggacagagaccccatctgtaattagaccaggctggagagaagatagaaggtctctccctgtgttcctcctggaaattggtggttatgatcacgtttatgtggcttaagcgtcaagcggatcaaagggcgtgagcctgga

SEQ ID NO: 114257 - DNA, 1049 bp, Homo sapiens
ctctggctggtccttggaggagctgacggagtgagggtgggggctttgtggggacccccctcgcctcgccgtgcccgcccctgcactggctgtgagtccccggggaggccccttccgcaccctggcctcagatgacctgcggacggccgcctctctccgcagacaccgtccgcgacaccaccgccgcgcaccaggctctgctggtggccaagaacgtcgactcgtttccgcaaaaccaggagcgcttcggcgggggccacatcgacgtgtggtggatcgtgcacgacggcggcatgctcatgctgctgcccttcctgctgcgccagcacaaggtggggcgtgcgacggggacacgccagccggagcacggccaccccacgtgctgcgggccgggacgggctcctctgaggccccacagccatgccctccctgtctgcaggtgtggaggaagtgccggatgcgtatcttcaccgtggcccaggtggacgacaacagcatccagatgaagaaggacctgcagatgttcttgtaccacttgcgcatcagcgccgaggtggaggtggtggagatggtgagtcccgagggcttgaggggaggaggccggggggaggtggggaggaggtggggggcggcccgggagggctgtgggcctcgtgaggtgggggtggagggggaagtggagatcgggagggctgtggcctcgtgaggtgggggtggagggggaagtggagatcgggagggctgtggcctcgtgaggtgggggtggagggggagatcaggaggtggaggtggaggtggggaggagaaggtggtggcgattgtggcgggggctgccaggccttgcggggtggtcaaggaggcttggttttggaatcgccaggacatcacagaaagcacagagccccgtgtgttgcttgtggacacctcgtgtaacacgggtgtgggtgttgccctagagccggcatcagcatctccgtgtcctccatggtcccgtgtcctcctcggcccgggaccccgtccaggacctcacacctcagtggtgttgccat

SEQ ID NO: 114258 - DNA, 1020 bp, Homo sapiens
agctgctaatttggcccattttcgggtgtttctgatgcaccaggtggatgaacctggcccagagcgtccgagtgaactgggggtgggtctgggatgttgtggatcgcctcagagaactgcctggcgttgtgtccccagagcagccctccacatcccctgcacgtggcatcagtcacacctgctctgtgtctctctccccagtgtgtgagcacgcacatacacacatacacacacagcggccgggagcaccgcagcacaccgttgagccttcgggccttccctcctgctgggtccacaggggaggtggtgcgggtgccctggccaccgtgggtggtgggcgtgggtctgtgcaccccattcctgctgtagcaccaacctgtcctgtctcccgcagaacatacggtccctaatgagcacagagaagaccaagggcttctgccagctggtggtctcgtccagcctgcgggatggcatgtcccacctgatccagtcggccggcctgggcggcctgaagcacaacacggtgctcatggcctggcccgcatcctggaagcaggaggacaaccccttctcctggaagaactttgtgggtaggcatggctggcggcccttcggcatcccctcaccgtcccctctgtgtcctctcagtgtcccctcgctgtcccctgtgtgtctcctcagtgtcccctcgctgtcctctcactgtccccttttcgtccccactgtccccttggtgtcccctctgcatcccctcgccgtcccctcactgtcccctgtgtgtctcctcagtgtccccttgctgtcccctcactgtccccctctgcctcccctcgctgtcccctcactgtcccgtgtcccctcagtctcctctgcatccctttgccatcccctcgctgtcccctaaccgtcccctcaccatctcttcgccgtcccctcactgtcccctcaccatctcctcgccgtcccctcgcggtcccctcaccatctcctcgccgtcccctcgctgtcccctcgccgtct

SEQ ID NO: 114259 - DNA, 1025 bp, Homo sapiens
cgggggcctcaggtgtgtgccccgggccattgtcccctcaggggcctcggcgggggcctcgggtgtgccccgggccattgtcccctcagggcctcggtgggggcttcaggtgtgtgtcctgggccattgtctcacctgtctagcatgtcacctgtcccacctgtctaacctacctgttctcctgtcctgcctggctagtgcccacctgtccatcggccctgcctgtcccacctggcttctgtggcctgtctcacctgtcacctgttcaacttaccccacgtgtgtcacgtttccccatcccatctgtcacctgccccttttgtcccctgtcccgcctgtcatgtatctcccgtcccacctgtgtcgtgtgccccgcccgtcccatctgccctgcctgttgatgggccgtgccctggtaagcgttgccgtggtaacagccgccccaccctggctgcaggccccaggtgctggtgatgctgaacctggacgcggagcaggccgtgaagcacccccgcctgctgtccttcacgtcgcagctgaaggccggcaagggcctgaccatcgtgggctcggtgctggaggggacgtacctggacaagcacatggaggctcagcgggccgaggaggtgggccgggcggggtctgggggccaggcctctttcccaccccagctgcacaggaaacgtgccctggcatgtcctcatcgcagcgtgtcaacacggtgctgtgcgtggcgctgctgtgttttagccgtggcggtggctttgagctcagagcagcgcgctaaggcctgggagcaccagccgcaccccgggaagcttgggaggtgtgagggccattagctttccaagggcgaaccctgggaccgcctcctcccgccatgggtgagccccgtccagagccgtaatcatggttctgctgcaagctcagtctcccgctgttcaggctcactgggggctgcataagtgtgatgcccgtgtgctgggggctcactgggggctgcataagtgtgatgcccgtgtgct

SEQ ID NO: 114260 - DNA, 1016 bp, Homo sapiens
cgtccttgactgttcctttgcggagtaagcccctgcgcagctgatgagactgcacctgaggaaggcctctggttacgaggatgcccaggtgtctgcatgtgccttgtacctcccgtggtcagcccagccttcccaggcttggggcgtagcccatcagggctgtgggtcttcttaactcccctccccaggaatcaggcgctgggtggacgcttcagccccttgttgcatgcacagccgaggtgctgtgtgcacgctgggagctggagctatgtactgggttttggagtgacagctcccacaggggcccagggagccacgtcacccctcagaggtggttgagtacagccatggtcgtcaggcgtcagtgactgttttcctagtgttaacagagagttttactgagggaggggcagtgtccgtgtggtggtggctgaggtgtgggggctgcatggcgttgggccgccccgagccacttgccccgcccccaggaccctgtcctttctgggtatgagcctgtgcctggcgctgatgttcatctgctcctggtactacgcgctgtccgccatgctcatcgctggctgcatctacaagtacatcgagtaccgcgggtaagcgctgtcagccccccttacagacccggcgcacgggagggcgggcccctctcatgctatgcctggggcagctccctggaggggcctccctggggcttgagcgtcgtgtgccctcacaggggcagctgggagcacgtccaggtgggctgtgttgtgaaagctggggtttccctcccacttccagccaggccgaggtgcctgcacttgtggacagggtctccagcctggagctctgtctcgtgccgtcctcagcaggcggtgagcccacggctgactattcctgctacgtgtctcgcgaggtgtccccaggttgtgtctgtactcactcggcagccacaggcgtccttccccgtgccccagcacccaccctccctccacctgcacccgcctcgtgcccggggtcca

SEQ ID NO: 114261 - DNA, 1395 bp, Homo sapiens
ccgctggccagtgcatctccccacccaccccaccccaccccaccccaccccccgtacctgaggaccctgcacccacggacctgcctttccttgacgagggctgtggatctctcctgcattgtgctgtttggggcctgcattgaaggcgtggtcttacgagataagtacgtttccacctgcagttttcgtgcaaagcctgtagtcttcaagggttttcctgaggatgaattcggctttgaaattacatcgccctaggacttcatgtccgcgtgcagagctgaaggcgtcctggtcccagggttgggatcccttggtctgatgtgtcgtctcttccgctggagcctagggcctggggaaccgttcagagccaactccaagccctgatgcggctgggggcgcaggcccttcctggggaggccacaggggtgtggacgggtgaggcttggccctgggagatccctcagccctgctggcaagtggagaagtagtggggtcccaggcaggtcatcactgaccctgcatcctcatggggtgtgcgtgtctggcagccccaaggccccgggggtcctgggtggtccctgactgaagctgatgccaggctgggtcttccctgctcccaagagcgaccctgaggtgagcaggaccccctcccccgctgaagaccctccagagcattctggccatgctgggcagagcctggtggaggtttcagccaacggggactggaggccgggcctcagctttccaaggagtcgcccccactgcactgggcccctcgctctgggtgggagaagacattttgtctgactcaggctcacttctgaaagccgcccgcccgcctgcccgcctgcctgcaggttcggggaggccctgcaggggaacctggtcatcggcatgctggcctggccctccccctgggtcatcgtcatcggctccttcttctccacctgcggtgccggcctgcagagcctcacgggggcaccgcgcctactgcaggccattgcccgtgacggcatcgtccccttcctgcaggtgagtcccgcaccctcgtcggggggaccctggaaggtcagggtcgggggctctcctcccctgcgggatcctcacagtgccgtgtgtgggacgcatgcccgcggcttggaccccatggtggtcattctgcccctggccactgcacagagcatgggagtggtgggaggtgggtggtgggcagaggcaattctagccctcctgcctgcaggtccctccgagctcggccccgggtgtgtcaggagcggctgtgagggcccacagccacgtgtccagaggtgcctggtctgttgtctggtcagaagccctctgcctgcctgccacatctttctctgtgtggctgagctcttcagcccgtgggaggtg

SEQ ID NO: 114262 - DNA, 1060 bp, Homo sapiens
aaacatccccggccgtggctccctagagcaaggtggtgccacagcgggaggggtcgcagcgtctgctggcctggctggctgggctgagtcgttctaggatctcattcccaaagtccttaggtcctgggggcctgtgagccattgctcagcaccgtctctgggctgacccttggccatgggattaacacaggctccagagaagccctgggtgtggggggcgtgggggtcagtgacggggtcggttctcgtcctcggatccaggggagcagtagacgtgggtgctcatccgcgtgcctgggcccgcatcccctcagccgcagtattgcagcgtgggctggcggagcttggactgcagcctcggctgcagctcacgctcggggtctccccagagaccgcctttccagctttctgggcaggggctgccatcacatggcactgactcctcagatgggtctttgcagcattttccatgttcacaggtatcatggcgggttcaaaccggtccggggacctcaaggatgcacagaagtccatccccacggggaccatcctggccatagtgacgacgtctttcatctgtatccttggaggggtgcaggcgagggttccagcctctgcctggggggaggcccccatgccctccccggctcagcatcataccctcggccaccagcatgtgacttcccaggttaggctgtgctctcaccacgtcatcctccctgggagacggggcaagggctgctgtcaggaccctggcttcttcaccactgtgtgatgcgatcgtagagaaaacagaagcagtcaccctgccgcgtgtggacagtgatgcgcagcggtgtgtggggtgtgccgccggcaggctgggcccgcggggcctctggcttctcaatcccaaggctgcctctttccagccgagcattgtcccctcagcatggtcccctgccaatccctggcggtcaagcaccaggccaggtgtgtgtccaccaccccagggccccgttctgtggcgctggacagagccccaggagggtgcgctgaggacacgggggacaggacgtgc

SEQ ID NO: 114263 - DNA, 1687 bp, Homo sapiens
caggctttccagaaccctagagaggaagcccggactttccagaacccgagacgggaagcccggactttccagaacctgagacgggaagcccggacttccccagaacccgagacggggaagcccggactttccagaaccctagagaggaagcccaggctttccagaacccaagatgggaagcccaggctttccagaacccgagacgggaagcctggactttccagaacccgagacgggaagcccaggctttccaggagtatgttgttccccacatgaggcttctctttagtgctgaccttccctccgtagacgcagacaggcagctttcccagaggtaccatctcgaaagcgtgtttgaattggagcctgcttgcggcgcacaagctgtgacccttcccctccggccaccagtggcacctgccggggagtgggcggccccatggcgggggcactgcacagaaggtgccagaaacccatgggatcttccttgcccggcagagaacctgtggagtacgtacgcgcacgcgggggcgtttgtggagaagaaaggtgtgccctcggtgcccgtggcagaggagagccgtgccagcgcactgccctacgtgctcaccgacatcgcggcctccttcaccctgctggttggcatctacttcccttccgtgaccggtgagcccgctgctccaggcttccccttctctttctttctctccctctcttttttgaggcaaggtcttgctctgtcacccaggctggagggcagtggtgtgatcacggctcactgcagcctcaactcctagacacaaatattcctcccacctgagtctcccaagcagctgggaccccaggcacccagtaccacgcccggctaatatctgtattttttgtagaggggggcagccgggaccccaggcacacggtaccacgcccggttaatgtctgtattttttgtagacgggggtctccccacgttgctcaggctggtctcaaactcctgagctcaagccatcctcagcctcccaaagtgctgggattacagacgtcttgagccaccacgcctggcttccttctttctcttcctttgtctttgtccatttctctgtctctgtcattctctcctccggcactctttctctctccccctacccttttccctctctctctgtctgtctctctctctctctctgtctccctcttcttccctccctccctctctctctctctgtctgtctgtctgtctctctctctgtctctctctctgtagtgtgttccttcctgcccctgcttatcttgcctgtttggctcaggggaagtggctgaggtctctgccctgcgtcctgatggatttgtgagaagcctgtctgctgctctcccaggcagccctgtgtcaggagaagctgttgtagggttgctgggaacacctggcaggctgttaggagacacctaggagtggcctcagtgtgagctcagaggccggggacctcggccctctgtgtcctcctcaaacagtgggccttgttccggcggtgggtggggcccttggttgttccccagggggtggggccaggccccgtgctcttcgagtcgcacacacacgcccccggctgtctccactcggccttcttgtcgggacgcccctgacaggcgctggctgcttgtgcagcctgcagctgcccttctggtcccttct

SEQ ID NO: 114264 - DNA, 1073 bp, Homo sapiens
agaggttgccccccgccggcgtggtcagaccctgtgtgtgtccaggacgtccagccggggtgggccgagctctctgggcagcagtcacattcctcttagcagaaggtgtttcttttgagtgcggacatgcggatgccccgggtcctgaagttgctttactctaaggctcccgggtggttcctgggaaacgttcaggcccctggctgtccatggcctgtgcgctgacccccgcgggctccgtccctcgcctgtgcgctgacccccgcgggctccgtccctcgcctgtgcgctgacccccgcgggctccgtcccttgcctgtgcgctgacccccgcgggctccgtccagcacggatgcgtcccgatggccccggcacctgttgggaggaggcccctgtgtggcgctgggggcttgcgggagggacgggcactggggagttgtgtccggggacggcctcccgaccggccttgttcccacagacgtacatctccccgggtgcggccatcttccaggcggaggctgcaggtggcgaggcggccgccatgctgcacaacatgcgtgtgtacggcacgtgcacgctcgtgctcatggccctggtggtcttcgtgggcgtcaagtatgtcaacaagctggcgctggtcttcctggcctgcgtcgtgctgtccatcctggccatctatgccggcgtcatcaagtctgccttcgaccccccggacatcccgtgagtctcggggcctctgagccgtgggtgggtgtggggctggggccaggtcccatgggctctgcccgcctctcgtccatcatccttgacgccgagctccccgcaaggggtgggctgggtgtgaccgtggcgggaacccccgtgggctcgttctggggattacaggaaacccaacggtgaggtgggccgaggtaccctcgtggccgggtctgagcatgaagaccctcctcagtggcaggagggctggtgaggggtctggcaggtttcaggggtggccggtggccctgagcacggtcaggtgcagtgagcgtcatgggtgtggccctggctgctgctggggcctgggtgtcttc

SEQ ID NO: 114265 - DNA, 1050 bp, Homo sapiens
agtgatagcgtgcgtggttcacagtacacgagacgactcctgaacatcctagtttctcttttgcctttttcataagcaaaacttagtggaagtgggggctggggctgccactgatgtacgcgggactttttctgggacctgctggggcctcctgctccccagagagccttatccctgatctcacctggtcctcatgtccatgagagcgcgtgctcttggtgtggaacgtgtgccgagcctcgggaggggagagttcaccgtggaagcgtctccatgtgctgctttgcgggtggacgagggtctacacgctgccttcgcagagacaggccctcctttgcccgtgaatggcagcgcagaccgcacctcgggtccgagtccaagtgcgcccctgacccgcggctgccgcctttgtctccgcagctggcgggtcctactacatgatatcgcgctcgctgggacccgagtttggaggcgctgtcggcctctgcttctacctgggcacgacgtttgcaggggccatgtatattttggggaccatcgagatttttctggtaagtgtgctgctttggaagggttcccaccccacagtctgtggcaggatgccaaggggccctgcctgacccactctgtggcacacacagcacactgagccatcctgaccccactgccctggctgcccctgggctctcctgggctctggccatggcggaagccactgggcagcgtccactcagcagcgacctgtgtcccccttgagcaccattgctgccctccgtgaggcgtgcctggcatgagctgggtagacatctggactgtagatctgagccccgcgtaggtgcagtcctgcagtcggagctgttttaggagcagggctggaactcggcttagaagaaccttttgccaggatcccagcctcttctctgcctgatctgggcacttggccgagggtcccagagcccagcaatgtacaaccaggtgatgtcatcaccttctcaaaacaggcatgctcaaagcatgtcccacatcacctgagcacagctgagagctgtg

SEQ ID NO: 114266 - DNA, 1045 bp, Homo sapiens
ttgtgctggcaccagccgtcctccaggtctgagccacgtgcctctgctcatggcgggagtggggctgagcaggcagtggggatggagctgaaacttctaccccagcctggcccgtcccgagtggagctggggagctgcctggcaggcgctggcctgctcctggctgtgctgctgacccttgcccatgtgggttttctcagggcacagggtgtgtccccctctctggcacaggtgtctgaagcaggctgcctgctccgtgctggggcaggcggggtggcccccacgtggatatctgaacctttgctgttatctcgtggtgacctccgtgcccggttaagatgtgtcagtttctgcccagggccgacgctgagctgtggattttttttttttttttttttagctttatgggcagcagccgtctcatccctccgctggctctgcttccattcctgaagtctcaggctctcccagggtgtcagatctcaggccctgagccatccagggaacggagccgggggccctctcgttctccctcttgttttttccataacttttccagtgtaacaggtttccctccgtcggggaggcacagcggagcagctgcatcttggttctctgccaaccatgtggttctgctcccctcccctaagccctcattccgggatggtcaggggtcctgtcctgggcctctctctgaacctccatctgttctgggaaggactcctgccccctcctgcccccacggccgctttgcctgcccagggcctgagtgcagcctggggagggggctccctctgggtgtggggtacgagcccctgggacacgctatgctctgtcgcaggctccgcgcatgggcaccttcatcggcgtctacctgccgtgcctgcagaacatcctgggcgtcatcctcttcctgcgcctgacgtggatcgtgggggtggctggtgtcctggagtccttcctcatcgtggccatgtgctgcacatgtgtgagtctcccccggccaggtgtggctgtgccttcgggcggtggcagctggacagta

SEQ ID NO: 114267 - DNA, 1042 bp, Homo sapiens
cgctctccccttgggcggtgtctttttgaggaaacagttgtggggaggagagtgctgcttctgaatcacgtgtggacctggggtggtttgtttcctgcgttctggggttttcttgggcagcaccccacacgcaccccacacgcaccccccggtgggcctcggctctgtggggagtggtcctggggtccgggatgagagtgggccccgcccaggcctgtgttgacccctggagtcagattgccatccactgtagtggttacagtggctctgggaagtttgggggctgggacctgagcccaaggctggccatggatagccgcacgcagcatgcccgtgtgcttggttggcatgcctggtttgtgtgtctgccatggcctggagctgtcctcatggtggggtagccccgctggccctcccagcgttcctgtccatttaagtcccgtgcacaggggatgtccaccttgcagacgtgcagccgggaggaggttgttaaagtgatccttgaacatttgctctgtgcctcagtttcccttggcaggagccagcctgtcacgagggtggcggtggctgtgacctctcatctccttggctctgtctgcagacctctggcgccagcgggtcgggcctgggctttcagggaggctcagagacgccctgggcagtcactggggagggattgagtggagtggaaatcggaggagggaagtgcgccaggccaggcccctcctgggtcccctccatgccgccaagggtccccgaccgcagcccagaggcagcctgtaacaggagccgccctgggagggcctggcaggtgcgctgggggccctgcctctcccgccttccttcatctctgctcctgcaggctgcctgggccccgagtctctggaactaggggaccccacggcccctccatggctcagacgtcactctggctgctgagggaggaggctggaccaggaccagcaaacagccacgtgacagagggttcgggaagtgagttcacccgaggccaccttcccgcgagcaggcgtgtcctttagat

SEQ ID NO: 114268 - DNA, 1050 bp, Homo sapiens
agcagaagggcgtgcaggaggggcagggggctggagcaggagtggggggtcggggaaggggacaagaggggaggcggggagggggccggggagggcggggagggcggggagttccagcaggaggggcagggggctggagcaggagggggtgcaggagactgagcggggattcgcgggctctgcgatggtcgggagcgcaggcagcgaaagccccgcgtcccgggtcgcggcggtcagacagacgcagcctgggttggggtccctgcaggaagtcgccgcgggccaacttttcgtggggccgcggggcaagcaggtgaagtcacgtggcccgggcggggcggggcggctcggtcggaccccgcccctgcctccaagtcccgtggcgtcggcgggagcggcgcagcgcgggccgggccgggacggggactgtcggctgcaggcggccatgcccaccaacttcaccgtggtgcccgtggaggctcacgccgacggcggcggggacgagactgccgagcggacggaggctccgggcacccccgagggccccgagcccgagcgccccagcccgggtgagcgcggccgcacctggccggacaaaggccgagcgccccgagcgcgggtctgggcccggcatccgggagcggaggcgggcggcggggccgggggtacaggaggcgccccttcccgcgcccccaccgcctgttctcggtcccccacgagggcccccaccccacgttagtggcagcgctagggggcgaggggccctgccagggctcccggtacggtcagctcgggtgggaccgggggcagaggtgtggacgccgctgctggtagccatggaaacggggaggggctggagcgcgcctccggagggagcccgggcccctgggtggtccctagtgggacaggggtggcggtggagacccgggcggttcgggagccggggcgtcctgcgtcccccgcgctctcccttcccctgcgccgcggccgtccggtaacactagcccgggccggcccgtcctgcccccgcctgaccctggaggagccgcc

SEQ ID NO: 114269 - DNA, 1026 bp, Homo sapiens
aggtccacacgtcctgatcggaagaaacaagtgcccagctctggccggggcaggccacatttgtggctcatgccctctcctctgccggcaggtctctaccttgacagacctccagccgtacatgcgacagttcgtggctcacctgcaggagaccagcccgctgagggatgccgtcgtcatcgagcaggtctgggcactgccctgcagggttgggcacggactcccagcagtgggtcctcccctgggcaatcactgggctcatgaccggacagactgttggccctggggggcagtggggggaatgagctgtgatgggggcatgatgagctgtgtgccttggcgaaatctgagctgggccatgccaggctgcgacagctgctgcattcaggcacctgctcacgtttgactgcgcggcctctctccagttccgcagtgcctttgttcatgatttgctaaatgtcttctctgccagttttgatcttgaggccaaaggaaaggtgtccccctcctttaggagggcaggccatgtttgagccgtgtcctgcccagctggcccctcagtgctgggtctgaggccaaaggaaacgtgtcccccttcttaggaggacgggccgtgtttgagccacgccccgctgagcgggcctctcagtgctgggtctgtccacgtggccctgtggccctttgcagatgtggtctgtccacgtggccctgtggctctttgcagatgcctgttagcacttgctcggctctaggggacagtcgtgtccaccgcatgaggctcagagacctctgggcgaatttccttggctcccagggtgggggtggaggtggcctgggctgctgggacccagaccctgtgcccggcagctgggcagcaactcctggatcacatatgccatccgggccacggtgggctgtgtgggtgtgagcccagctggacccacaggtggcccagaggagacattctgtgtcacacactctgcctaagcccatgtgtgtctgcagagactcggcccggccagccca

SEQ ID NO: 114270 - DNA, 1006 bp, Homo sapiens
actctgtcacccaggctggagtgtaatggcacaatctcggctcactgcaacctctgcctcctcggttcaagcagttctcattcctcaacctcatgagtagctgggattacaggcgcccaccaccacgcctggctaatttttgtatttttagtagagataggctttcaccatgttggccaggctggtctcaaactcctgacctcaagtgatctgcccgccttggcctcccacagtgctgggattacaggtgcaagccaccgtgcccggcataccttgatcttttaaaatgaagtctgaaacattgctacccttgtcctgagcaataagacccttagtgtattttagctctggccaccccccagcctgtgtgctgttttccctgctgacttagttctatctcaggcatcttgacacccccacaagctaagcattattaatattgttttccgtgttgagtgtttctgtagctttgcccccgccctgcttttcctcctttgttccccgtctgtcttctgtctcaggcccgccgtctggggtccccttccttgtcctttgcgtggttcttctgtcttgttattgctggtaaaccccagctttacctgtgctggcctccatggcatctagcgacgtccggggacctctgcttatgatgcacagatgaagatgtggagactcacgaggagggcggtcatcttggcccgtgagtgtctggagcaccacgtggccagcgttccttagccagtgagtgacagcaacgtccgctcggcctgggttcagcctggaaaaccccaggcatgtcggggtctggtggctccgcggtgtcgagtttgaaatcgcgcaaacctgcggtgtggcgccagctctgacggtgctgcctggcgggggagtgtctgcttcctcccttctgcttgggaaccaggacaaaggatgaggctccgagccgttgtcgcccaacaggagcatgacgtgagccatgtggataattttaaaatttctaggctgggcg

SEQ ID NO: 114271 - DNA, 1061 bp, Homo sapiens
ttacctgcaccctgtgttttgatgtgaagtaatctcaacatcagccactttcaagtgttcttaaaatacttcaaagtgttaatacttcttttaagtattcttattctgtgatttttttctttgtgcacgctgtgttttgacgtgaaatcattttgatatcagtgacttttaagtattctttagcttattctgtgatttctttgagcagtgagttatttgaacactgtttatgttcaagatatgtagagtatcaagatacgtagagtattttaagttatcattttattattgatttctaactcagttgtgtagtggtctgtataataccaattatttgaagtttgcggagccttgctttgtgatctagtgtgtgcatggtttccagaactgtccattgtaaatttgacatcctgtcaatagtgggcatgcatgttcactatatccagcttattaaggtccagtgcaaagcttctgtctccttctagatgcatgaaattccaagaaggaggccatagtccctcacctgggggatgggtctgttcatttcttctcgtttggtagcatttatgtgaggcattgttaggtgcatgcacgtggtagaatttttatcttcctgatgagtgaatcttttggagacttctatgtctctagtaatctagtaattctttttttaaattgctcttagtactgccacactgggcttcttttgattagtattttcctgctgtgtctgttttctgcctttaatttatatatatatatatatattttttttttttgagacagagtcttggtctgtcgcccagggtgagtgcagtggtgtgatcacaggtcagtgtaacttttaccttctggcctgagccgtcctctcacctcagcctcctgaatagctggaactgcagacacgcaccgctacacctggctaatttttaaattttttctggagacagggtcttgctgtgttgcccaggctggtctcaaactcttggactcaagggatccatctacctcggcttcccaaagtgctgaattacaggcatgagccaccatgtctggcctaa

SEQ ID NO: 114272 - DNA, 1010 bp, Homo sapiens
aggtggggacgagaaccccctcttcctgggggtgggaggtaagggttttgcaggtgcacgtggtcagccaatatgcaggtttgtgtttaagatttaattgtgtgttgacggccaggtgcggtggctcacgccggtaatcccagcactttgggaagctgaggcaggtggatcacctgaggtcaggagtttgagaccagcctgaccaacatggtgaaaccctatctgtactaaaaatacaaaaattagctgggcatggtggtgtgtgcctgtaatcccagctacttgggaggctgaggcaggagaatcacttgaacccaggaggcggaggctgcagtgagctgagattgtgccattgtactccagcctgggcgacaagagtgaaactctgtctttaaaaaaaaaaagtgttcgttgattgtgccaggacagggtagagggagggagataagactgttctccagcacagatcctggtcccatctttaggtatgaagagggccacatgggagcagaggacagcagatggctccacctgctgaggaagggacagtgtttgtgggtgttcaggggatggtgctgctgggccctgccgtgtccccaccctgtttttctggatttgatgttgaggaacctccgctccagcccccttttggctcccagtgctcccaggccctaccgtggcagctagaagaagtcccgatttcaccccctccccacaaactcccaagacatgtaagacttccggccatgcagacaaggagggtgaccttcttggggctcttttttttctttttttctttttatggtggcaaaagtcatataacatgagattggcactcctaacaccgttttctgtgtacagtgcagaattgctaactcggcggtgtttacagcaggttgcttgaaatgctgcgtcttgcgtgactggaagtccctacccatcgaacggcagctgcctcacacctgctgcggctcaggtggaccacgccgagtcagataagcgtcatgcaa

SEQ ID NO: 114273 - DNA, 1039 bp, Homo sapiens
gtgctcatttgtgtcattgcaggctttatcctgtggataaacgcagagtgaacgagtttggggagtcctacgaggagaaggccacgcgggcgccccacacggactgaaggccgcccgggctgccgccagccaagtgcaacttgaattgtcaatgagtatttttggaagcatttggaggaattcctagacattgcgttttctgtgttgccaaaatcccttcggacatttctcagacatctcccaagttcccatcacgtcagatttggagctggtagcgcttacgatgcccccacgtgtgaacatctgtcttggtcacagagctgggtgctgccggtcaccttgagctgtggtggctcccggcacacgagtgtccggggttcggccatgtcctcacgcgggcaggggtgggagccctcacaggcaagggggctgttggatttccatttcaggtggttttctaagtgctccttatgtgaatttcaaacacgtatggaattcattccgcatggactctgggatcaaaggctctttcctcttttgtttgagagttggttgttttaaagcttaatgtatgtttctattttaaaataaatttttctggctgtggcatttttcttgacctggtataatgaaagtatttcggatatttgagtttaacccttttccagaaagtaatacatgatatggatttatttatgcattaaaagagcaaatttaaagagccctttgcaagcctttgagtcatgagtgttcttagatacgtagcatcttagttgtttaagactaaactattgtacagagccatgacccatcaggtcaagcttatcttgccctaggttgaggcagagagagagaaatggaatagaaagatgggtggagaactgctggactcggtgtgtagtgaagtttaatgtttgttgaagttagtttttgtggggtttgttgttctcagctcacagcagcctccacctcccatgttcacacaatcttcttgcctcagcctcctgagtagctgcgactacaagtgtgcaccaccaca

SEQ ID NO: 114274 - DNA, 1540 bp, Homo sapiens
atatcactgtgttgaatttcacaacagtttggcacttacagcgaatctgagaggaaaaccgaggagtacgatactcaggtaagtcacttgtgattcagggcacgtgcatgccaggcaaatccaacaccctcaaagacgggtcttttactgtcattgctcagtgcggaagtctccttggagtacgggtcagcccgccttgagcagggatcccaagagtgaacacataaaacccaaatttcttactgggaagggcgggggctcgcagagactcatttcccagtccttacaggcacagcctgcctgtgtcaccgtatagtagggatattttcatcgtttgtaagtcacattcgccaggcagctgacgcaggccatggtgtctgctgtggttgctgggaacgcacttgccgtcaccaaggccataatggccgcggccgcacagtggcctggaggaatggccccagcagcacagggcgtcacctttccccattgctgttgggggagctggaattctcagttccagttaatagaacatttctgcacagatgattttagtttggtttaatcttcaccagcttatatccaacttgcatggcgttgtaaagctgaaatcagaatggatacagctggcgatgtaactacattacttagtaggcagttttttccggtttctttccattatgtttattgatctgttgtgggttggttggttttgaccaaccagaattgatctattattgttaactagcgcctgtagttacacccgggctctggcgtgtgcggtgcctcctggggctgtggcgagtgtgcgatgccctgcctgtgcccctcacgccgccccctgcagagcagccctgccaccctgagcgctgtagctcgttctgtctgtccctgtcggggtgagctccatgcagtgtgtttacagaggcttggcgtttgggcctctaactggaagccatctttgttccctgcaggccatgaagtacttgtcatacctgctgtaccctctctgtgtcgggggtgctgtctattcactcctgaatatcaaatataagaggtaggaggccgcacacgcttcccctgctgcgtctttcccctgagaaagccatttggatgactgagccagagcggggtgcgactggagggcaaactcggggccggggcacttgggccagcgcctgggaggggtcctgcccctgcagctgcacacggtgggctctgggcctcagtgtccccctggtaaggtgtagctgagaggactgactccagccaccaggcttcatgggaggcttgggcctgagctgagaggggtcctggagcccctggcctctgctgcccgtgtggggtgctggccctgagctgagagggttcccggagcccccggcctctgctgcctgggtggggtgttggccctgagccgagaggggtcctggagcctccagcctctgctgcccgggtggggtgctggccctgagccaagagggatcccggagcccccagcctctgttgcccaggtgggctgctggccctgagccaagaggga

SEQ ID NO: 114275 - DNA, 1048 bp, Homo sapiens
ggatctgcttcccctgcttgccctcagggcttgcaggaggaggaagacgtgttgaataagctggagtggttcttaaggtacagctggggaggaaacaaatccagacttgaaaagccacgcacttatcacagaactggcataagacacgcccggaagcaaagctgtgctggccccgtcatccgacctctgcccacgttccatgctcatttgcaagtgtggctcagacacgtgtttgtggagctggtgtggggccagctgttcagttcagcagccttccaaacactttcctagctgctgaatgcttcattgttctttttaaacggggtgacgtggactggggagtacctgaagcttcttgggcgtggtgggttgggatgggggactgggggtatgtgtgtgacttggggaacacaggtggggtctgccctgcaccccctcccagcccgaccatcctgtccccagtgctctggcgctgcttcagcaccgtggtcatctttctgttcctgctggacgagcagacgagcctgctggtgctggtcccggcgggtgttggagccgccattgaggtgagttccgggcagtgacctgaactgtctgaggtccatgtgcctccacgcactcaggaaaggctttcagccccgggacctgagaccttctgtggaagcctgtgtgcttgttcccgatggcctcagtgttctggaagctgtaggatggcaggcagtgggtgtaaaggctttgaacaagtggagagcaaggaaatgcgtgttcgggtggtatcagctcatgaggctctgtccaccaagcagtggtgagtcctgaggccctgtccaccaagcagatagtcctgaggctctgtccaccaagcagtggtgagtcctgaggccctgtccaccaagcagagagtcctgaggccctgtccaccaagcagagagtcctgaggctctgtccaccaagcagagagtcctgaggctctgtccaccaagcagagagtcctgaggccctgtccaccaagcagagagtcctgaggccctgtccaccaagcagagag

SEQ ID NO: 114276 - DNA, 1020 bp, Homo sapiens
ataatatgtgaaatgccatgagtttggtcaaatgaaccttaactgttgatgagatttatttttattgtttgtttgtttgtttgtttgtttgttttgagacagagtctcgctctgttgcccaggctggagtgcagtggcacaatctctggttactgcagcctccgccccccggattcaagcgattctcgttcctcagtccccccagtagctaggattacaggcgcgtgcccccacgcccagctaatttttgtatttttagtagagatggagtttcaccatgtttaccaggctggtcttgaactcctgacttcaagtgatctgcctgcctgagattcccaaagtgctgggtttacaggcatgagccactgcgcccggcctaaatttttatattgaaaactgtatttgtaatgttaggtaagattgacattgcctgttttatattgtatgtttttttttccttgacagggttttcagagaaagatgctgatgaggtgaaaggaatttttgtagataccaacttatacttcctggcgctgaccttctttgtcgcagcgttccatgtgagtcatccaccggggggcttgccgcaggcacttggggggctccctgggccccgggcctcctgcaggggtcctggacctggggtttgtgggcgccgtccagccctgtggccctcaagtgtccactcccatcactcagcagccagcacgcctgacaccaggcgaccattgtcccagtgggcggtttctcccagttctgaaaagggagggaccataaagctccgtccacagccttggcgacttgggctgtgctggctttgggggcggttttgaaaaggatccagggtactctgagcagtgtccacaccaatgagatgaataggtgcaggcatctcactctcccctgcccaggccccgaccccatgcagagccaggggcggagctgggcagcctctagcagaaagtagttctcttgtataaattctaacacactgatttttaaatgtaaaaagtcagtcct

SEQ ID NO: 114277 - DNA, 1049 bp, Homo sapiens
tagcagagcaggtggattagagcacagccctcgctggatgttccagcacgtggagggtggcgggtcagggcttgaggcagggcaggtggattagagcacagccctcgctggatgttccagaacgtggagggtggtgctcaccgggtgtggtcactgcccacgtgctgtagggtgtgggctcgcgcttgtgaacccgttcctcaccctcctacctcggcaccctgggacctggcccacagcctgtgtgcgtgaggccccggcaggctgcaggactaagctcgtggttctgagacctacacatccaccctactgcccctgctagctttgcgttccagaagctttctgttgtccccacggccaccccctgctctgtgctttaggccctgaggcactttgcccatgtgctgcagggctgtgcttgtcccgtggtctccaactcttaggacaggccagggctctgcaggccaagctcagcgccgtatgctgcgccatggagtcctagcagctgggtggcaagcaccacctccggggcaccaggacttgtgcggcttaaaattgaaggggcacgtgcagcaaaacagaccaggcactgctagcgctgctgagctcacggggtcctggtgggggtgggaacctccctgtgctggaacgcagcacgctggggcctgaggcctgtggtgacagaaggagggaccgggggatgcttgctgggcccagtcatggctgacctggggccacacagggatgggaagggggatggcagggttggcgagggctgccaggcagctgggtgcaagggtatgagggcagggccctcagtgtggctttcttcatcaggtcataaaccgctccaccaccgagctgcccctcaccgtgtcctacgacaaggtctcactggggcggctgcgcttctggatccacatgcaggacgccgtgtactccctgcagcagttcggtatgtgccgcacacggccggcgcctgggtgaggccgccctggagcccctcgggcatccaagtgcgaatcctgacacaggccggggcctcctcg

SEQ ID NO: 114278 - DNA, 1022 bp, Homo sapiens
ccacattaaatttctgaggttccagtagtgtgggccgaggcacctggagccctcgtggctgctgcccttcccttctgtcgcttcggagttgggtgattcagtgtgtgtggtcagctggtaccctggccaggcccagaagctgctttccatctggctgcttcagccttgtggcctcaggtgggttattgacctctcagcctcctgagatggaggcaggaagtgcgggccgttttgctttcggctgtaggcgcccacacctgtgccgagttctcaggacgcgcacgcgtgcgcgtgcacacacacacacacacacacacacacacacgactcgtaaagccctgggcaggtgggtttcatttttagtacttctgagctaaaattagtttattgaagcagctttataaaggtatttgaataggttctagagacccagaatataatatgtatgtagtggaaatgattgttctgtttcaggacagttaatgtttctgtaccaaagaaaacgagaaacaatgggacgctgtatgcctacatcttcctccatcacgctggggtcctgccgtggcacgacgggaagcaggtgcacctggtcagtcctctgaccacctacatggtccccaagccagaagaaatcaacctgctcaccggggagtctgatacacaggtgagggtcttcatgggttactgataacaggctgtgcctctccgtcagaacggacatgtctttctccacacaggtgggcgatgtctagggctccagtgactttgttgggagtaaagccaaaagccattggaatgttactggcgtgcatttctgactttcagctgaatcatatccatgagtttgcagacaagttttatctaaaattagggacagttgaagtgatcgctggcattctcgatgcagagtccctcggggaatgggccctctcagtctctgggggcacctactgcacctggtgggatggagcgctggtcctgcagagctggcctgcagcttctcaccaggagctctggggatg

SEQ ID NO: 114279 - DNA, 1030 bp, Homo sapiens
cgggcgggcggggctcgcggctgagaggcgggcgggccgggggcgccgggcgcggggccgccatgtggagcggccgcagctccttcaccagcttggtggtgggcgtgttcgtggtctacgtggtgcacacctgctgggtcatgtacggcatcgtctacacccgcccgtgctccggcgacgccaactgcatccagccctacctggcgcggcggcccaagctgcaggtgagcgtccgcggggccgggggccgggcgggttggggtgggggcctctcctccaggccccagacgtcgccttcccgtcccagttcggagctgtggccgcgcgagtcgagatggaacctttcctggttccccagcggccaggtcttccgccctccagctggccgtgggatttgagtgcgtcctgccagggcctggccgagctgactctcgacgccccctcctttccagctgagcgtgtacaccacgacgaggtcccacctgggtgctgagaacaacatcgacctggtcttgaatgtggaagactttgatgtggagtccaaatttgaaaggtatgggcgtaggacaaaatgccagtgaaagggaaaacattactcatgttcagattgtttaaaagttagctttctgtacataacatgtttattttagagaactagtcttaccgaatgtcttgaagtggtagaatatcctaactggaggcctatgcgtggcctgtaaacattcagcctggaaggtgacaggtgatgaatgtcgtttaagaagtagttctcagcagagtgtgatggcagtgggatgtcctggacggggaggctccgaaggagcaggggccacgcttggtgaaccagtggagagcagacaactctgcagtttcactaccggggaccaacttgtcttttcctggtggaagtagttcgcttaagttacttgtgagggaaaagagatgaggatagaggaagcaattttgtagaaaatcataaataagtgacatgtgacgttagaatagatcaatgtccaaatatgtagagtat

SEQ ID NO: 114280 - DNA, 1076 bp, Homo sapiens
gcctcaatgatcctggatgactcttatggatcctgagtggctgtggtggggatggatgaccatatgtggctgggggtgaccttggtgtccctgggggtctctgggtgcataagggtggccctggatactcgccatagctctgggtgaccttgctggctctggatgtctctcagagacaccctgaaagtccttgtgtaggagtgcatggttttggggagtgggcagcttcttctctgtggtcacagtgtgaaatctggtctcaggcctttcacgggccttccctgcatgtttgaagatgctgtctggcatcagggctgtccaggagttgtgggctcagggtaatgtctcccgtgaggggaggtggaagggacacgttgctgatggtggctctgtgctccacctgcgtgggctccatggcctcccccttcccgctaggtgtgggcttcacggtcatcctcatctcactgtatgtcggcttcttctacaacgtcatcatcgcctgggcgctgcactatctcttctcctccttcaccacggagctcccctggatccactgcaacaactcctggaacagccccaactgctcggatgcccatcctggtgactccagtggagacagctcgggcctcaacgacacttttgggaccacacctgctgccgagtactttgagtaagtgggagtcgggtcctcgggaacgggagagatggcgcagccaggtcccccatggtagccccttggttggacaccagcccttgctgactcccagggtgcggggagggggaatctgttcctgcactccatccctttagtgctctggaggggcacatttctgaatcactgtggtggtctccaggagctcagcaaagctcctgtagggcgagccctcagcaaggatggggcactgagcagctcccttggctgctcccagcggcagctcagggtgggagggggctgatggggaacacagcagaccctgtgcagaaggtgggcaagctccagtctctgggagctgcagtggcgcctctggagtgagtcagccccatgtctgggctcccttcctccctacccttcctct

SEQ ID NO: 114281 - DNA, 2621 bp, Homo sapiens
gaggacacccagcctgccccggttgtcagggtgacttcgtgcgctgcaaagaaagtaagcgcaagttcttctctccaccctgaaagcatccgtttcacagacgattctaaccctccctggagggcgtgaggtggacacccaccagggccgtgggaaaagagcctccaaatcctagacatttgctcgtccccattccataaccacaggtgcctttgtctttccagctgacttccacaggtttgcagaaatgtaccctgccttcgcagaggaatacctgtacccggatcagacacatttcgaaagctgtgcagagacctcacctgcgccaatcccaaacggcttctgtgccgatttcagcccggaaaactcagacgctgggcggaagcctgttcgcaagaagctggattaggacccagggttgcggagagacgcggcccctcccgcgtggacatcaccgccatgagcctctttgcgagtgacctctgggctccgctcctcactcctgctgtacaggcactgtcttcagcccgagttccaggggcctcgggggctgtttgtatcttgttcctttgtgaagtgtgttgcagaaccgacgcttactgtgcgagaatcggagggcgcgcacgcggatcccccgcctggcctggaccccgtggggtcaggttccctgccgggcggggggcaccggtgccgccccgtgttctcccacggggccctggtttcgagtctctgtcacagcctcttccggcggcagcgtgcaccgggcgggcctccgtgcacactcagcacacgcctgccacacagcgtgcgcttgcgtgtcactctggcacgaaacctgtctgcctctgtggatccacagcctggcagagccgagccgtcacctgatttttcagtgtttctacctgtgtgctggagctcatgagtattttataaactccatttaggtacttcaggaaacatgcagcattttttaaaaaatgaaaattgtttttctacttcatttttccttttagagtcaaaggatatttatttataggcctttttttttttaatatagaatctgaggctgtttgggctttgacttaaatttccatcaggcctctctccagcaggtaatccctctccttccgctgggtcccctggggaggtgtgaactcaagggcctagccccaaaacactttttctgcttttcttaatccttttccagtcccctctttttttataaacgttggcagtttgatgtttctgtttcggcataacgtaatccatttcactgtagcctaaactccagtccgaggttggatattgttcaaatgagcagggcccgagctggaagcgcaaggcagccgccgccgtgccgctcctcccttgccctcaggccaggtccctgctggaagcggctgcatcttcctgtcagccctggtttccatggtgactggcgtcacgctgccacccgagtatggctgaccttcctgcagagagaggagccgcagtcttttgcttgtggaaggagacgctgggctgtgcggtgcggagggtgatgaggatgtctggtgacagccgtgcggacaccactcctctctgcagcactgcctcccagcgccagggtcgcgggcacatcccactgagagcgggggtcctgccccatcttagagtcaaaggcagaggggcttccaggccctggatggggtattttggtgtcacctgaagtccctctgacatcaccttgtttcatcattttttatgacagaattagaaacccatccttcaagcacaataatcatcacagacttgagtttgcttcctaaagcaaaggctccgggtttgtttggaaaatttttttgatttctgaaatgaattgatttttatatttggggcatctctatagaaagtgaccaccaaggccagtaagtacgggaaaaaatgtttactaacttcctcagagattcgtgatacgcgtttctccactgacagacatttaaaaacaaccttcagctccgtttcaatcaatcacctcgacttgttttttagcatggacactgccagcaggacagacagggatggagtaaaccgaagtcaatttcagggctcttggcgtgttggacacagaagaaatcctagtgcagcctttggtagctaacagtcactgattttataattggagaatgcgtaaagattcatttttcaaggagaagagcctgcaaatggccaatgaaggaggtaaataaactaagatattccgagggaagggacccaggccacctcccttccgcaggtctgcagatgaagggttttttgaatgaaatgccactgtgcattttcagaaaaaaaaatctctgataaacagactttgaatggatgtttgttcctcctgattctcttttctcttcgtggcgacttagagttggcggatattcggaactgtgaatgtacatagcgttgagttaaaccccttgtgtgtgagacaggacgcagcgggcccctggtggcctgggggccagacccgtgggcaggtggggcatgggccctggcctgcggggacctgctggggtgtgagggcagagggagggttgccatgaaggaacttgggattttcaatggaataagtaaaacataaagtc

SEQ ID NO: 114282 - DNA, 1033 bp, Homo sapiens
gcagaaagagggttggggcactgggctgtcggaggcgtgagtgtggccctgggagcagctccaaatgtctcccatgtcaactcctgcggcaaaggcatggtgatcctggttctgaggttgggaactctggatccaggctggaggggtggcatgactcagggcctgtgctgcctggggacagcgaggagggacaggtgtggagggacaggtgtgggctgtacgaggtctcctgagctggagaacaagcaggagatggtgtcttgctagacgaaccaaggacataagcaggtgttgaatcggaaaagcagcatttccacccacggctgtacgtcacactggggctcgggctgggtgggcacggcaccccctccgtgggagcgttgactgcccagtagcgccctctggagggcgcgtctggaggtttcaccccagaattgggagtaatttacttgttaacccgagttgtaaatctgctcaacattgtgcaatctgtttttaaggctggaaatcctgtggctcacgctgtgtcagtttcacaaccaagtggaaatcgaggttcgtatggatacagagttacacagcgctcttcacagtggttgatgcagacacgagcttacaccaggatgcccagataagccttgtacaatgtggcatatcacctgtcttgctttcccatctttccgtttctcagggctccttcgaggagcctctggttgctttacctcaatgactttatgtctctcttatgagtctgaaccacttggataagatttgggtttttgttttttgtttttctgagacagcattttgtcttgctctgttgcccaggctggagtgtagcgatgggctcactgcagcctcgacctcctgggcccaagtgatctccctgcctcagcctcccacgtaattggaccacaggcacacgccatgcctagctaatttttgtagagatgggtctcactttgttgcctaggctggtctcaaactcctgggctcaagcagtcctcccgccttggcctcctaaagtgcgggg

SEQ ID NO: 114283 - DNA, 1044 bp, Homo sapiens
ctcagccctgcctggcgggagccgtgcattccacgtgatccgtctcccctcctctcttccagctctgatccagtatatacggcctgtgttcgtgtcccggtcagaccaggattctcgcaggaaaacagtagaagaaatcaagagacgggcgcagtccaacggaaagtggccacaggtaatgcacgtagccctgattgtgtttcagtggttttattccgaaagatgcgaacttcgcgagtggggagaaagaaactggggcccttcctccggggctggattctgattctcttctcctagtgagtgcgtgaactcaggagggtgctgtcaggtgcatttggtttcggtgcccgaaatttaaagttaaagtaaagaaaaacaattctcaaatgcatctcagcttcctgaatcatcttttctgaactaagttctgactcagatagagcattgctcacccgccctcctggtgcagtgtgattttggagttgatgtgtcagcctgctgtgtgttgggtggttctaaaagtcctggagtaaacttcctggtctgtatgctggttcccaggcattcagaagccctgaacccagctgtaggggcagcctggctgacattagcttggacgctgtttttcttctttccagctgagccatcattagaagctggaaattttacagaactgtctgggatctgattgctcacgaagctttgcagggtctggctgggggcagccccttagagggctgtgacttccagggtgccccagctctgcccccacaagcacaggcagtctcctcccccacccatttggcctgcctggccctgggcttgccagggtgagcccacgccggcccccctgaggtctgtcttcctcacggggcccagaactgaaagcagcctgcggggctgggagtttgagggcagtttttgctactgcaggccagtgtgagtcagaggaattgaaaccccggtgtggagggtgctgcctgactggggctcggctctcctgctcatccagcccgttgctggggtcccagccctccttcggct

SEQ ID NO: 114284 - DNA, 1127 bp, Homo sapiens
ccgcctcctctgttctgtctcaggaggcaggagccccgtgcgagcacaggctctcacttttcaaaatagatggcttggggcaattttccgtttccccatgctaaccctggtggcttttcttgtctgtgaataattgacttggcttcaacaggcgataaatggaccacaacggactcttattctagcagctgtacttcagagacgctttcatatgtacatctcatgcacgtgtgaagtgtcccgtgacagtgacacgttggggtttctgtcacctctgcttcatgagatctttgggcatctgggtctgtggagactcactgtgtatcattctgtgtatgtgtgcagagagggtgtgtatgtgtgtacatatgcgcatgtgagtgtgcatacatatgtatgtgcatgcacgggagtaggtacacgtgcataggcatgtggttgcattactgtgtgtatgtgagccaccagtgcaagtatgtatatgagtgtgtacatgtgtatatgtgtgtgctgtgtacctgtgtgtgttgcatgtgtgtacatgtgagtgcatgtatatatgtgtggatggatgtctgtatcgtgtgcacatacatgtacgtgtatgacagtatgtacatgtgtatgagtgttgtgtctctgtgtacatgtatgtgtgtatatgtgcaagtgtacgtgtgtacaggtgtccacatatgtatgatgtatgtacatatgtgtatgagagtatatgtgtgtacatatgtatgagtgtgtgtgtgcatgtgagtatatatgagagcgatgtctgtgtatgtgtgtgaatgtgtgcatgtgtgggagtatgcacggatgcttgtgggcactcaagctgcccgtgctgcctggcattgaatcccacccctggagcccctggcgtctccttcagcagcactgatgaaagctcccttggtgcacagtcctgggcttggcttggtgcttgaagggaaacagaagagagaacaaaccctgaattctgaactccccaaggggaaacctagtcacaaaagcaccgtagttagggacgtaagggatcaggaggaaactgaatttgaagtagcagattcagagtgtaccgctgaataataattacgtagtcggtttgggac

SEQ ID NO: 114285 - DNA, 1017 bp, Homo sapiens
tgaaaaagtggccactcaggagccctgcttcaggagccgggcacgggactcgactaccacacttgctgggtgtctggcccatgcccggtgcctcctgtgcctgcaggggcagagcgcccttgagtgctgggagggcccaggcagcggagaacgtggctccctgtcccactccgtctcaccgctcttgtctgagaaggcgccctgtgctgtactgcttggacatgactggttgggagtgtccaagctaggcttccacgaggtcacctgtcttgctaagccatgtccctgcctctgacacagagactgcaggaggagccctcctgaccttcctcttcctgtttccagggccctcatccccacgcggcccatgacaaaagtgctatggttctcaggatggccaggagccgcgaccgtcccctccaagtcctgtgggcctcctgtgggtgctggggcatgcttaccattcccggttactgtttccagcatttccagtgtaaacctttaatctagctgtgaatcattctgaaaatgagcccaggaaaaaagcatgatgctaggcttgtgtttggaaataacattattttctaatgtgatcactgtttgtccctgtgaaacccacgtcattttgcaaccctgggggatactttttgctgtattaaaaccaatgcatccctggcttctcagccatgtgccagcagcatgagcttaggtgtgttaaaggtgaggtgctgttcttgaacttccagcacagtcagctcccagcttccctcagtgtggtctttcctctgctgtgactggtggccctctaacctcatcccctgtgccctcgtcccctgtgtggggagacactgctggggtgggggctggtacctggggacagcagccttttccaaaccttgattttactcttgaatttcacacttccctcttagagccagaggagtgagttatttcctcttaaagatatttgccacatacaagcttaaaaaaaaaaaaggaaagaaagaaaacagtttc

SEQ ID NO: 114286 - DNA, 1079 bp, Homo sapiens
cgagaggctcctggtcccgagattgaaggctttgggcagctgttctcccttgggccgaagccaggcagagatcctggcttgaggtgttggggcctctcagagagggggcttgctttgttgccacttcagaggttccatctgaggaattaggtgtgtttgtacatccagtcgtttctgctggatgtctgcaatgtgtggctcaagggtttagtttgtaaacgttctcaaagttctctgcagaaacattttgcttttcaccaagcattgctttgcaaagcttttactttgatgtgatatattcttgtaaagtttccacagagtgaaatagcctgtctttcaagccaagaaagccttcttccccaaagaaagaaatgggtccagtagtggctgacacactcaagaacccgcagaaacccagctaagttcccagttgagataaaccagtgagtacctgcatttacctgtgagcatttgccgcctgggaggggctgctgtgtgtcttcggattagcgccatgcggggacacctcctcctccagccagcccatctgtcatttaactacagatttagtgaggagcttaagtatctctttggacagaaaacagcacattaagatctgaaaagaggtatcaaagccatcagggtctgtaatacgtgcaatgttttaatcctctggctaaagcaaggatatagatttagtagagagcggtaaatggtatggtacaggatcttagtgagttcagctgaggttcttcatagtcacacattcatatatcgttttggagtcatgaagtggtttctgtcacccagggttttctcggtactttccttggaatctgtgggtatgagtatttcccactatggttctgatgcgttttccccatttcttttttttttctttttctttttctttttttttttttttttttgagacagtctctctctgtcgcccaggctggagtgcagaggtgcgatatcggctcactacaagctctgcttcccgggttcacgccattctcctgcctcagcctcccgagtagctgggactacaggcgcccgccacaatgcccggctaattt

SEQ ID NO: 114287 - DNA, 1049 bp, Homo sapiens
attttagataaatctattccatcggtatcatgtttactgaggtggataactgcatggaggttctgtgagagaatgttcttatgaaacgcacatgggagcctgtgacagacaggcccgagcaatacaaatgtcctcaggtgggacagaacgatgtggtggggagaagagggcgtggcagagcccacggggcacgtgtcagcatttgctgggtccacggggacagaagggaaaggctctgtgctgctgggattcttgcagtgcctctccgcgtttggaactttattccagtgaaaagtagatgtgtgtgtaggccctgaatttaataaggtctacaatgataatagttaaatgaagcatgcaccatagattcgtgctgatggtacatgaatttgtgtgtggtgggttaaattgtatgtagttagcaagtttgtgtatttgtttacgtaagtctttcttcttgttccaggtgaatgaaaactttgccattgatttgatagcagagcagcccgtgagcgaggtggagactcgggtgatagcgtgcgatggcggcgggggagctcttggccacccaaaagtgtatataaacttggtgcgtagctggccacctgtgcacatgttagggcagcctgctcgtcctcatactccccttcactcccagtgcctgttctttctgtcctcttctctacctgctcccgaggcggcccttacggggttcacactgctggcacattcaccctacagcgccacactacagggcctacatagagccgcctgtccgaaaaccccctttcaactgtgaagtggtgggcggcatgtttctcttctcggacgcccaagcgtctttcctctctgggcccttctcggtttggtcatcatctcagctcaggctgccacacacagcaccgcaggctggggtcgaaaacaacaaacacatttcccacagcgctggaggctgcagcccaagaccaccgtgccgctctgtgggttcctcctggggcctcgctccggggcttgcagatgaggtctcctccctgtgtcttcacagggcc

SEQ ID NO: 114288 - DNA, 1023 bp, Homo sapiens
agtgattatgtcgtgatggtgaggaggtggaggatctggaagtgattatgtcgtgatggtgacgaggtggaggatctggaagtgattaggtcgtgatggtcaggaggtggaggatctgggaagtgattaggtcgtgatcgtgagtaggtggaggatccgggaagtgcttaggtcgtgatggtgaggaggtggaggacctgggaagtgattaggtcgtgatggtgaggaggtggaggatctgggaagtgattaggtcgtgatggtgaggaggtggaggatctggaagtgattaggtcgtgatggtgaggaggtggaggatctggaagtgattaggtcgtgatggtgaggaggtggaggatctggaagtgattaggtcgtgatggtgagtaggtggaggatccgggaagtgattaggtcgtgacggtgaggaggtggaggatccgggaagtgattaggtcgtgatggtgaggaggtggaggatccgggaagtgattaggtcgtgatggtgaggaggtggaggatctggaagtgattaggtcgtgatggtgaggaggtggaggatctggaagtgattaggtcgtgatggtgaggaggtggaggatctggaagtgattaggtcgtgatggtgaggaggtggaggatctggaaatgattaggtcatgatggtgaggaggtggaggctctggacgtgattaggtcgtgatggtgaggaggtggaggatctggaagtgattaggtcgtgatggtgaggaggtggaggatctggaattgattaggtcgttttggtgacaaggtggaggatctggaagtgattaggtcgtgatggtgaggaggtggaggatctggaagtgattaggtcgtgacggtgaggaggtggaggatctggaagtgattaggtcgtcagggtgcagccctcctgaatgggattagtgcccttaaaccagaggccccagaggcatccctggctccttccactatgaaccagaaagtgggacctcaccagactgcaagtctgctggatga

SEQ ID NO: 114289 - DNA, 1048 bp, Homo sapiens
ccattccctgctgctgctcactctctgccctttacggatcctcaacaccagcctcctgccccaaagcctccctttaccatgctgcctcgcacccaccaccagaatgtcttcccagagcgcagcacagctgcaccgttgccaaatcccagggcttttgggtgaactgctaccctgaagactgcaacccaaggctgctggacccccctggaaaaccccagttttgccagtttccttctgctccactctcctccttcatccctgctgggattccagtgggtgcattgctatcatctgaaaacacctcttccttctggggctttgcgtagactactagctgcatgggcccctcgtagaaaaccatctgctggaggcttgtgtagacagtcaggtgcaggaggcttgagtagacagtcaggtgcaggaggcttgtatagacagtcaggtgcaggaagcttgtgtagacagtcaggtgcaggaggcttgtgtacacaggtgtaagaggcttgtgtagacagctgcaggaggcttgtgtacacaggggtaagagccttgtgtagacagtcaggtgcaggaggcttgtatagacagtcaggtgtaagaggctgtgcagacagtcacagcaggtgttgtgttggctgcagggccccgatgcagacagctgcctgtctcagagtccctgggcctcctgactggaggaaagatctttgtgtttgggccagggaagcagctcatgtgtagaacaggggattctcggggtgtttcatgcaatctcagaatctctaaagtcaggctctcagtgagcatcctttgctctctctcctgcacaggagactcacatgaccctcttcacattctcagaccctcttcctgtgaatgctttttagctcaatctaagatgcagatagttataatttattttcaacatgtgcccttattaaggtacacatttaaatgatcctgaagtcttggaatgccataagctgatggaaagatttttaacgtgagaagcagaaggggatgtgactgagagaaggaggagaggagaagc

SEQ ID NO: 114290 - DNA, 1012 bp, Homo sapiens
agacgccccagggcagccggacgtctccgggcgcgccgccccccgccagcaagcccaagctgtggtcgctggccgagatcgccacgtcggacctcaagcagccgagcctgggcccgggctgcgggccaccggggctgcccgcggccgccgcgccggcctcaaccggggcaccgccaggaggctcgccctaccctgcctcgccgctgctgggccgccccctctactacacgtcgcccttctacggcaactacacaaactacgggaacttgaacgcggcgctgcagggccagggtctcctgcggtacaactctgcggccgcggcccccggcgaggccctgcacaccgcgccaaaggcggccagcgacgcgggcaaggcgggcgcgcacccgctcgagtcccactaccggtccccgggcggcggctacgagcccaagaaaggtaggcggcccgcggccggcggcgcccgggaggggagggagagccagccccggggaggcggagcgcccgggagacccgagggagggtccgggaagaagatccagggggccactcctgggacccagaattagcagagtgagggcggagggcgagatggaagccaaagaaggtgtggccctctttttagacttgccctgttattatttatttttacttaatttactgttattttgactattactatcgtggctgtcttagtttcggcaaacccagattgccacgaaattcaaattacagcgtgtcgccctaatgagcctgggtgtgtttcggtgtcttgttaaggagtcagagttgaatccgcttttctgccgttggctagaggcaaacagaacgttccagttactctcagaggcgttttgtcttcaaaagataaaatcaaatgttttttccgctttttgttgttgtcgttgttcggaaagaaaaccgttttttcccctgtgctatgttgcctgtgttgctcctaagtcaggctacccgaaagaggagttcaaggggggaagttaagaactaggga

SEQ ID NO: 114291 - DNA, 1049 bp, Homo sapiens
ctcatttcccacgactctcctagctgcctgatgtcgggggtctcttttaacttcctactatcgcggtttcagtgataaaacggaactcaccagcacctcattacctactctgcctagtgttctaggaactacagacattgtggtgaacaaaataggatctctcataagtaagatgcatatgtgtgaataaggcctcagaagattttaggtgttagaaaataaaggaggatgttggaatattggtcttgtctcttagctagagtagtcaggtagggaatttttgagtcagtaactttcagatatttgaataatgggaaggatcgggctgtcagaagagatgtgggaagagcttcctggatagagggattaacaggtggaaaggttcctttggtgagaaggagcagggtgtctttgatgagcagaacatggtatggttggcatgagcatagtgcacacggaagatggttgatgagaccagacgggagtgcaggctaggtaggccatgccgagaaacttggtttgcattttaagtgcaatatctgtgaactgattgcaaacattttaagtgttgaaggaaggggaggaaggaaatgtgctgcttttgtgagtagaaggagaactaacagatcattgccttcactgagctgcattgtgtaggtatcttataacgcccccccgcccccgccaccaccaccccaggaacgtgattggagttctcccgaatctttaatacattgtatttattattcgagccaattcactcaacaaacatttattgatcacctgccgtattttagacactgcaattatggcattaggggagaaaaagacaaaaattcttgatctcttggagcttccgttctaggagggtggcaggataaatgaaacaaatgagttatgttagagggtaatgaaaacgttgttgatgaattgaacagagatggggagggaatgaatgggtgaggactaggccagtggctgttggaatttaagtagggagtcctggaacgtttatattggagcaaaggtgagagaataataagctctgt

SEQ ID NO: 114292 - DNA, 1041 bp, Homo sapiens
ttgcatttcctgatatgaaaaaggtggaatacgttttttaaaaaatgtctattgactattccaaattcttaatctgtgaattgacagtttatatcctttacctttttcagtgtaaacctctgaaatgcataagtctggtccagcagtaccagtatttgggctttattctcaggaaaaatagaactgtttgacaaaggaatgggcaaggaaattcatggcatgctgtctgtaaagactggaaaaggacctaaacctccctcaacaacaatttgatagatggagtacatccaaaaatatattttatatatgtggtggcagttctgaaagttgaaagttaaaaacacgctgagtgatttttgacagatggtgagattacaagagaaactatgcatttgactttattttaatgtgtagatgttttaacagatatgtaacataactgagaagaaaaggcagacattatcataaagggaaatattactgtaactatcaaaatcatttggattatctggaaaactattgggataatcagtgaaaattgaacatagtttggataatttcaaattattacttggtgtaattattacttgtgaagggctattgtggttatgtttaaaagtaagtccttatttctgaagtatttagtgatggaaaaaggagacattaaaggaaagaagttaatgaaaagaaaaaattagctcattttaaaatcttaggaacatttcaacagtgtaactaaggatgtttttccttttgggttgatagcggtaatttagagccaaatttgtgtttttttttttttttgttttgtttttgttttttttttcgagatggaatctcactgtcactggagtgcaatggcacgatctcggctcactgcaacctccgcctctcaggttcaagtgattctcctgcctcagcctcctgagtagctaggattacaggtgcccaccaacacacctggctaaattttgtatttttagtagagacagggtttcaccatgttggtcaggctggtcttgaactcctgacctcaggtaa

SEQ ID NO: 114293 - DNA, 1050 bp, Homo sapiens
aacactagagtttctcctttggaggcctgcatggtactgattataattccccgtgagctttgggacttgaaccttttgttacaggttcacaggcctttaaaacaaagctcgtgggttagtaggaagttgtttttaccaaactggacttcttaaaaaatctgttttctgtcttcaaagccttcttagctttactgctggacctcaaacctcctaacagtattttatagccatggtgtgagatttcctattttttttgttttcagctttgtaatagtctcatgaatgtatgagccaagatactactcagatctaaaggtttctaaataaaaggcttgtatatcaacgtgatgcttttgagaaatttaaggtgatatagtcattaatttagcatgcatttgtttcaggaaatctaggaagtctagagggtgccttgcatggattgaaacataattttaacatagtatattttctaaattaaaaagtaacctaatttttcttttcttttttgcagtaatttgttaacagaatatcagaagaaatgtgatgatatccttttactggctttttctgttgagttttggaactaacttatgtttaattcctgaaagagatgtgagaattgttcctcataggccttctggaagatagtacttaacaggcttcagtagggagcatgtctcacaagcacagtaaacagacagtccttttattcttaatccatgtttaatgatgagttttaaaaatgagattacttttcttgttgattgtgattttcttaacgtctcataagctttttagtgggtgggtttctcttaatttgtactgaggatgtggcatgttttttaggtttacgaataatgtgaaactgaatgtgatacttgctgaatgttatttttgaatctgcaagaagtacagtatgggaaattcaaaatgttgggcaattgactttcattaattatttttgtgatttacagggaaatgtgtgtgtatatatatatctccaaaatcatagaaatagcgttgctgtatattcatgaacgctgtgggcag

SEQ ID NO: 114294 - DNA, 1029 bp, Homo sapiens
agaagtgcatttaaaaagactttttcatccttttttttgttccaagttagcaataaaatctgaaattataagcacatatatttaatacttcgttatagatccttttctgtaataatgttaattcattgtctttagagagaatagtaatctgcatcaccaagtggaagagatgcttcaaaaaatttctcctctacagaaatgtcaggaagaactgggatctttaaaagcagagctagaagagaaaaaggtatgaacaataattttctgtaaagatttacggtcaataaattaggatgagcttattcggtataattgggacgagggggcttttgatgtgttaaaggaaataaaggctagtcaagactctcagtgtattattagctttagagaacattgaactaactgcttagtagcttagtctttacagtgattattagctctgcaatactgtgtcagttgcttatgctttttgagagggtcagcagaaaatgcttctcactatgaatttgtgtggttttatgtgttctgcattaattgatttttatacctttgttttttgcttaaatgtaaaataacatgcaaaaattcaaactttaaatgtagaggaatcgttgtacataagagagagggagcaggagagaattttatttcttcagtggctctggcctatctttggagagcccagtggtgaatgaagcgtgtagggcttctgctctggtatgagttaagatgtcctttaaagaacctactctcataattcataaactagtcaatattttaagcaatgtctgtatactttacctctgtaaccctaactgctttgtttgatccctttttaaaaaatctcttttcatttctttttttggcagtcatgtatagtctcttgtggtttctcattgtctgtgagaggtacacaaaaatgagtctttcaataatgcttttataagtaagcgttcaggttaggggttatttcttttagggcatgttcgatctttttgggtgatacttattaagctgagatggagcatt

SEQ ID NO: 114295 - DNA, 1011 bp, Homo sapiens
gaaatgtatagttatcataccctgctagaactctcaataacagtgtctttcccattttatagtagctgctagggtgtatatatcagtgttcacacattttccccagttatcattaagtataatgatttgttttaaattttccctagcaataccgttagctcatatttattatgctctaatattttttcaggatatgttgaattttaattagttgaggcaaaaatattagctgtttgatatttaaaccaattatgaaggtttagaattgcaataaaattagtatattgtttttaagttttatagtttttgttggattatattgttagtcatatttcatctattaagaatctggttacctctattaaaatattcagtgactattttttctgcctaatgtctgtttatttggttaatagcttatcaaaggcaaagcaagttatgaccaatggtcagtgactttcattttgacaatatctgttttttttctttttttaaagagttctttaaagttgtatcaggatactcatcaggaatatgctcgtgtaaaggaagaatgcttgaagagtgatgctcagtaagtagttactaaattactatagaaatacggttttcagttttgaaaatacgtaattcttaagtcggtagtgtttttttttttacagtctttggatttcttggccataattagctgcatggtcttgaactagttagtctctcaaccttggtttccacatctgtaaactggaagttatatctactttgaagggtcataaggaacattaaataaattgtcatatgttaaagggctgcacaaagaactccataaaggtgtttgtctctgtatgtatatgcattatatttgcatgcacatgtgtctgtgtgtgtctaaaggtgtttgtctgtgtatataatgcattatgtactcattcacttgtgtctgtgtgtcagaacataatgactgaccccttgctttgtgccagtgctttaaccgatagcatgtggaatgggtat

SEQ ID NO: 114296 - DNA, 1086 bp, Homo sapiens
aacttcagctagtctcatgaatgatgccactgcagttcaggaagggtcccagatgtactcatggcagaaatttgacaggcccatggcatgtgtttcaagtggaaagaacagaattttttaatccactgtaaagatatttcatactaaatagtatattattctctcttaggatactagttcagactgaacatttgttatacaaatatttgtaatttaaaaaatatgtgccacaaattataaggcatattttttcctattctctctttcttgccatttaacttacacaatttcgttattaggaagaagaaactagaagctaaggtgaagaagctgcaaggtaagtggcactattgttacctgaagttttcggtcagtacaaaaatcactggtaactgtatgaggaggtacttcttgatcaaatagttgaattgttatggtttttgatggtacatccatggatgactgcatcaaggggtctattagaaagaagtgtgaatactactctcctctcagttaccaaatggtaacatagagatggaatgtggcaaatctccgaaatgttactgcactcaaagtaatcgcagcccatacttttgctataaaaagcagtaattaatgaaagaatttaatttggaaagttgaatctcatagggctttttctttttttcttaatgaaataagtagctggtggaaagggtggctacttttagtaccaagaaacatgtatttagatagttataacacacatacagagatttcgatgaaattttgtacattagggattgtccagtttgtacctgatcctcacccgtgcctcaccctcttgttaggggttctagcctacagtgagtaggtacgagtgcagagggaccatgcgagaatctaagtcctcacatttcagctaataacctttcaggaactggtaggaattgaactcaagatctttttatttgctttttcctcccttcattgtgtgggtgggacacagacctaataccaagtagagacaaaggggctctgccagatccatcctgcacacgatcttcctgtcattccagcctggactgcagcgggcatcttacctgc

SEQ ID NO: 114297 - DNA, 1077 bp, Homo sapiens
gaactccttggcttgagtgattctcctgcctcagtctcccaaagtgctgatactacaggtgtgagccactgtgcccagccaaggaaattatttttttgagacagggtctcactccgtcacctaggctggagtacagtggtgcagtcatggcttactgcagcctcagcctcccagactcaggtgattattccacctcctgagtagctgggaactacaggtgtgcaccacgacacccgactaatttcgactaatttttgtagagacagagttccactatgttgcccaggctggtcttgaactcctgggctcaagaaacctgctcatcctcccaaagtgctgggatcacagtcgtgagccactgcaaggaaacatctttaaagaaatctgaagtgccagtgagactatatatacaggttttagaacagactttctgtgaagcaaaatgccgcctttatttttcgtgtataaaaagtagtttttctagtaaaaaaaatttatcggtgtgacttaataaagattactgagaaaaaaaatatccaaacttgttagaggagtcaggagaggattgttactgaggtgtttcatggagttttagttagtaattgtatatgagcatagttatgtaaagtcagtactggtcagattcttaatagtatgtctggaccatttgaggcttcagaaacaaaaatgaaaatgaaggattacctaaaatagatctctaataaaggtcctagggattatgtttagctaacttgttgaagagaattccagggaagaataaccatatctataataagcattgagaaaatcgcctctcccctccctaataaagaggctatattctgagataaaatcacatttctaaaatttctaggactttaaggttgccagtgattgaaatgggacggcaactcccttttatgccttgaattcttccttaactaggggttgggattgctgtgcctggtttggaaagaattcttaaggcctgcgctagttctgtggtttaaatgacagttaaagaaaaaagtacattgcattcagccctgacgataaaatattgaaggagcaatggct

SEQ ID NO: 114298 - DNA, 1047 bp, Homo sapiens
tttccccaaatcagagatggcagggagtgggagaaggagcaggacattagcattttgccaggtaattgattaaagggtgaaaggaatgccaagcttctggtttcaaaaactgtttctggcctttgctcataaactgtggccccagtttcattttctaaagttttagctatgacaatggagctcctcagagtgggcgtggatatcagaaaattgggtaattatggccactttaagggctagcccctcctcttcccagaaaacaagatgtttatatactccatgtaaaccctcacaactgcgtccactttccactgcttcccctgcaaggcagggtcccacagatttatgaaatgagaatctacatttactgctgaaggaatagcactaaaaatgtaggctgaagaaatacactttgtctgccaaagatgttctgcctaaactctcatctaaaacttagagaaaaagcagtgagaaaaaagagaaaagcaacagacgcaagaagactgagagaaacagtctttaattatgaatgagaaggaaatgctgaaaactgattgcatttcctttagagaaagtctaagaacatgtccataggctgctgctatgaaattgaaccagatagggatcttgaaaattaaaaatccaattgtataaataaacccagtagaaaggtggaaatactggatgaacaaataaaagatcaattaagttgatcctagagactgaatcctaggcggttgagagcatcatacaaagggacaaacaaattaaagatattagagaaaataacaagatttggaggatagagccagatgtctcaatatgcgtctcctaggacttctcagaggggagaacagaaacagaaggagagaaggtgatcaagacatgacagaagggaactttcctgagcagagaacacatggaatattcatattcataggggccaccaagtgttgagcgtgatttttgtgtacagtctccgtctctgacaccttcgtaggaaatatacctaaaatcaaatgaaacagactgaatattagagggatg

SEQ ID NO: 114299 - DNA, 1054 bp, Homo sapiens
actggaccacagcatctcgatccatgagtgatagaaaaagagacattttacatgagacaaaaacacaaatggaggttagggagatggataagtcagtacaaactgagaagaccattcataaactcactcgaggtctatgcattgagagattgtctgccagccctgcacaagagaaggaagctgcccctgggaagtctgagttgtgttcttctccccttggcaaaaggccattaaatgaactcatggaatctgaaggaaaaaccgtattgtctaaaatgatgggatcgcccaaatcagagtttactaagtggacacgaattaatgaaatcacttctgaaccagaccgtatcacagtttctggccattttcacagactatctagagaattggaaaaggaaaaagaagatactcaagggttcactttaggagaatcacctgaatcagaagatgatgactcaggtgatggaatggatgtagcagggcttgacattgaaaccagtttttcttcctcttctaccttggtagcattgtctgttggcagtaatccccagtcttcttctgggttagactgtggtaatgatacagatattactactaaagtattctctactgaaccgcatcattcagaacataaattgcaaactaaaactttaaacacattacatctgcagtctgagccaccggagtgttctataggaggaaacaacttggagaatagcttgtgtgccttgagccctgaattgggagcatctaattttaatgatcagaagagcagtgggatagaatatacaaaagtagtaaaaggcttgaccaaaatacattcacttcctcggtcagtatttatgaaagctacaaaagatgggcaatgtgaaagtcaagatccaagaattgagctcacactaaataagccagatttcacatcattaataggttctcaggctgccttgatcaagagtggtttgggttttgttaaaagtacttcatggcaccatagtgatttattaaggaaaggtggcgaagaaagtctgagagccaaatcagaacatgaacagaa

SEQ ID NO: 114300 - DNA, 2233 bp, Homo sapiens
aataacaacatgaccactgagaatttaaaagagaaaagtccatttcgggaaacgactggctcctcatcacatgcttcagaaccaaccccacaagcagctgccttggacactgagggcagctctcccatcagcggtatgcctcagaatgaaaaccctcagagcagaccagaggcccgttcagatgcaggcaggcaaaccgatggtggggaagaagacctgccagaacctgtggagccatcagccttgtgctctgactctgtgatggagccatccatagagcaaagttctaactgcgaggccgaaacaacatttcagtgtcagatagcaacagtgacctcagaagttataaacgtacttataaataaggatcagaatctagtcattgaaaagggggacaactggacaatcatcagtggtgtagctgtcttgccacatgtggaccaggtcacactgtgtgacattcctggagacatccctatttctcaggatcaaggagagctggaagctggttgcatcccagtgacttctgctgagaagtccccagaggccagtcacactggccctgcatttcaggaggctccatgtggcaataatctttcatgtccccaagaggatgtttcaagcagtggtcagagcaccaactttgataagagtcgtttgcgaaatagacccgttaagcctagtatatggattagttctcaaatctatgatcaaaacttcgagactcagattgttgcgtctgatcacacatattataactcaaaactagagccatctggcaaaaataagaatcgatcaaagatttcaaacaaagatcagtcaaacaaaccagtaaaaacttcagcgtcgagcagagttgaaactcatcagagtgaagttgctcagtcattttcaggggaaaaagctaatacaaaaactcaaagaagccaaactcagaccattttagcaaatgctgatacatccactcctacagattgttctcctgacacactgagtaaaatacggcaagaggtggggcctcctttgccgcctctgcttgctcctctgatagctacacctccaaggacttcacagccactgtctccactgatatcgagttctagtccttcctcaccagcctctcctgttggccaggtttctcccttccgtgaaaccccagtgcctcctgccatgtctccatggccagaggaccccagacgtgcctctcctccagatccttctccatctccatctgcagcttcagccagtgagagggtagtgccgtctcctctgcagttctgtgcggccacgccgaagcacgcacttcctgtgcctggccgactcccaccctgtgcatctggccacgctgctgtgggagggcctcaggagaattctgtgaaaatccttgacaccatgtatccagagttatctgccagggcccggaccctcaacatcctcaaagggaatattcaactcacacgaggtccgcctgctgactgtaagaatttaccgggacctgccagtgctatgataggattcaaaacgatcacttcagcagcaactgcttttgtcaaaactgggagcagctctggtggtgactgtaaccaagacaagtcaagagatttggggactcagcaggattcaagcgggaaaagaacactgtcaacgtctacactgagaagtgctaaaagactgcgcctggacactgggtccccagaaccagaaaccaggggagtcactgcagaaggaatccacaaaaacctcccagggaacctccctccagctgaagttgcaacaacaaatgaggaaagaagttgttctagtccagccgtcagtgcagtttcacagttgcctttaagcccaaaagaaactgtggagtcccatgataaagccatagctaatgccctgaagaaaattgcagagttttcttttgatctgttacctgtcattcgtagtcatgtgtatgtgggaaatatctccaaaaagcccgtaatgagagatcaagagaaggaagttgtttatgaatttagcacaacaaaaaaggtatgtggctgctcttttctaagtgcattagggattacatgtcctcaaagacagatgctgtttactgtcagcaaaatgtgtagatgaccatgaacaaaagttttacttcaaggatgagagttatccatgtaaacattacgactatatttctagccagcattttacagatttaaaatatgataagacactggagatttggtcatttctattc

SEQ ID NO: 114301 - DNA, 1170 bp, Homo sapiens
aaagcataaggagctccgtaagtcactttgaaaggaagtgaatgcatatatcaaattatgtaatgctcctcttaggacaaaaaatgttacttagtattttaaatttaaacagtatatagagtaaattagagtttagaaaacaagaatgagagtagaattacatactgtatttcatatactcacacagattacataaggcaaaacccaagaaattatgattatttgactagtggtagtgacagtatgcagctaggtcttttgagacttgcattctggcatctgcagcatttaccagccataggaaacagacaggcgtggggatttcttcagtacccccgacctcgattctcatgatttaccatgctaggtaagttcttaccagttactatgctctaccttctgatgtagcgcaagttttattttttcaatagatacttaagttttgtaacttttagataatctttggtaggctgaagataagtatgagtgtacattgcctttttaatttttttttcaatccagcatttagcagagtgcttgcttcactctattctctcagaactaaaaattcagaagatatctatggaccacaattacattcacgccctctgcagggtgtatgtgggtatttgtcggcaactcggagacttggaaagagctcgtttgttttgctacagcctacttaaagaaggtatgcttagattgtgacaattttgtattgaaaatatacgattgcctttttcccttatactggagtctatattttcagctctgattactgtgtgtcttttaaaataatgttatgttttgtccattgaatagctttagctatacccagctgcacctggtctttagtagggcttacttatatcagcactatatttccacttgtaaataaatgagtatctctcattactgtgtatttgttctatgctctgtgcagctgctttagaattagatatagttgccttaaagtatgggatactttaaagtaagtgacaagccaaactgctgtaccactaggtggaaagggcagcaactttaagatggaattgtaagctgatgaaaagaagtagatgagagaaagctgaaaggagacggtgacatgagggttgtcctttgattctcttttctctttactatttcttccatccctactagtggatcaga

SEQ ID NO: 114302 - DNA, 1050 bp, Homo sapiens
attgaactttatactttaaaagagtttattttattgtctgtagactacacttcaattaatttttaaaaaagagacaaagagtgtaggagaaagtatttacaacaaaagaattgtcatctagaatttattttaaaaaattcttcaaatcagaagctttatgtgttcaatgagtaaatgtaatgcataaaaacctatgtaatgtaatacaaaacctatgtaatgcaaaacctatgtaatgcataaaaattgcctgtaatgacacataccaaatgggagaattctgagactgaggaagttggagaacggattttggaaatgactgtgactggagcctcatctgggctccccatttacagcttcctccattgcaggatgcctgcaaggcaccagtgaaattaatacaatttgttcttaatttgcaatttatttactcgatcatacatcaaagagttattgtattattttatttctgatagattttccggagtctgaaaaattaactttgtttattgcaaacatgtggcatgatatatttctctctcaatcggtgattaataaagcaatgcagttagttgccaggcaacgtgctaaaggagaggttctgaactgcttgagagcttttcttaattgggaaaaggtgagccatatttctgtttcttacagtatcttacttttagatattatataaatgttaattattttgttgtgtatttagttttatattagttcataggcattttcttctttctagatcttttaaaatttaatcagtttagcctaagcttatccattttgttaattaagaatgcatgagacattcaaggaagaattgtagaccaaaggattgtgttaattaacagtttgtgttatacactaatttgtgactgatgaaacccacgcataggtgtatatgtttaaaagtctcagagaagctacaaaattatttggttcttcaatagatacttaggtaaaaatatatatatttcagttttttcctattaggatttttaaaatctaatatgcttaatttttctttccagttgatagaat

SEQ ID NO: 114303 - DNA, 1040 bp, Homo sapiens
tactgaagttacagttttcctctggcttagctccttttggtttacatgcacagctttatttgtctgtgatcctgccggataacttggcttctaaaacacaggggctgcttttgcacctggagagtccaagtgaaaactcaggctctaccacttcgtagttctgggacactggggatgctcttcagcttctctgtccaaagccttgttcagaagaattagaacaagatgcaagcactgaatttgcagccacgtttaagctagcatgggcacaactatgctgttggagaagatgtgagcatccagtatctgttctcacttgaacttacaatgttagatcctcagcagttatcctctttcacttattgcttaaggatcatttataagatattagtattatttgagtgatgatgagcatacatcttttcatgttgtttttttatagtaaggagctgtggcctgtgatggataaatggataaaatacagaaaaggacatgcaaacattgcgtatactcctgatattattatagcctcaatactgaggctgattggtaagttgtctgttttattattgtttttttcttgttattgatatcttggtggaaggctggggggttaactgtataataaaatatgctgactttgaaaatttctgattttacaaccatcagagtagatacttttgtacttaagtcattctcctttctctctccttgtaaattagtgttttattcatctttttcagagattaagatttttcatattagtacattttagttacaattgagctctttttagatgctaatactaatatacataaagactaggatatataagtcgctataaattatactgtagtttcatttggtttctaaaataaggattgtattaagccattcttgcattgctatataaaactacctgagatgggataatttataaagaggtttcattggcttccagttctgcaggctttacaggaagtagaatgctggcacctgcttggctcgtggggaagccttagggagctttcagtcatggt

SEQ ID NO: 114304 - DNA, 1031 bp, Homo sapiens
taacctgggctctctgcgaggcctcctgggtggagctgtgtcttgacggaatgaaatccgtgatgtacagtgagatgccaggtatcacagagtacttagcatcaaggggggagagcttggaaacctggagaccttgtgagcaaggcttcgtagtggggatttctattatcatttacgtattgcatagcatgtaattttatctcttgtgggagaagcttaactcaaagtaactcttataagggatgaatctagtttttattttgaatattgtataatcaaggaataatacagttaagcaacatgccatcagaaatgcacagagttacattttaaatactgtataacacccaagatgatcttaacatggtaggttgtcttcagctttcagtgggagactgtatatttagcttaatgagaacagtgtttctcatttaagctgctttatctgaaataccttctttaactttaggatagctgctgaagtggtacacatttcttccatattacagtgtacttttttacaattgaggttgtatattgacataaaagaaagtagccagaataatggctaatgagttgttttgccagcagatgcagtttactctgatactacagtgggtgtaacctagaagctgtggtaatcctcgtccccatgagggagaaggaggagctgatgttggggcctgctatagattagaccttgtgcatggcactgccccacagcctaacgggatccccaagacagccatctgagtggatggcattgtccttcttgtatacaggaggaaaccaaagctcagagagaagagtgatttgctgaaggtgaggctaggaagtgccatccctgctgtttgcccaggtctgtccctctccagagctagctctttaaatagtgccacatgctgttatttattaaaattatttttaacctcttgtgtttctcttactgttacacttttttatttgtttgagtcatggccttactgtgtgccccgtgctctgtgctttctcattgcttgtggtttatgggg

SEQ ID NO: 114305 - DNA, 1308 bp, Homo sapiens
cattttgaacacaaatagtttgatcagctttcagaatacaaagggaggtttcaaaacaaaaagacataaaatagataaaacagaccagaggctctccttattgtttggcaaggagacaggagaaacaagcagtcgcatagtcgtttttccctaaatctaatacgtttcacttaaggctgttgtgatctgtgacatatgggttatattattgtgtctttgtcaaacaacaaaaacttgaacttagccctttttttgctgcagaaagtgtccttttagtggcttcttaaaattgagtggcattttataatgaacttaccaatataaaaacatgatttggttcctgagctgttgttgttggacttgtgttccaatgagtgactaggaaaaaataaattggcaaaaacctagagttttctgctatctttgctggaaatgagttgcaaaagtttttctcaagatgtagtgcgtaattgatcagagcaaaacatgcagagcccttagcagaaacccactttaatgcattttcttcatatccctaaagttccttaaaaatatgtgacaatgcatcaggaagaggagaactgaagagtagaagttcccttgcagatttttttatcagtgacatgtaatgagcaattcacagatgagcgcaggcagagctctgtgtgccgtgtacatatggaccgtgctatgatgtgtctcacattggatgatattccactttgggaattttagtatttgtatatagaaaatgggtttaataactcaccatggttttgatttgtcttatattcgttatttcttaaaactcttgtatgtgtttttataataaaaaataaaagtaagccatggatattactgttctgattattagagtgaaactgggtgttacttctgctctaccaagggtgaagaagacatctaaccaaagatagaagaaaatggtcattcctaaagagacctgccttctggtgatagaaacattgcattgccagtacttacccagctttgagtatttacggagatgctctttagtgataccagatgccagataattaagtgtttacaggccctcatgattggattttttgtttaattacagctgctgccctttaacaattgcatttggcagcaattttgttactccttccttaagtaattataacaggcagaactgaaatttttaaatcacttggttgtcctttcggaagctttgtgttgatagtcattcttactaccaatatgttgaacatactctgccaggtgccttgctgggaggagctagtcacatggcatttgggtagagga

SEQ ID NO: 114306 - DNA, 1128 bp, Homo sapiens
attccagacagagcaggagctctatgtggatccaaaagcctgggctggactggagagcaaagaagattctccaacaatgtacaaaccatcatttgagttttaaatcagagagagatctctcatgatttgaaaaactggtgatttgggtgacatgaaaaactttggggaatttcgctagtgctcagaaacccacacactgcagaatggaaaatcctgagcccactttcaaaacatttgaacctagtagtaaactgaagcaagcttaacttgccaaatagctcagacacagcttaactgcagaatacgtctattgagtgacatgaaaccagtgcctgacataagaagggaaatcgtgtgcactttgagctctgctgttctgatatcttacaataaagaatagaacagttcataactagacatacagatgggccagatgttgaaattatttgatgggggctttaactaaaagtgtgctaaataatattttggaaaaagtgtacagcatgtaggaagagatgccgaatatcaccagagatatggaagctgtggaagagaatggagtggaagtgctacacatgagaaatataatatcagaaataagtaccttattggattttgtaatagagtgacttagcagaggaaataatcagtgaacttcaggacaagttattagaaagtatccaagctgaaatacaaattaaaaattgacaaataaaaaataaacataaaaagaccaaaaaaaaaaaaacccacaaaatccagaataggttatgatgcctttctttgtgagacaatatcaaatgacccaacatacatataattgggacccaagaagaagagaaaatgaagaagaataaatatttaatatgatatttgctgagaatagtctaaaattgataaaagacataaactcacaaatctaaaacaatgagaaaacaccaatcaggagaaatacaaagtacctaagcacatcatagctaattggtgaccaccaaaactaaagagcagatttttaaaatgagccagataaaagatgcgcattatgtacaggagaacaaagataagtgcagtcactgacttctcaccagacttaatagaaacaacagacagatatcctcaaagagctga

SEQ ID NO: 114307 - DNA, 1034 bp, Homo sapiens
agttctgcgtgaagaccctacacacttccttcattgacttctgctccttccggtcggctatcacctggaccctcctggactgggcttttgcctaagaactttccaaaaaccacacaaaatagtgaatggcagtttctccaataacaattccaaattatctgaaaatagcaaaccatggctaatttctaatgaacaataatactcttctctatgactgaaagggaagtgccaagcacagatgtgtgagaggccacagatgcatggccctgagctgagggggaaaagcggaatgactctgagctgatgtacggctcagttcaaacagtcagcatggatggtaattgctatctgttttcctgagatcggaaagttgcttgtaatacgggtaggtaaaaagaatcaaatataatagaactgaataacttttcagtactagaataaaatcaatatgttgcaagtaatttcagaagcaacagcagcttccaagaataactatttatcaggatgggcacttacgcatgtttagggatcttgtgaaataatttagtggtgtttggtcaacagtcaaccgttcattcattttgctgttcctgagcctccattgcacacacggcaaagtgctcacaggtgcttgcatggaaggattccctccgcagctagaaacttacatttagggatgatcacgtgttacaaaattatgtttacatttaaaacgccaatattctatcacgattgtaaacacagatggagagcaagggaagccactgtttattcaccacttgcctgtgctctctctgttcttgtgacctgatggattgtgcagggtcgtagtaaggaaagggaggttgtcctggggccaggtcgctgagtatgcagtgggccaggtcccactctgcagcccctaagggcctcacccataatttgaccttgaagagaaacctcttcaagtctctctgcctcactcttctcttctgtgaaacaaggaggacaacagaaccgccctcacaggtaaacgaagaattggagatattgaa

SEQ ID NO: 114308 - DNA, 1170 bp, Homo sapiens
aaagcagcttggcccttgtctccaggactttgtgtgtgggcaggagtgggttcacccttcggtcttcaaagaaccaagtctgagcaggatgtccatgctgttgaagaaacgaccgtcagctgacatggttaaccttattctgtgagcctgtcaggtttttcttgagaaatggatagattttgtttagaattaaccataattttgccacattacattatttcaaaaacactgaaatgaaatagaatttctagaacttgtgatgtttttatcttttgctatctatcaaggctactttttataccattagtagtaacctaatgatatcttgttctgaagtgattatatatttttggcctcaattataaaattcgaaagtagagttagttttcagtttttgttttttgttttttaaataatgaatgattcagtttagttgaatgataaggatttctttagggtacagaaaaaggtaggtggcctgctcttggtaaaatataggtattgatctaggcagtatgtttaattaaatcttcaggatactgaagataatttctgggggaagtgtcagaaattctaagtaacagttttatactgtttagaaataattggccagaatgtctctgttatatttaagttacctaggtgtatttagtaaagtggtatatcaagccgcctcttctttttaaagcagtggaatggtttgtaaaaggatcttggggtcgtcagggctggggctcttgtgcttgtagttctcctttcctttcccctgaagctcctccacagaggaggaggggctttgccaagcagcagggctgacctagaatggaggctgcatcgtggaaggatccgcctatgtcacccaggcccgaacccctggatctcatttagttttttcttttgtcaagagttgccttaccatacaagctgctgtaaggatcaaaaaggtaataaatagcatgaacgaattttgaaaagtgcaaatgctaaacacatgtaaagtggtatggcttgtgaagcgtgcttgggtttatcagtgatcattacttgattttatgagctgttcgtattatcagaagtaatgaaatcagatgatctgtacttgtgtaaatgagggaatattaattcccctggttcctacactgagttttgtctaaacaaggccgtgtgcag

SEQ ID NO: 114309 - DNA, 1050 bp, Homo sapiens
cacggacatagaaaatgttgcactcgaggttccatacctagtgctgtgggaatagccagaccagcctgatgctgtaggaaggctccagagaggagaggaagctaaaccagacagtatggctttctttccctcagactttgagtatagtccgctgcctcatgtgttcgctgaaaccgcacacacagtcatatgcacagtcaggtaattgtttttgagagaaggttcatatttttcatcaggttccctctccatcccccttactggcaatttctagttgagaaggaaagtaacaaatatttaagggtattttgtaactctaacggtgtcctaggaatcctgtagctaaccaaagaggtcagaaccgtgtgtaacccgcatagctgtgaggagaacgaacttgcgtggagccccggttggctgggtagctctgtgggtggtgcttatgctgtcaagcgaaattaaccagatgcctgtgtgtttgcctttcccccaggaattttattgttactggcttacaggatattgacaagtgcagacagcagcttcatgatattactgtaccgttagaagtttttgagtaagtaacattcttgatattagtcttgggtataaatcttgttcagttatggtgtggtatcgtgacttcttcatcactggcattcgagtgcctgctgtgtggtaggcacagcctgggtgctggggatgtgccagtggaaaaaaaaatagacaaaaatacaaaaatacctgcccttatggaacttccgttctaatggcattacaaaacgaaaaaaaagaatatccttaatattctattgtggaaaaaaagttacatgtaaataaaagcttattaaatatatgaaatacatcataggtcctcaaagccctgcttaggctaaagaacagccacaaaactttcttttttccttaagaggtgaaaagtcctatgagggctatattgtaaatttttaaaaaatggcagccagaagcacctgaaaagcaagctggtctgatgttcccaaactgcccgtggagtgctagttctgagaggtg

SEQ ID NO: 114310 - DNA, 1095 bp, Homo sapiens
tgtagaaaagctggcaaatcaaaaaagtccttcagtcgcaaggaagctgaagctacctttaagagtttggtgaagacgcatgaaaaatatggttgggtcaccccgcccgtgtccgacggctgatgtctgccacgtgcagtagacgctcgagcgcctgtccacacacacaccagtaccctgacatctcctcaatgctgtgcatcctccacccgtttttactccagccagaactgcatcctgaatgcccaggagacgtttaagttatttatgaaaagatgtgtgtacagagaggaagagggagcaaatgccgttcggattatgtttcgattataaatgaatgatcacctcgaagtcactttagaacacatgttgagatggtgacatttcccagcctgcctgcccctctgcccaccccggtcacattgccctgagcttctttccatgacagcagctccgacgagccggcaggaaactcaatgcccctgctggctccatttccatgtaaatggcgccgttcatatttcacagggacgccgtgcatctccgccgtgcgtccccggcacgtgtttgctgtgctctgtatctctgtttttcttcctggaaggtcaacataacttgaaaatgtgtctttctgtggcccatggtccgctgtgatgacatttagacctcatttgtgctatgacctttggctcatgaaaacacaaatttaacattgccaggttctagtgatttaaaaccacaactgcccacttggtgaaaacgtgctctcgatgctgatttgtggtgtgctgctgtccacagataaaccagtgccattagatggaaggcagaggatactgcgaccacccctggcagacggtggcgtagacaccaggtgcgccctctggggctcagagcaacggatggtcagctgcgaacagtctcgtccgatgttaggaaatggtcctacggccgcgcctttgtgttcctgtcttctctccaccaccaaaagcaaaagatgatttcccattcactgcagtcatctgactcattttaatatctgtgctagtgacaatgaatgtcagaactgccaaaggataccaagtgatcatacga

SEQ ID NO: 114311 - DNA, 1014 bp, Homo sapiens
tcaaagaagccgtaaagatagcggccttagggttcctgggaagtagcccactcttatcaccctgtagcgacgctcaaagcgaggagtcactcccacactcagcactgcctgtgagcaccttgccttgtcagaataggcaaccccgggtaaccagacacagagcagcctccagtgttggatggatgtaggggtcaaagacaacagaatagcagctagcaagtacagaccacacagggagaagaaaacttaaaaattgataaataaggtggacagttattatggtgtatggataagcctgaggaaacattcaagagaagactgctcctaacatggaggattttctttctctaactttaatcagcattttggtaagggtcttccgattcccgaagagtgcacggcagaagaaaagacatcagctgaaggagttttcgcttccacccagcagggttgtctctgatgagggcctctctgaagtagccagccccataggttgggagtagtggttgccttctggtgggggtgcttaaatgggagaaaaactttttactgaaaactctttgtttcctttgaactttgacgtacctgttgagtagatgaataaaataaatttcctaaaaagaaggacaactttgagccagcgagtccacttcacaggcccacagatgagtcaaatgtgtctgcagagtcatttgatgcaatgttgttaatagcagaaacctggaagccctcagcatcaatgacgaggcactgggacaccaatggtgcagagcccccacgtggacactggccagcaaaggggctgaagcagctcgctgtgtcctggagtccagtgaccaccaagaaagaaacgcaaggtgtagagaagaatgtgcattctgctgccattgtgtacagggggaaaatacacaggcttggagacatgtgcttttgaatttatgtaaagtaactggaaggatacagaagaaattgacagttttggttgcctctgaggagggcatctatgtgggctgg

SEQ ID NO: 114312 - DNA, 1164 bp, Homo sapiens
tgagtggtcctgggttctgctctggcagccctgctaagggcagagtctcccggtggtcctgggtcctgctctgacgccctgctaagggcagagtctcccagcctctcaggagcttcagtccacttaggaaacttgaggtgagctgcagggagcctgtggagaaacgcttctcatttagtggggtgaggtgacacggggtggcggggacagtaagttaagtttgagaaggaagtatgtagaaagtgtatgtgaaatctgtagatttggggcctctactccattgtgaacttaaagaggcagggcgaaagcgagggtgagaattttactcaggacatgaagaaggaagtcctttgagaaaacctacccctcggatccagatgaaatgtcctcccagtagttttgggggttttgtgggtatgggttttctgtggttttcttttttaagcagttgcatattacatctcattcgatttagttatgggaatgtttaatgttctacatgaagccactttcacttgtaggaatccagacgctctgcagtgtcccatcgtcttatgcggatggcggggaaaggcctccattcgaacttttgtgcccaagaatgaacggcttcattatctcaggatgatggggctggaggtattgggagaaaagaagaaggaaggggttatcctcacaaatgagagtgcagccagcaccggacagccagacaatgacgtgactgagggacagagagcaggagagcccaacagcccagatgcagaagaggccaacagtccagacgtgacagcaggctgtgacccggcgggggtccatccaccccggtgagcaggcccaaggcagcgggggcccacacccctcacacgcaaaactggcttcttctggtcactggtgtctgaaaccaaatccagagcagcctgtggcctgtaaagcatatatttctaatgactgcagactggtgggatcataggagccttctgaatgaccaggactgctttctttggagctgatgaaaatgtactcttttagcgtgttagaaatcacttgttttattttgtttctttggccaagctgggtctagtgtttcttttgctgggaatagactttcaaaagttgtacttctatcaagaaacaaaactgcccttgcagaaatttcaggtcttt

SEQ ID NO: 114313 - DNA, 1094 bp, Homo sapiens
gactggctaacatgcagattttaatcacctgtgttagagcaaaataagagtcttgccagcagttctgacttttctgctagccagctggagtagattattggtcatattgctgcttttatatttcatcaacttccacttcagatcactccagtgacgttttcccctaagcataaaaatcatttctccaagctgttctaattttctttctgttgtcttcattcttgtttatttttttaaataacttgctgtttaatatttttggctcaatttgatcaaaagtacgtgaatcacttcttgcagttacgtttcttacttgcgtttaaaacttactcgtgtggttcctttgggatataaaacatgctctgtggagtctgtctcccactgccgtctccaggcaagaaccacaatttaaagtagagattcttgtaaaggataaaggacctgtttatactggttttcttttaatcctgcacttagatgattgcagtattgttttagacaatttttatgtatttcatgccattctgggagttggtgttatagtttatttaattttgaattttgaagaattaaccagcagttaatccccagcctccttgcttctcagagtggattgtcaggtgacatcccttgaagtccctgaatggcttttgcctgggtcctcttccagatcgtccctactgcgtcatttggacttggttcatgtatccagacggcctcttttcaccatctagatccttgaagccaagaatgtagattatttgttgttttctttcttcagaatacttaacacatcactaggtgcagaaatgtgctcagcgcatgcatccactacctggaaaacctggcaaatgtgtgtctgtttcttttccagcaaagggaagcatcgtgctgaagtatgaaccagattctgcgtaagtcagtacacgccctgcccttagacacacacgccttgtcattagctacagtgttctcgttggtgaggaaagtgacttgggaaggtgggaaccttcttcaggccttttgtgattgttcctcagaagtagccttgtgaaaacttcagaaccaaaatattcctgtaggtcatcatgaag

SEQ ID NO: 114314 - DNA, 1057 bp, Homo sapiens
ttacaggagatggtcctgtcttcatctctctgtgtttcatcttatttttttacttacaggttattaacacggggatcaaagtctggtgtagaaataacagcggtgaagagtttgactgtgctttccggctggcacaggaggtaattttggaagtggatttgaacagcagtagccacagatgactgaagcagtcgggagtagatgggcttgctggtcagccagatggtctgagtggctcagggcttggctggcacctaccagccacttgaccctcacaggttatagagctctcccagagtgctggtttcccctcctaggggggggtgggttccacacctgtccaaggggaggggccatagtgagggctcgaccaccatagccgctaagagcatagcccctgagagcaggctgttgtcgttcatgaatgacatcatggtatctgttctctcattctctttattcacacagggaatatatacattgtatccatttattaactcaagaattattactgtatcaatggaagatgttaagatactgttgacccaggaaaatcccttttttagaaaactcagcagtgagacctacagtcaagcaaaggacctgggtgagtagttggaaatgcatagagacataacttgtattccctttataaggccagcaaaaatgcaggtggtgtgcgttggggcatatttatcaatcatagttttcagtttatttatggctacatcaatttccagagggttctgtagatccctgattgacagttcagaatgctaagggtcaaaggcatcttggggttggtgtacttccccaggctctggtggtgccctgctgctgcccagcagcctgtggtgtgtctgtgtggcgtgcagggctggcctttgctcaccttgctgggccagagagtccggggagaggaggggtcagcctgtgagcagccctggcaagcctcccagccagagctcttgacccacttgcctgtcagcaggtcgggggtgggtggaagcaggtctctgtgcatgagcaaatttgtttttttctttttttgttttga

SEQ ID NO: 114315 - DNA, 1049 bp, Homo sapiens
cacagctactcaggctgaggcaggagaaccgcttcaacccgggaggcagaggttgcagtgagctgagactgcgccactgcactccagcttggaagacagagcaagactccatatcaaaaaaaaaaaaaaagtctcaaaagtagtgttatcaggtcattatcattggagtagcggctgagggagagaagctgcacttgttaatttaggtttctgatggagttgtgccccaaataaatgttacgtggaggtttcaggtggaagtggatgaagtttagaagctggagtccagagcagagcccagtgcccttgaaccacactgcagttttggggattgaattctggaggaggagaataagatgtttagaaacagtctaccagattttgaactcattgtggataaacaacaatgttgttatgtacaggaaattttatgctttggatccttcattcccaaggatgaatttgttaactcggactacagaagggaagaaaaggcagctctacatggtttctaaggagttgcggaatgtgctgctgaataacagtgagaagatgaaggtgccagccgcacagacgctgagtgctgtgtgatgcgggatgcgtgtggcttttcacagcggcttagatttcatttggagcagaccgtgacatctgccctccccacctgtagcgctggctgtgggtccctgagcctgccctttgatttcagagctgttgactgacacagggctgaatggttcctgccagagtcctgaatctggtggcctgtgtcttttctgtgccccattcccgcaggggggtgagccatggtgtagttctcacagctcgccctcctgggcagagaaggtactaaaggtgtagaggctgcgagtactgctgccccgacccttgggatttgtcctttgaggtacttcccttagaatttggccatttgggggcccttctttcatttgctttactgtcctccaaacgacgtaatcacaagttgtgagtatcagttcgttcttaaccggggtttctcggtgggtttctgcttctcctctcctttc

SEQ ID NO: 114316 - DNA, 1050 bp, Homo sapiens
atttatatacttgtctttttgcccctgccgggtattttagaaatcgtgcttggtgcactttgtgtccttcagtgtgccttacccagagcagatgcacgataagcatttttacacgagaacaagctggtggtgtaggcctctgctaaggaacaggctgtatatgctctttgtgggattaaggtagaatcagctttaactccaaagaaactgtccatgaattttgtttataatagcaagtagatttaaaatgacactttaaaaaaattctgttgtctttctctacatataatgctgtagaaaaatataactgatggattttgtgaacgtggtatttttaacttttcgtagcagcacaaagaatgctcctctttgtgtgtcaatgaaattgttctttatgacagcttcagggtaaatctgcagagaccagagaaagcacacagctgagccctgcagatctcacagaagggaaacccacagatccctctaagctggaaagtccgtcattcacaggaactggtgacacagaaatagctcatgcaactgaggatttagagaataatggcagtaagaaagatggcgtgtgtgggtaagaaaagtggttatgtcttgatctaatacgctggtgtcttcacagtccttttggattaaatgggatcccagagccacttcttggtcggtttgagggggcagtacatgtgtggtatcaggcacatgcagtgtgagggctggactctgtggaagccggaaggtttcaacatctgccgcaaaccgttccatgttgcacagaactgacagaaaggaagaatgtgcttttggtattgaaggttaccacacattacagattgatttgtctcatcctgattccctttttagtcctcctccatcaaagaaaatgaagttatttggatttaaagaagatccatttgtatttattcctgaagatgacccattatttccacctattgagtaaggattcagcctttttaattattcatttaaagaaatttactatagagtatcaaatgtacaactgatcacatgtaaccattg

SEQ ID NO: 114317 - DNA, 1134 bp, Homo sapiens
tcggcctcccaaagtgctgggattacaggcatgagccactgtgcccagccgtcatgaactttttaaagattacaaagtgggccaggtgcagtggcccaatcctgtaatccccagcactttgggaggccaaggctgatggatcacttgagctcaaaagtttgagaccagcctggacgacatggcaagaccccatctctacagaaaaaaaaaaagaaaaatacaaaaactggccaggcagtgtgttgcatgcctgtagtcccagctccttgggaggctgaggcaggaggatctcctgagcccaggaggcggaggctacagtgggttgagatcacaccactgcactccagcctaggcaacagatccagaccttgactcaaaaaaaaaaaaaaaatttaagtttacatattggccattctatgagtgagggtcgaagacatgatttttctcttgtatcatctttgcggtatttgtcttaatagtaaaagaatgcatttttgattagttcagaggtgtgaattatatatatatatttagccttaggatattaccccatcatcagaatactggagggttttttgtggcagtattggtgaaaaaatcttcaatgccgtggaataaacgtcagccaaaggtgagtttttctttttccaaaatgacataacatttgatcttgtacatttaagacaaaaactaaccggagtttagtagaagtacagaggaaagaggagcttcttgctgtgggcagcaggagagctgaccctgaatgagggggaatttcatttaaatatcaagttttccaaaaagcagaaatttctcataggtgataggtaagtggagaagtcagtgtttgggggaatgtattcctgccacactgtaaatccagttatttaataaaaattgaaaagacatgaaagattgctctgtggctctcaattggaagccccaggtttctgtgctctagttccttgtgagtggttcatttcaccaattacagatagcagagctctgctgaccccaagccagcccgggttcaccttggctgcaaggaatgatgacggccttgtccagacctggctagaaagatgcagcccggcctgtttgctatggatctaaactgcctgctggttcctttcc

SEQ ID NO: 114318 - DNA, 1015 bp, Homo sapiens
gcagaccttggctgagccttagagtgggtggttgctggtgattttgactggagggggtgtgcgttccccacctgaaagtgctcaacaactttactggagaaggggcaacatggggtagcattggcagcttccaacccaggtgctggggtgtggagataacacctgctgcctgccctgctcatctgtgaagcccctggacagtgtttgatggagaagcccgcatgtttgcctgcactgtcatttactgttagcttttaaaaggaagaggattcagaaatgatggcagaagtcagtacgatgcttgcttcaaaggtttcttactgccattcctccaccttggagattcttttcctttgtttttgtaattgtcccattttcatgttttctgggagatttgttgaattttcctctgctgagaggctgtcacatcagtatctgtgctagtagctggtctcactggtttcctgtaatggcctcaccttatagcttcttattgtgtcactggtatggacacttaaggccagtgtgttttcacagctcttatcgcattgtttttaaaactgggctgactgtgtcccgatgggcaattttaggaaacttcctgggaccacgaacttgaggtttaaaaattcccatagttcattttcagcattgctctgggatgtttgttagacatgcctgcgtgaagacctgcagcatcgccctggtgtgcattggaatggggagacggagcaggcgtcctgcagcccagccttctggttgtcttcttgcggagttagtctcgcgtctgtggcaggactcctcaatgccctgtcattggaacaactttattgagctgtcgtttacatattgttaatgtttgctcattttaagtgtacggttcagtgatttttagtaagtttactcagttggcagcgccttaccacagtccagctttaggccgttcccgtcaccctagcagacctttcctgcccaacagcacttgctccccattccagctgagccccatcggcca

SEQ ID NO: 114319 - DNA, 1281 bp, Homo sapiens
aacagcatagggggcttttcatatgtgtatggtacaatacacataacgtgaggtttaccatcttaatcatttttgagcctgcagttcagtcccgttaggtatattcccattgttaatcaccaccaccatccatctccagaaatcttcaccttgcaaaactgaaactctgaactcctttaaacagtagctcccatctctctcttccctgcccctcacaccaccgttctattttttgtctgtatgactttgactactctagacctcacagaagcggaatcatactgtatttgtcttttcgtgactggcttatttaacttactgcagcgtccttgaggctcacttgtgttgttgtctgtgtcaaaattgcattgcttattaaggctgaacactattctgttgtttatataaaccgcattttgtttacccatccatctgttgatggacatctgggtttcttccactttttggctgttgtgagccatgctgctgtgagcatggtatacaaatacctctccaagatcctggttacgattctttggatatacactcagaagttgaatggctggatcatatgatcatatagtaattctgtgtttaattttggggggaccccaccatgctttttttcacagtggctgcgtcattttgtatttctacccccagtgcacaagggttccaatttctctacacattcagggacacttattatctggggctctttgttgttagtagccatcctaatgggtgtgaggtcacctcatacagttttatactgaggaactgacagatagtacagaatattctgaaacagtagtgtatttctacagtgtattgatataaaatatttctccttttatgttttgccagaatgttaacttttcccatcatattttccttagagccaataatgagaaatttcaaacttagcatgtttcctgcacccacgtgtgtgaagtcagttggtgcatagtcagtgagagaggcctttcctgggcagtgcccacctgctgctgtccttccagtgaggctccccttggcggctggctggtctgggttgtgccctcagccctgcggttgttgatggccttcacggtcctttaagctggaatgtaatgttgtgtttattttcctgtgctcatgtagacctctgtaaagatgtcatttctgggtgatgttttcttgcatggtcataattgccatggtgttggtgatactttattccaaaaggtgtgtgagggggagtatggggcacataatagtttagttgtaatgaaattacac

SEQ ID NO: 114320 - DNA, 1281 bp, Homo sapiens
ttccattaacaaaaacatgaaaataacttccattaaataaaagtagaaagtcagaaatttaacggtgattgtaagaaaaatttagctattagtaagaaaaatttagctattatattagcttaattgaaattactatggaaaatttattagtcattattcatataattctgattaaaatgccattgttgattaactgagtttttcaatagtattttaggttctgaaaaacatgaaaataacttccattaaataaaagtagaaagtcagaaatgtttacctgtgattgtaggaaaaatttagctaatatattagcttaactgtggaaaatttcttattagtcattattcatgtaattctgattaaagtgtcattgttgattaactgagattttcaatagtattttaggttctgtgtcctaggtctgcaaattagtcttgctagtgttttttccaaatggaagcacattaatatctccttagtgaatggagtttactgttcaaatccattattttctgcttgaaaattgaagtataatttaaaactataatacattagaaaatccctaaaacaaaagctgaaagcagattgcagttggtgaaaatggagattgtttcctaactgatatttgtaacacttgttttgtaacttagcttgtatgtgacatatctgttaaagtgcagtcatccacctgtagggagctttgcactcataaatatcttttttccagtggagacggcactatgagaaaaaacattgatgtttggaaaaagtggaccaccttaaatagcttgcagctacatgggtaagtaaaacttcatcactgctaacactgtgtgacaagtagatcagcagagatttattgttatgcaagtgagcatccgatctttaattagagagctgtaagcatcagaggatggtcaatggccaccttcaactgttttatcagaagttatttgaaaacctttcaagagcaataactgcaaattgtatacatttcagataacacgtttattaaaaatgccttctataaaaatttcttgcaacacttcagatatgtatttttccatgaaatgaccgtttacctcttgatgtatgcattactaatcttttctctctgtttttgttcttttgtatcatcgttttgctaagagacattttgatctcttagaaatatttttcggttggctttttatgatggggaactattcattaaagaacaattggaaaattcttaaagagaaatctcataacacgatgatcacgtctgttaatgtttggtgt

SEQ ID NO: 114321 - DNA, 3089 bp, Homo sapiens
catcttgcctaccaccgtcagtagtactcaaacaaacacactcataccatgggggagctttattttagaattatgtgtgttttctataaaaacgaatggcatttcttttttttttttttgagatggagtctcactctgttgcccaggctggagtgcagtggcgtgatgttggctcactgcaagttccacctcctgggttcacgccattctcctgcctcagcctctcgagtagctgggactacaggtgcccgccaccatgcccgggtaattttttgtatttttagtagagacggggtttcaccatgttagccaggatggtctcgatctcctgacctcgtgatccgcccgccttggcctcccaaagtgctgggattacaggtgtgagccaccacgcccggctgcagatggtgtttctttatcaagcctacttacagaagatagatttcactgtttgaatttttagtaacaatttcccctttcccccacctttgttcattattattactattattattattattattacttactgccttacatgaagggtagtagtgtgtagttaaaagctaccatcagactccctgggttcaaatcctaatcggcaagttacttacagtgttagacatcccatgtgaaatgggacgaatcagtatgtagcttgcgaggtgctcaggaaatgttagctgttatagtgacaccacgcccctttctcttaagtggaaacaaatacccatcgtgatgttttagagtcagctttcatctcgtcctatctttgttcaggcaaacttctctagttctgttttaataggcatatttgttaggtctgttttttgaaatcctcttttttacattgtttaaagataatgccttggctaaaaagcctgcttcacttttccctgtttttagttgttttctccacattggcagtaaagagccttggcgtcccagtagcagcaggttctcctttttgtattgtggatgttttgcatttcatactgttgtgaagagtggctttgatcatacatgttgttggtatatttgcctttttgctgggggtgtgagaagaaccagagatgagcagaggtacacccagtagacttcccagcctgcagagcctcccgggaagagcttccgtgttcaggtgcttggggccccaccctaggagcctgactcacagtcagagcagggtcccggcttgtgttcaggattttgaaacatttgtaaggtgattttgttgtttctacacctttctcctcatcttttttttttgtagttaatcgttactaataacagaaaagacatttttggcatggtaattggcacaaagtgaataattgttgaatagatgacttttgaggctttcaaaattcgagtgtccataaaatccatccagagccacctggttcctttttttgaaccacttaacgtaattctggaaaaccttgactgtgggtcttaagtttggtggattgctgcttctcactggctgacctttggaggtcgcatatttcaggatgtgattccacttaggctccatttcacctgacactgcaattctgtgccttcagagggatttgttattgcgaatgatgtggacaacaagcgctgctacctgctcgtccatcaagccaagaggctgagcagcccctgcatcatggtggtcaaccatgatgcctccagcatacccaggctccagatagatgtggacggcaggaaagagatcctcttctatgatcgaattttatgtgatgtcccttgcaggtatttatcttattggccaaaaagcccaaatccactaaagaaatcaagtcaaatagagactaaaatgaagttgtgcatgaatatgacacaattgtacataagtcttggggtgcggagaaagatagcgtgagcctaaaccaaaagatggacacgtagatacgtcttaatgagaagcagcacagcagatgctggataaagaacagaaaggggtggttgcaatagcctgcagaaagataaagagaaaacaaaacaaaacagagaaaatacgtaagaggaaaatagaatcgtagactcttattgtggtgtgttttaggatgttattgcttggaacaatttgtgcaccccaactattttgtattagttcttccagtgagtacagtatataaaaaactttgtcataaaataatacgtaatcacattggattttatgttatttagttgaatgaaagaaatttcggagttcaagcccttaagaaattcattttgcttgtgtttttatacctttcttgagataatacatcaacattttagatatttagagtttagatataaaataatactcatggtataactgagtaacaagtttttttaaaaggaaagaaacaaaactaaagacatcatctgttccgttcccataggaggtgcacggatgatgatcccaggtgataatgacttctgaatgacataagtttgtcaagaccagaattcaaaagctgccacaaaacttgttagcacagaatgcaagctttagatacgataccacattatggaagaatgccattttgtttcagtaagtggcagagttactgctcatggcaaaactcagtatgaaacttgcagctggtggctctgaatatagctgagtgttaaaataatctggaaaaagccctctttaaagtaaaatttaaaatacatcatgaactaaagtttttttttcctctaggttgcaatttttcagtattccttggggtctcatgttttcctacccctgttttttgatcagaaagataactcgttccttgtatcatattctgagatctgagaacgcagtgaccttatgagcaagaggttgcaagctggggaaatttctgaaattgtggtgggatttctaccatgcaaacaactagtgtacagccaggaatgccattgcaaagtggggattacatctcatgggataattccatcctgcagacctagtccctcgtgtacacgcggctagaccatcaaggaaaatcagcatttacagagaaagccaacaaaaacaggcgttaccttctgggaaaacagggcagataaaattagacacagaaagtaacaaatccagtctt

SEQ ID NO: 114322 - DNA, 1520 bp, Homo sapiens
ggtgcggccccgggggcggggcgagcacttgcgcggggagggacctgcaagcgccccacccacgccggggccgcagtaaccccgcgccgctctgcgcacgcgcggcttcaggctgtccgcggagctccttgagcccgcgtgggaaacctgggcgcttcgcgcggagacgcctttgtggctgcttcctggagcatttttttccccttagagctgttcgctgttttccctgtcacgccgcttttctgaaagacgggttgtgcgctttgggcttattcctggacggtccccaaaggtccccgaaaggaccaggcccggacacgtggggccttggtttccggccggaagtcccgggaggtgtagggctagagttctggccgtggcgggccggtttctgcgtgctgcgtgcgcggccgcgtgggctatggggcggcggtcgcggggtcggcggctccagcaacagcagcggccggaggacgcggaggatggcgccgagggtggtggaaagcgcggcgaggcggtaggagccgggacccggcgggcgggccaggggctcctcctgggcttcccggaccccgaggcctgcgaggcggcggcgagggggcggctccttgggcctcggggtagacgtctctttccttcctcagggctgggaaggaggctaccccgagatcgtcaaggagaacaagctgttcgagcactactaccaggagctcaagatcgtgcccgagggcgagtggggccagttcatggacgctctcagggagccgctcccggccactttaagaattactggttacaaaaggtagggaggcagtgcctgattttttgggagttggggccaggatgctggaggttaaaggcgacggtgttttcttcgacaagtgttacagtgccagagaaccgtggcgtttcagcggtttggattcaggaagcattgaggtggggagcacagggtccaatgaaatggtcacggaggtattgcaggcgcaaggttagaagacgaaatgaaaatgagatctgaggaagattcggctcctggggaatcttccaggagggaagctgagggtcttaccttttggaacgtaagagaatttatagagaatgcataaaaccccttggttctcccctcctccgcgccccccctccatctttgtagttacatctttctaaatgagtcgcaagtaaaacttaacggtaggatatgcttaggagagaaggaatgcagtgttgctcttagggctcaaacagtgtggattgcttaaattttgaaggcatacagtgtaaaagtagtgactaaagaatgtttactctccatgcaaaagttggttttagttttaaaacacttgcagtcttaaatttaagaagatacaatgtattaacttagttttttagatcagtttgaaacttccttatttttcaatagccacgcaaaagagattctccattgcttaaagaacaaatattttaaggaattggaggacctggaggtggacggtcagaaagttgaagttccacagcca

SEQ ID NO: 114323 - DNA, 1881 bp, Homo sapiens
cagcacctacggcctcaactacctgctgtccggcagccgcgcggccgctctcagcggagggggcggccccggggcccaggcgccgcggcccggcaccccgtggaagagccgcgcgtacagcccgggcatccaggggtgagtgcgcggggaggccgcgggggcgggggcggggcccatggtcctggccggcgcccgcggtgcagacacccgtcccaggcgcccgggcttttggaggatggatgttgaaggctaaggccaaggcccgactctgcactgaaagttttttttttaaacatcagactcatttatcgtggagtgacttgcccagatcctacaagtaacagtccaagaaaaggggctgctgggtaggacctgcaggtatttgtcttttttactcttgagattggaacgggaaatcgactctctacccctccaccccgcctccgggcaagtgaggaaccccttgtcaaagtggggcgtagataagtgtggagtttcacgtaagttaagttgcagaataatttagcattgccaggaactcgaatcacgtcgaaggtaaatattaacctttttaatttcattttttaaaaaaatttaactgtcaacttagaggtgattcattttttggggggtgttgtgtcctttaattttgtgctgcaattaccataagcatcgcctatggtttataaacattggcttaattcaaagaaaaaaccagatttgtcatatatgtctattctttggaaggtgccatttttattttaaatatttctacatccgcctagagggaattagaggctctacttaaatttagtgcacttacagacggcaaggaatgaaacgaaaggtggtgtgtgtttcggggttggaattgtcccaggtgaggctgttcaggtgtgatgctgttgacgcagcccctttgccattttgggcttttctgagcgtctggaagcaatttatgtgtaggttgtatgtcagtattttaagacttaaatgataatttttccttgcacaatttttccccccaatttaaaaaacaattaaggatttgctggggtatgagggttgttgcatgcagtagagtcctacaaataaccacaattgctaggtgttgggagttcttatagtaaacttttgcttgtaactctttttctcatttgaagtatgttgggaaacacgagttgatacttctttaaagcgtgtgatacactgtaatagctgcatgttctgtaacttatttcacctggcttgggctacaagcgataccttctaaatttcccgaagtgtaaacatgcagtgcagacgccggcaggagcgcagactcctcttctctccctccagttcttacctgtagaactttctgagagcaggtggttgggagcagtttcttcttgatgaatagcaatatatacctaagggctcgcttggggaggacctttaggtttccagcctgttatgtaactggaatggactccgtttctcttagcactagaaaaaacaggaagacacgtggtctctgccagtcttgggttgtacctctgctcttagaaagtggtagcgcatcaggtcccatgcacctcacttgggctccccgagctgtttcctccaggtaactctagtcaggctcagtaggtggtgttgcttttgttagtgaatgagcccactaggatcaggtgctgtgctaggatctggggatctggggcagggacggcatgggagacacagtctcatgatcttgacccaccctgaaacctgcctgcaagtgccccctgcctagagcacaagagtaccctgctcagttgtgcaggtcccctctcacgctcttcgtcacccacgtccagtctctcatcacatgctgttcgtttggcccttttaatctct

SEQ ID NO: 114324 - DNA, 1062 bp, Homo sapiens
cagggggtgggccacatctgggcccgggcggggtggatctctgcagaagtttatccatctcttggctgacagggtgggcgagatgggagcagctctgagggtccctgttggcagagaatgtctttgattatcaacaacatgcctttttgttgtgggcttgtgatccttttctttcctaaatcagctgccgtgcataaccagttaggctctcctgtggcttcagattggagttagtttcccaagtgctaggatgtgggtgttaggtgatttctgtctttccgtttgaaagagatttcagatcattgtaacatttctggaatcctgtcgatctgaaggaatggctaggatgtagtagtttaagggaaatgaaaagtcgaatgtattttgatgtttctgcatcagacctgctcggtggagtccatttctcagcttcgggagccacgtgcttggctcttgagagcctagctccatcagcccatgtcacacactcacaggtctggctttagctggtttcgccatggtttctaacttgagcctcagtttccccccctgtgaagcagagcctgtggcacccacctcagagagtacatgaaagacttggaagcactctgtgagttgtcatgcgagagattaaaaaggccaccgctgcccttttctcctctctttaaggaaattgaaaccaaaaattaagtccttcttgccagctggacaggaaaagcctttttcttggtttttgaaaatacaacttccactttcagaccaaagtgaaaactgctaaagactgaatattctgagtcttgggagtggggggctagaggggtgttgtgaattgaaagatacctttctatttttaaaacattttaacaatgccttaatgatgaataatgtctgttctagttttgcatttgttagtttttttttttttttttttttaactgttctgaaggtacatcagcactgttctacagctttaaataagaatctcatctccccagaggcaagggtactcttgatgtatttgctcagggctgtatgtgctgctccgtgtaactcatttaaagt

SEQ ID NO: 114325 - DNA, 1946 bp, Homo sapiens
ctctcaacagtcttcctggtcacgagcaccattgtggctcgtgtgtggggctcttttggcttagctctctgcacgagtttgctcctttagttcccagagctgacccttgaaatgagtgatattactcctgttttgtagacagaaaactgaagccttgacagtctgacgtgacctggcaagaggtgctgcagttggaaatgtgaattcacggctgacatctgggcactttactcctaacagtgttcagtgaacaagacgtcgctaacatgcgggggatggaacctagcaactcattctacaaacatggttcaaatatgttggtgcagggccttttgctttgttttcctaaagagattagattcagatgtggtggggtgctttgacagccaccgcaggacaaagttgatagctgtggggttgcggagtgttgaggatttcatagggaagccagtcctgcgcagtagtacgctcaggttcgtgctttcttgaggtgttccagaactggcctggagggaggctgcagtgtggaagcgggatttctgtcacctggagtattcttagaagttgcattctatgaagagtggagcatctgatgagctgtttactcgctgtttcatctgacggcagttgaaagacaaggcaggactggcagcgcagctgcctcagtcagcactgctgcactgggggcttgacctgcagtctcgcaatcctggactataactcattttgaagagagaaaaattaagcattaagtgattcaagcgtcttgcccaaggcgctactagaaaataaaggcactggtgcccagatgcaggtctgcatggtatgcaagcctgggcttcttcccacctcccccacagagagggcactggtatgttggagtgaagagccacgcaagacctctgtgaatgggcagagatgggccagtgacgcaacacagtaaagtgtattttggttataggcatcgtctctaaacttatgtaaaacattattaaaaaatggaaggacaacgatgaaatgatggccaaaaatatagaaaaggataccttgcatgtcctgtgaaatgcaaaggaattctaaagtgtcattatgagttacctcatggaagaaagcaaaaggtgaatctatctagagtttgtggttctgactcacaagagactgatgttcatgctgaaggacgagtgtgacaggtggaaggatagagcaccgagaccacactctaaagggtaggaatctatgggaactattcagggagatgaaagcatggaatgaactgaagcttgcagactcgttgagtaaaaagcgcgttttaggattggttttagaataaaataacaaggcctgtggttggggaagatgacttgctgttcacagagcctcccttaataggtggggacctcagcttttcctctgctgccatcaggtgagtggtgtacagtcctagccacagtagtaatcaccactggcctgactgagccctcaccctttatacagtgtctcctgccaccctcctgggagaggctgttctcggcacagctggcctggggtcacacagctggtaggtgtaaagcaggcattggagtccaggtagtctcactccgtagcctgtctctttagccactggaaatgtagagcaaagcgagaattgtccaaagagataagctaataaagaggaaaacaggctgggtgcaatggctcacgcctgtaatcccagcactttgggaggccaaggagggcggatcacaagttcaggagatcgagaccatcctggctaacacagtaaaaccccatctctactaaaaatacaaaaaattatccgggcgtgatggcacgcacctgtagtcccagctacttgggaggctgaggcaggagaatctcttgaatccaggaggcggaggttgcagtgagccgagatcacactactgcactccagcctgcgtgacaga

SEQ ID NO: 114326 - DNA, 1053 bp, Homo sapiens
tgtctgtgacttgtgccgtgccaccttgacctggcatccactgtcctctaccgcgtttgcagataggagccactgttggtgcctttttgtcgtgtgtgttgaatggtcagggtcccaaatagctgattgggagcactctccttgaatctgccatgtgcctgggtctcaggtgactgggcccctccttgcttcagaacccacgtgcgttgcctgtcctctctggcttggagggttgtgtggaatcagaggtgagacccagtccccagggatgggcagttgcctttgattgcccagctgtcctcagcgccctccctcctgcgcccaactgctgtctcagttgcttgcttgaggatccggatatagactgaggtcggccttagcgtggcggggggttttctcttgagtcttggatactttgttaccggtcccatcttcctgtgggtgggagtgtctgtcttgcttggcccagcctcccagagaccttagctctcttagtacatgggctctgcctaccttgatccccagctcaccaccctagtgcagttgcttcttcgctcttgttccactccttgtcgccatccaccctgtgctttctcgatgtgtccttactcggtgtttctgtggagcagggcatcctgggcttcctttctgatccctggctcctgtgatcttccgtgctgggctccctcttcccttcccttttccactgtgttgccctcacacagctggcatgccatggatgtcgctcacccaagcccttcctaatgttgctcaccaaaacccctcccaccttgcccctgggaccttctccccttccaggctgcatgcaggccgagggcctggcgtctcagcaggaggcagtggggcctttgctggcacctgggctctgcatcctgaccttctgagggcttggtcctttaggtccatcttgaatctcctccaggcttcggactctctgctctgtagctggcccatggagacgggtacactcaggcctggtcttagactccgctgcttgggctgtgctggtgcctttggtgccctcttagtcca

SEQ ID NO: 114327 - DNA, 1086 bp, Homo sapiens
tggttcccagcctcagaagtgtgcctaactgtgccacattcattggaaagctgctttcacacttcctggatggaattctctcattttttcaatataaagtcactgagatgatttttttggagaagtctttaaaggccagttatacatttattgatacttggtattgacaaagttcagttgtttagtgttgctaagtcatactgtgtaagtttgttgagcacagagttttcattttatactttcagaggagaaatgaaactgaatttcgtggccagaaatatgtttgagcgtcatcctgatgtaagaacagaacagaaaatgtggtgacatttcattgtaactctagtatgttttcttttttgtccattagactacatgaggaaataattgacttttataacttcatgtccccttgtcctgaagaagcagctatgagaagagaggtggtgaaacggatcgaaactgtggtgaaagacctttggccgacggctgatgtgagtatgttctttggagttctgtgtcgcacgtcacgtgcgagtaaatttaaataccctgtgatgatgatgtgtcggctagatccacacagaccttttctcgttggcccgaggcagcagttctccaagtgtgctttgagaaggcctccgttgcctggaatgcatggcccccggcgcacctgcacctgctgtcttagacacctgcggtggccgcacatcttcgtgatgctggcgcgcactcaagtgcgaagaccatcggctgagggatttgttgggttttttttttttttttttggaagggggagaatggtgtgattgtttctcttaagttcaccttaaaatttagaaatttcaccctgtcacccacccctgcttccccaccaccacacatagtagcatataatgtgctcatttttgtaaaacttggaagtgttccctcatcacacaccactcttgcagtgaaggaacaagtgttttttgacatgtggagtggggccttctggaatgcttggtgcaggtggcgtgaagcctgcccctggccggctctattcagcagccttccctactgctgactgggctcagtggaccagca

SEQ ID NO: 114328 - DNA, 1038 bp, Homo sapiens
ctctgaagtatgtaatatagaaaaaccatggatgccataatccccttttatttggacatgtatttctccactttttccctatatggatattaatgtttattattgttatcttgttgaacacatcccacaacgcaaacacgtttgtcacttggcttttgacttaacgcttacccttgaccctttcctatgtgtgtaggttgtgttttgtcgtgaggattgccgcattgaagagtctaaggctgggctagaggtttcccggttttattcccattggcgtattcaggggtatttatgtcctcattcctttggtgacagtcttttaaaatctttgccaatctgataaaaccatgtgttaacgcttttaaatttatatttctttaatgattagtggggttaaacacattgctatttatgaattccacaaattttgattgagcgtctgttaggtgagataccattcttactgttggtgataaaatcgttggcggacgggtgacagaacaggtggtggagagcccagctccaggcgcgtgtccctgggccttctcctctgtgtggctctgtgtgctgtccgcccggttgctggctgccctcctctgctgtgtgcaaggcctgtgtgtgtcggggaagcctttcttgtcacacatgtcatactttttccaatttgttttttgcatttgtatttttttattcagctcctatacatttaaaaaaacacctcagatttaatggttgtttttgttttatggcttctgggatgtgagctttatttatttcctaaagatcgtctcaaggaaaacacattggctgatgtgttttgttgttgtttatagatggcatgatttgtgcaggctcttgagtggttttcttggtagcacggtatggcagtgtatcatccatttttgtccgttggatgagtcacattggagacattggcattgtcttcaagtgtctgctgaaatgtactcaaaaaacaaagacccacataatcgttgagttataatataaatctagaaaagataaaactccagtacttag

SEQ ID NO: 114329 - DNA, 1117 bp, Homo sapiens
agcaggtcttcgattatgcctacatagtgctcagccatgctgtgtcaccgctggccaggtcctatccaaacagagacgccgaaaggtaatgggttgtgtgtctgcgtctgggctcagcgtgcctgtgggatggtacttatccctttcctgtgtcatttacctccatgaaatttatgaagggatgttctgccgtatttcagtagaatctagatatgttggtgaaggaaggccttctaggaatatgggatggctgtgtgggattcatccatggttgagagttgaaaatttctttcttggagatttgacattttcttcagggtcttttgttttggggaggtgatttctggcttttaaaattcagtccctaccatcttctcttatgtacactcgtcccttgttctacattttggggcatttttacagtcccaaaatgtagtcagaagtatttacttctcacccagatcattctgtggtagtggaaagggtggtatttgaaggggtgggagatgagataggaatgggaaggaagagtaacgtggtcgtcaagagtggaattcgaaacagtttgatagatctgttctgtggtggatgatggaataaacaggtttcgaggcctggctcagcagccgctgcaggtgctggtggtgctggagctctgtgtgttcctgagccgctgtctgctcggtgttttcaggcggagctctgggccccatgtagggcactcgtctcggtaccgtctccattctcgtccgtgcagtgggaagtgaaatgtcagcactgtatgatcatcgtgggtgggaaggccccgctcccctacttggagctgcatttcacagtggtcttctgtaggtagatgtactgcgatcccagggtatgcttgagctgaatcattaaaagtcagagatatttgtcaacgtattttagctcctttcctactgtccttcacctagcgagatgatctgttaggggtataaggtagctgttcgagaggggttctcagctccctgacacctgttgtactctgttgatctccaacaatgtccctttgcagtactttaggaagaatcatcaaagtaactcaggaggtgattgactaccggaggtggatcaaagagaa

SEQ ID NO: 114330 - DNA, 1015 bp, Homo sapiens
taggaaatcctctcttttttgtggtgttgaggtcccccatgtatagtttcagcagcgaggacactgtggttcttgagtgctgccgtggcttttcacgggggccaggttgactgccttcctgcaagtttcctcactgccccagcatgagactgctgtcgagggtcatcttgagagagcgactcagtcacgacccacttagctgggcgccaagccgtgccagacacttgtccctacttcctctcagaatctcaatgaaagttttaatgtgaacttattagacttttttcatgtttgaaattaggcataatttctaaggctttttctgttggaatatactgtttttaaaatttagataaaattagaaatctaaaggataattttataaatactaaattttgtatctacttgcgattatacatcacttgaatatgtgtgggtataaaacccaacatgttaattgacttaaaaccattttctgaaatgtggggtataatttgagcataaagctatgtaggtacatgcaaaagtgttttgactcatttcttggagttttgcactctgctctggggaagacattctcacaggatccaccgtgattctggcggagcttctgggatgctggctctgtaatgacccacagagctgatgagcagagccatggcccagccggacaccgtaacgtgtctaattgcagcataagtgtaaaattcaggggcaattatttacactcttaaaatgaattataccacagataaacttggtcgcctttttatggtcatcacagtggccctgacgtcctggccatgtgtcacaaaggtgtttgttttaaccacccacaagccttggggcccttgagagcccagtgcggctgctgagctacagagccacactctgcggctgcttgtgtggttcgagtgtgaagtccagggacgctgagggtttataggtttttatctaagaagactcttggccacagtcaatctccagaggttgttggggtaaatgcacgggatgc

SEQ ID NO: 114331 - DNA, 1029 bp, Homo sapiens
agtaacgggtgatgctgacatagaagcagcctgggacctggacagcaggcaaggaaggaactgccagccgtcccacggcctctcaggccaccagttgggccagccttgggctgtgacccctgagttcagcgtgtgagtagggggttcaccacgggggtgacggttgttcttctgatgactctaatgtcttgatcgtttgatcttcaatgagtttcaaactttatgacttggattactgggcatactttatatgccagttgctgttttagaatacgaagtatttccaattcaaagcacaatattgttaggtaatagtaaaacagactgctctatggagcccacatgcaactgtgccatttatcagctgccctttggtggtgctgagcttagaagccggatggttttcctctgattgctttggtacccatggccgtctctcattttgttcctagaccaggtttactatacctccaccgaccctaggggttgctcctgttccttgcagacaagctggtgtagaaggaactgcgtctttgaaagccgtccaccacatgtcttccccggccattccctcagcgtcccccaacccgctctcgagccctcatctgtatcataaggtatagctctgtcctggtgcattcacctacctgttcaagctgccatgtgagaggcggtgctaaatgttttctcctccagagagaattccagagagatcatttgaaaacggaatttgctttgttgtcattcagcctgtttgcttgtctttccaaacaaaacttaaaaaagttaaattattttaagatgtaatatatagtttaattggttgccacaaacatctcttaattcctctgttgaactgattagcataaaactgaagtttgaaataaggctcaaaatgaagacttttcccatttacataattcatttatatgctaaataccttggttttcaagaagcaaatgataaaaccaagagcagatcttgccatgatgtcccgtgtatgctgctgtcattcccacgttgcctgat

SEQ ID NO: 114332 - DNA, 1253 bp, Homo sapiens
gtgtgcggccccctgtgggcaacaggggacaccaccagtataaccgcaccggctggaggaggaaaaaacacacacacacacgggacagtctgcccgtgagcctcagcagataatggctcctggctgcgtcagcctcccccacccctctgcagactgccccgcggcctcggccaccggcaggggaaccgagaccagcaccccgcacgtcagccgggctcgcggcacgcccgccgctgatcactctgcatgtttcttcgtgtggtggtcgcgtccatcttcaagaacagctcgttgtgctcatctgtgaagccttattaaacgtggacgttgttttctgccttcccaggattcttccttcagtgctgaggcaggtcgggctcaggaactgcagggacgtgaacatgcgcttgcggtttgaggtagccgtgtctgttccttcgcggtttgctattttcatttcctgttcgtcaaagcagcagaggagatcaaaccccgttcgtgtgtctttcctccacggataagcttgggaggtcattgttttactgccctcacattttgtttgaaatttcagaactgtttttctatgtaaatattgaaaacttatgatttgtgcaataactcagatattttttatttaatttcctattttcacataagttatatttaagggaggagggaattttttttaaacaagcttaggtcctttcccgagctgcattttctaagttgggtcatcgtgtcggctggttgtctgacgagcatcgttacaaacaccatgatgaggggtttggggttttattttgatgtcttttcttttggtcggaagtgagtgaaggagccaggtcgccctgaaggttttccaaagggcttggctccagagccacctggcagactgcccgtggccctgctgtcgggccccaggccgttgtcctgctctgaccacagagttttaatgttttggttttcacttcttttaaactggacaacaaatccagcatttcaagtgccagaagtataactttctaaggagagaagggttgtcacattataaaatctttaggaaaatgtgaactggaaaacgcttcggtcagttttagtgacatagcctgtgatgatgggtctggtgactattattgcggaccgtggtacccagttttaggaatgtggagaaaggaattctgttgattccgttgaggaatctgtagcgtatgcattcgttctgttaagagcaaatctaggagaagtgcttcagc

SEQ ID NO: 114333 - DNA, 1027 bp, Homo sapiens
tccatcctgcctaaccctgagtttttggagcaccacagttgtcctgggagttggttgcatcttgtaggccatctgacttcctgtttttaaaacgggggtctggtcttgctaaacactacaggtaggttggtctttgaagtccactagtggagaatgtcaagacaagatacttattaccatgacatctgatgcatgtgcagcagtggggagttctagattgatctctgaatgtgatcgacgcccagcaaggacaagctttaaaatgtctgcggtctgcccttttgaagcaggactggctcactctgtcattgggagctgtcagctgcgactgcaggttctctaggaggcattccagaatagagtagcacactgtgtctgcagttctcgatgaccgaaagttatcaaaaatatttaaaatatttaaattgtgaacctattgataaagaatatttataaaaactgatctgtaggcctgtactaatctctacgcattagcaatattgactgtaaacccacattaaggaaaccactacgggtctggcagtgcgtgtcccgtggggtgtgcattttaaaactcgattcatagacacaggtaccatgttccatttccgtcatggtgaagcaaatgaattggcctggctaccactgtggtcgcgtgctacaggtttgacaaaaagatatcatgtttcgatttttttgtgtgtggacaacaatatggaagctaaaattgacatatttttatgtaaagtttttctattctttgatttttaataaactttggaaaccagttttgtgtttgtgtccaagtgtatgctttcaagggcaagagtggcttctacattttccgtattgaatttctaaattagggcagtgctttagccatttattctaaataagattcaagagaaggcagatgattccagtcctataaagcaagttgcagcagggagattatgttgtcactggtccattgaagtaggaggaggtaaaaatacaaaaattagccgggtgtggtggctcacaccta

SEQ ID NO: 114334 - DNA, 1201 bp, Homo sapiens
atgttttttttaaaagagacccccattaaaagagccaggctaaatcaagagacagaaaatattgaatttttaaatgaaaatagaaaagctatttaatatccttaattctagcctagtttctcatatgccctcactatgtgctttagagtattgtctgcatattctggaactgtcaattttaaaggaatacatagatgaagtggtgcattcatttatattctacttgcagaattgtcaaccttgagttggaaggtaaactagaaatagaggagctcttctctagttcaccatctagtacctgctgtcagtcacatagcaggtgccagaaaagacagcacctgagaggaaatctctaagcttgcatacttctgtttagcaccttaagtgtgcaccagagacagctcaggccattcctaaaggccctggtgtttttctttagataacttttgaagatttgctcttatccagtcttcagtttacatgcatttctgtgtttttagataaaatacctttgtgtaaaatattgtttgaggcctaatcagaactaagtctagagaattgaaaccatctctgggggaaattaactgatgtgaacgggaattgaacctgtcatcgtcgccgtatcactgctctactcttaacatctagtgatttaaataaagcaagaaaaatatttaattacatcagatatatgcatttaccctggtggcagtaattactttttgtgaatggacacagctgtgaacctaggggcatttacttcactgtatttagtcttttaacccacatggtgtctggaagatttaaaataaccggaaagattttcttgactgactgactaaatgaatataaaatattggttgataaaagtgacagtggtgtggtatttctgtaactttgtacatttactttatcaatatcgcagactcagggcttatttattaatatctccttctggggttctgtgggcagttataacctactgcttccaggtgagcagggttgtctttgtgggttctctctctgaactgttgggtacactctaggcctagttgaccgataacaaaagggttaacaaggatctgggttctgctaaaacaaacatgtaaactaatgtggccattaactagcatatgcaattgaagcagcatatgaggaaatgttattccatataaaaatagtgtcaccttttacattaatt

SEQ ID NO: 114335 - DNA, 1053 bp, Homo sapiens
aacaacacccaaaagaacagaataacatgaagtccatttcccattttctcagaaacaatttcacagtaattccaagagctgggaaaggtggaacatgcgaacagatttgaaatgggaggtttgtaggtaaacatcacagtaatgaagaaaggagctttcagtacccttggccactgttggaaatataacctaaaaataccactggtttgaggttccagaaaaacactttattgaattctttttatgcatggtgtatataaattagaatgttacaaatttggtggttgtattgctgcagtgtaattgttgaatgtaacactatgtaaaataaggatactggcctgatatgaagaaagaggttgcccgcaaactatagtcaatatcaccctgccttctaagccaccaaaggaaggaagagtgcattttgtttcgcacagatccatgttaagaagtttttgtttcattttatttctttgaacattggcaatccacttatagcacgtagaacttatctgttaatcaaaatattcacttaagataaatccatattctccttccctgctgcataagagagttcattgttctcgggaaattcattttaccagcatttgccttgaagtagaaggcattctcaggccatgatgtatcacctaattaaggaaatttaattaataactgaaaattatggatggtattccttaacacattttcaacctgaagtgtaatcactaatatattttgtaacttttgttttgaaacaataacagacttaccaataagttgcaaatagagtacagagaattattttttttgctaagccatttagaggtaagttgccaatctgatgccccaccaccccaaaagctttagtgtgtattactacagtaccattctcctacattaactacaagacacctgcaaacactgggaagtccacattgctctatgactgctatctgatgcccggaccctgttcaagttcctccagctttccctacaatgtctttcatcacaaaaggacctagctcagaagcatggcatgacacatggcaa

SEQ ID NO: 114336 - DNA, 1034 bp, Homo sapiens
tcagcatttgaaggatgtgtgggtgctcactgcctggaatgtgatagtgaggattgggggagcccacccagtgcagtgacatcttggcagggatgaatgactgatgtcatttattataaacttgaacctgaggtcactcaggcagtgtacccaaaattttcatctctgttatgcctttgtgatacaaaatcatatgaaagagtgaataagattggatgactgcttgaaagttatatgaaactgtgtaattcagcttgcagaaattaagttccctgcttcatgtttatacctcacgtgattactcatttcaagcatactgtctctttccgagagtaatgatgaaaacattgaagaaaccatcgatccaattacccatactgatcccagaagtataaagaaaatgttaatattcttgtatgtcttcttttcatatttggtatagcttgatataaagtaggaagtctgtatgattttactgtgctctcagaatagggatttttgttttgttttaatgcaagctgggtttggaaggagatttgaaacttgtgtttggctggtatatgatgtagacaggcactagagaatctgatatttgttgatattcaaattctaagtcctgtatgcgtgttgttttgttgcattgttgtctgtttgtctgtctgttttttaatagaccaggcatttggaaagacctgaagaccatgggctctgtgtctctctctatattcttcatcacactgcttgttctgggtagacaggtaagaagtctgtttatatatatgtatgtataccttctctaaagtgctgtattaatagtgctttgctgtgcattgtagttaatcttcttggaaacaaacgtctaagaattagaatcatcttatcactgaagataaaactagttagtacagggtgtggatgcttcgatatagacaaaaggaaaaatatctttcgtattttccacaaaaggcaaatgttatgaatggccaaaattttaatcagttaatttcctgttaaatctcaaaacaaattttgta

SEQ ID NO: 114337 - DNA, 1064 bp, Homo sapiens
cgtaaaggacagcagttcataggcttcagatggtcacttctcttctctttacgaagggaactgcagtttaccagaggggaaggacagttcggaagccttccgtgctcgcagaccaggtgtctgggtgtggcatgctttctttacttaccatggaggcactgcaagttggaatgatggaagttatgagttgcacagatgtctaatgtcttaactcaagggttttcttcacagtctggattgaaggatctctgccacctatcataaggggaaagagaaagcatgcatggttcttgtcataccccagataacttcagaacccattctgtggtttagcgttattgagctttcttaatttaaggctgacttgattgatcataaagccaattgaattaaaattctcaccattgtttggttgtggtcattactttgcagccttcagtccaattgatcaatgcaaggtggaaggaatcaaagcaaagcaaaggaatgaatacaggaagatagtgtttgtgagggtatcacacgaggaatttttcctttcttctctcaccagatgttgaaattaaattagatgaagaaggatttgtattgccatccacagctaatgaagatatccataaaaggtacaggaaaatgttgtgtttttcacattacaagactcgttgaggctaataagcagcggtatctttttctcaagaaggtgaaaaaaatagatatgattctggaaattaaaatactacatttcagaataccatgttgggaaattccttgtaatattttataaacattaatattaataagatcaaattcatgattcatttgaaaataatattggcacatagtaatagccaaatcccaaataaactttggcaactaaaatatataataaatattttggattatttaaaaaattaagtatttttctccttttttatttttcaggatagcactgtgtattgatggtccaaaaaggttttgctccaatagcaaacacttactggggaaagaagctattaaacaaagacacctacagttactcggttatcaagttgttcaggtacggt

SEQ ID NO: 114338 - DNA, 1092 bp, Homo sapiens
acaattctcagttctaaaaatgtttcttgaactgttagcattattatgtttcttctcactctctcctcactcctttttaccttccttctttacttttctttctgtttatggtaaccagtgactactgtaaaaacacatataaaagacattttgaactattagacttgcactgtaagaagagaagtttgcattatcattttgagagagatgcctgtcccaattcctggaaaagtatcatgcctataaagtaatgttatatcaaacttttctacctaggtaaccttcaatttattctctgttgttatatcttatttttctttctcacatttgcacttatgattttttagggtccaaaactccttcctaaatatcaagtgaagtcatttcttaccccatgctgttccctggagacccctgtggattctcagctttatagatatgtgaagattgggctgactaaccttttaggagcaagattatattttgctccaaaagtgttgacaccctattgttatacaataggtaagtagtataaggagttttgttgttttaaacctaagcatcctgttcgattttggagatatatgggacttagaagcaatagaagttctctggaaatgcaaaatggaatggtcccttccctgaaggcaagttggggttagcagcagagccgttgagtcaagactgtctgggtttaagtctcaaatattagccacgtagtagcagaatatcctgggcagaatatttaacctttttctgcttgcttcttcctctgtaaaatgatagtaatattgacctcaaagacttacttaaggtctaaataaaatagtacctggaacgtaggaaatgctcactaattgttagctactactataacctaggcttgtactgtccaaatatagtagccactagaccatgtggctatttaaatttaaattattaaaagtttaagaaaattcaattcctcagtcacattgtaagtgctcagtagccacatgtggctcatggctgccaaattggacagcaccattataaagatttccacatcacagaaatttctcctggacagcactgacaagagactccaagtcc

SEQ ID NO: 114339 - DNA, 1058 bp, Homo sapiens
cttatgaaaagacgtttccacccagttagctgctgttcctccttggcagctcatcacagtgcctaggtgcctcatcttggctcttagcagtgctgatttgccttgcagatttgagctcatgttaatgtttggcccatgactcagtggcaaagagttgactatatcctatttcctctgatttttctaaaaatgaaagactgggactagatggaaacctgggatgggtactgtctgtgcctgtccctgcctttcgtacacaacatgaagagaaagacgtgttaatcccccccaacctcttgatgagcatcaacaaaacagacgcatggtttccttgaatgacatcctgcattaggcaaattgattaagctgagagcgcctagtcactggactggtcgtctcaaaaaaactggcaaggaagaagattgaaatacaagacaggaaactaagctgattgctttgctgctgagttaaatcaaaaatgcatgtagtgttaggtccctgacttgatatccttgttttgtagtatgacctaaaaaccgaaacagctcctcttgttgttgtggtttctaccacgggcaccggagacccacccgacacagcccgcaagtttgttaaggaaatacagaaccaaacactgccggttgatttctttgctcacctgcggtatgggttactgggtaatggactctctcttctgatcttactatagtatactattgatatctctggtatctgaattatctttcagaactatgaagtgtgatcatataggttttgtctttcttatgtaaatattatgtatatgtatatataaatgtatgtaatgtgctaccttttctgaatcttccccagactttaccccagagccacacctctgcagaacctcttgagtagcattttaattaaggatgcacctcagatgcagccatgaaacattttcagaatagcagtggctgggcctcatcctaaacctactgaaacagtccttgaagaagcaacccctcatgccattcctccatttagaaaagcagaacaaaacaaaacactcccaatgattt

SEQ ID NO: 114340 - DNA, 1068 bp, Homo sapiens
aaaggctcctcagggcagctctaatgtgtaaccacattttgagtagtgtaccacatgagcacctcccgagcacagtgaaatgacaacctgagtcataatgacacacgggcctgaaatctgcctcctcttggtattcatttcgctttaggaattagaatttaattgatcctcctttgagctgtgattaaaagtggtgttatttccacagccctgccacagtcttatccactgactctacttaaacttctctgttcagggaatggctgttgttatgataatttgttagtagtaggtggactgccacatttaaaaaatctatttatgatgaattcaactttcccaaaggagggttgctttttttttctcctgttgtcagcctccctgggaattttactaaaataaaaaaataaataaaggctttaactatttatttagtccaaggacttggcattaatccatagtgatttcttggtgatattttaatctgtaggaaacagatcagtagatcagtaaattggctaggcaaaaaaaaaaaaaaaaaaaggtgcatttgatggatggaatgagcatttgcagcattatggtagccttggattttggttaagttctgttagcattagtatgcctatttaaaattatatcttcttaaaataaagtttaccaattctggaatattaggaggaattctattcctgtcatcctattactagaatatcttcctatccctcttcatttcttctacctttatacatactcatgttttcagctacggtgctaatgaacacataatatatcctgcttgttaaaacttaatcatgaagtattttttgtattccgaatggtcttcatagtgtttctaacaagtgcatactttgccaaatggacagactgtcattatcctgttctgtgttcagatggagaacttaggcatttgttttgtttttcgtttgtttttactgtccagtttagaacttgtggttgagccgtggattgctggactctggccagccctcagaaagcattttaggtcaagcagaggacaagaggagataagtggcgcactcccgg

SEQ ID NO: 114341 - DNA, 1042 bp, Homo sapiens
taactatcatctatgaatctttttatgttgtatttgcatttaaatttttgttttctattgaaatgagggcttaaatagggctttttcttagtctaaatagggctttttctttgtcttacttttactagttattaactacgtagcacattccacagtgatggaggtgactgcagttgaccttgtgttacccagctacacattgctgctccttctttaattggtgacagaaagctaatgagagcgtaggattccccccaaccaccacttgccacttcctacagttgttaagatctactttgtgtaatactacataactatttattgctgtaacagaaagcttcaggaaaaatggaagggttttggtaggtaataatcaattattatgtgaacttggaggtagaataatccactagatgtcagtattgtaccaggaactgtttttttaaaactacttgtaactgatttcttctaaccagctcccggaagtggccattaatggatacaatttttcaaatgtgccttgccacacttgtattgtcagtgagcataaagagtgttgtaattaggccgccatctccccagtgtggttttcgtgtcgttttattaatgtgtttattgcatttctagtcttgggtgagtaaagtactttagagagaggctcagctctctaaataaatatatgtatatttatatatatatagatttatatatatatatattccatcttcctttcctggtaatcagctcgagatgtaatttgagtatttagaattaatttactgtaatgaaagcttaccgattaagtcacaattttggttcagctctacccttttaaaatttgtgtaaagtgtgtgtgtatgtctgtatatgtgtatatatatgtgtgtgtatatatgtgtgtgtatgtatatatttgtgtgtgtgtgtgtgcatatatatatatatatatatatatatatatatatatatgggttttttcaaaaatagtatgctcattggaaaaattctggatacagaaataacccaggaaaccaaagtattt

SEQ ID NO: 114342 - DNA, 1039 bp, Homo sapiens
tgcactccagcctgggcgacagtgataccctgtctcaaaaaaataaaaaaaaagaatatttgatgagcactggcttataggattctccctgtggccttcattccattgcacagcctctaccgttttcccgtctggctctctgttttgcctttcagtaataatacaagaaggtgcaccattcttttggttgaaaggggaattaagaatgaactcaagttctttcgcattatttaccgtgtaatgtgaaaagaaatctacttttgtagggatgtcttttaaagatgtttttactttgaatttttagttttctcctttctgggtgtatacttcagtcactttcaagttttatgatcttaccagtagataatgtatggatatttgttagaatttatccccatttcttcacatctttataataaatattgagtgaatgaatcctttacatgaagatccttagggcatattagattttataaatatcatctagtcctagtgcaagcaaataaaattggaaactttcttgaataacaaaatgtagggtgtgagagtgtgaaggttgggggcagtttttaattacgtaataatggctttcctctgtgaggatttggaaggtagattagagcctataaggaaatatttctaaactgaataaaaggattggtttgacccatatgtgtagtagtactgatatcgagttcaaaacttgtctgtgtatctttgcagctcaagtttatttcacccaggaaagctccattttgtcttcaacattgtggaatttctgtctactgccacaacagaggttctgcggaagggagtatgtacaggctggctggccttgttggttgcttcagttcttcagccaaacatacatgcatcccatgaagacagcgggaaagccctggctcctaaggtaagaaattagtaccttaacctcagcattgttaactcatactctttgtttcattagaaaaaacagtgttgtctcacccacatcattcattactgtcataagaaaatttatgctgttcttgaattttaa

SEQ ID NO: 114343 - DNA, 1054 bp, Homo sapiens
tagaagcacttcaaaaggacctggcacatagtaagtcctcaataaaggtgtctgttactaactgtatgtgtataaagacctagaagtgtgcgagagatctggttcccttcaggagcacgagtctactgtgtgctttgagagtggagggcagggaatgaggggtgagccagcaggtgggtcggagccaggcaggacctcagatgcttctctgacacctaggaaatccttggcctactgtcgggacctggagcctgtggaggattgggagctgtagaaccgtgtggtcagctctgtctcctagaacagtcactgtaggcaaaggcctggcctgggcatgagtgaggctgggagatctgtgtgagatgttctgagaagacggagggaagaactatggtggtacagtcaaaaggaattagacttgtgaattaaggaggatttactaaaaatgcctgtttgtaagcagtcatcttattattttcttttctagagatgcaaagaatatggccaaggatgtacatgatgcccttgtgcaaataataagcaaagaggttggagttgaaaaactagaagcaatgaaaaccctggccactttaaaagaagaaaaacgctaccttcaggatatttggtcataaaaccagaaattaaagaaagaggattaagcttttttgactgaaagtactaaaagtcagctttactagtgccaaacctttaaattttcaaaagaaaattttctttcaacatttcttgaaggacatggagtggagattggatcatttaacaatataacaaaacttcctgatttgattttacgtatcttctatctacgcccttcctgtgcctgtgactctccccaaattgccctgttgccttgagctcttctgagctaaggcagccttcagtccctatcagcgcctcctttacttcccagagaacttcacagagactctgtccttccatgcaaaggcttcctgaaatagggagactgactgagtagctcattcttgtgacttacagtgccaacatttaaaaaagtatgaaaatgatttatttttat

SEQ ID NO: 114344 - DNA, 1048 bp, Homo sapiens
cacatttcatgattttcttcatgtaagagcaggacacagtccctgctgctctcttcactgggaagggctgcaaagctggagatgtggtcacagcacagttggcgtgctcaacagaggcccctactctcttctacaagccattacacacaacacgaagtacaattaacctaaaattagcccctcgtgtatgtgggctttgaggattggtagaattactgatatattgagtgaattattctaagagactttatagcttcacagagggggaattaaaacacatgtcgttatgtagggaaacatggagagttcagacaaacatggcaacacttcttattacattttgtctcaataaaaaatgattttcatggcctcagatagcatcttatataagaagtggaagggcgttacagggctgattcaaaataagacttcatgtttttatgttgttttatttatttccttatatgataggaatgagaaaggactgaatcatattttgagagaattgttatggaatttggtaataaaggggatttttgtcactgaattgctcaaagctgttttgagattatttttgctatagtattattaaagccacctgtgatccagctaaaaacaaagacctgtgaagctccacttggcttcaggtcgtggtacttcctggaaggcagtcaccatcctggacaactgctttggtctggggtgctatagtgatatagataagtgattgactgaacttgccacagaatgtaaaaacaagatgatttcaagaaattgtcaccaatgcccacattttcttcaccacattagcgatagcagcataatatttttactctatcagctttaaaaatcaaccaatgtgtagcaactactccacctgttggtattggagattataatgccagaatatcaatcttgatacacagcccgtaatgtcatcaatttattttctaatcttcagcagtactgacatttgaataatttcagataaatccagagtaaaatttcctagcttctctcctaagctgaccctctggaatcccaccaa

SEQ ID NO: 114345 - DNA, 1050 bp, Homo sapiens
ggagttccaggcttaaagtatcagtgccagtcctggagtgctactggcagttgcaaatggaaacaaagatccttaatggaaaaggaatacctccaattagacctaacaattcagacatctaccacaagacgtttctaaactttcacaaaggcagcaaaatccctggatatcagactgagtagaataagaaattagaatttaatttctttagactgttaacttgaaggagcaaggcacatgaatcttaacttaaataaattaactttcaaggtgatttaatctttgaactttaacgtctttgtaaaattttaagaatgggaggggtttaagatttaaatttgaagtcagaattttatcattgaaatgtttttatatattttattgttgagtttcttaatgttgtaattggaactctttacagaatcactggtggactattttgacaatatggtatttggaatgggaagtagaataatatttttttttaactttggatcagtataagtccgaagttattttaattattgtatttttcagacccatttcaggagcttgtgtgggacaaatccatgctgcccactactgtttccagggaaaacctaagtgaaatattccaggaaacagggtagtcaccaggggattgaggttaggaagttgagagtaggattgtcatgatggactgttcttcccttcacagcaggtagaggcccacatcccaggtcaccacaagcttttactttaaccccagtgagttgagagaatgggaggctggagaacattggtgggggtaggtaatatactgaaagggagagtgaatatttattatcctgccttggtgtttcctttcatgtgaagatggctctttggagctatcctatggtgtctctcctcccgctcatacattcctctgtatgggaaagtaggagaaactattctgatatgtaagactgatctctcaggatctgctgtctgcagggaccacttgctgtcctccactgcccccgctccacctcctttccaccgtggggatgcctaagctccagccatggc

SEQ ID NO: 114346 - DNA, 1049 bp, Homo sapiens
atccaatcacctcccatcgggccctaccttcaacactggggattgcaactgaacatgagatttgggtggggacacagatcaaaatcatatcagacgtttccctgattactaattttaatctattttcttaagttttgttacataatgagcaagggacttattcaccaaatcactttgtaagccatttgagcccaacagcagtggagggaagaggtgtcatagagttacattgggagaagttgaaatgattgaattacataattacaatatttgcagtgatgacatttgacttttttgatttggaagtaatttttttgcttcagttttgcatctttttttaaaatattgtctaggggattacatttgttatttgggttgttcctcttggttagaaactctcaccttctgggtaggtgttgtattgaaggactatgtgtcctgctgtatctcttgtggcttattaaatccaggtgctattaagcatagttattgaatttcttaattttcctgcccctctgctgaagtgctcctgtagtttaccatgcttacacagtcaggttaatgaggtacttgccctttgagatagctgttatcacaaggagcaattatctcactgtggtagggtttaatctcccaggtcatctttcacaccgaggtaggaaaggcaatgttgctactgaagagctccttaagggggcctctctagattccagtagaaaattaaagcattgtgtgaggcttttagtgaacgtacttcctgtgttacctcaaacctgatccgtcaccatctattctgagtaagtatcccaagactctccttagatgtttgcaaggaggctctggagtcagggcaggccatgaacctgcaacttgagcaactgcacagggccccatggcagaaggactccaggcttcatttaatgctctgctgtttttatgctgagtcttaacaatttttaaagaagggattctgcattttcattttccactagggcctacaaattctctggttggttctgtctagttgaggcctgggtaaccttctaaag

SEQ ID NO: 114347 - DNA, 1085 bp, Homo sapiens
gtgatttcatatattggaactgaccttgggcattgaatctgaggtggattctcagttggcaaagccacccttacatgattctttgctttccatttcatcttacccttcatcattacagccctagcagctgttcaccttttactcctacatgaaacaggatctaataaccctttaggggtttcatcagacccaggcaaaattaccttccacccctaccacacaatcaaagatattttaggtttaatttttctcctcctccttcgaataactctagtactattttcgcctgacctcctgggtgacccagataactacgctttagccaaccccctcagtacccaaccccacattaaaccagagtggtactttttgtttgcacaggcaatcttaccatccatccctcacaaactaggaggcatactggcccttgtattctccattctcattctaacagttattcccatgcttcacacgtctaaacaacaaagcataatattccgactgttgagtaaatggctattctgaatcttagtggccaacctatttacactcacatgaattggagggcagccagtcaaacacccttttattgtcgtcggacagatggcatctattatgtacttctctaccattctcacccctatactactcaccggcctaattgaaaataagctacttaaatgaaggtgcccttgtagtataatttaatactctggtcttataaaccagaagtggagactcccctccccaggaaatctcagggaaaatgcgtcccgcttcactgtcaacactcaaagctgaaattctaattaagctattcactgaattctttcttgcacatactttgactaccacgtcactactaatcaattagcactattacattagtgcttgtatgtacttcctgcattactgctagtccccataaataatatatagtactataattgcttgattgtacatagtacattcatacataacaatacattataaatctagctcacatacatataagcacgtattaggaatttcttaatcaactgtcataaatctagtattaccgactgtacacctaaatataatcc

SEQ ID NO: 114348 - DNA, 1019 bp, Homo sapiens
cctgattatttttaagtttatatcaaaactgcttcacaagttcacaaaagttgtcactcttaatttgggttaagaaaagtaatagtattatctctgctgaagttgattgtttttctcttttaccatgactgttggccaaaagcaagctgaacctctgcactttgaaacaaagcacagtatgaatctttaacccaagcacttagtttcaccactgagattctacatcatctgcaagaaaatgcacaaacttttggtccaatgttggattcttcaaaagtgcatagcaaaacttttgtgctatgccgcttgatgtaacttttaaagatgttatcaaatgttaaatgcctcattctgcgttaatttgctgttggctgttttgtgaacacaaaataaacttgagatttttttttttttttttttttgtgaaactcctccaaagccaatttcagcccttggtaagcttgcagacagttactgatcttaaatttaattttaaaagacaatgtatcttaattataatttagctttttaaaacaatgagatagctttacatttcccctttgtttgaatgagaaaatggatcttgggttgctatgctagaacacttgtagattgctgggtcctttgtaagggggccatggacacaccacactttctttcaatccttacatttgaagcattgatattcttcaaaaccttcttgttacatgtgcgcaatagaaatttctaatgttcatgacttttatctttcctgtccatcaattcactggttgtaaatgcttcctgagagctgtctaggtctgtatcccagattgttgcttaatgacatctgacagatgcattgttttctgaaatcagcttaagacaccaattgtggcaactggaaactcattacctgctgcattggatcaactatggaagttggagcaggggtgggcggaggtcacctaaccaatcaatggaaggcaactcacacctgctccaagcctcagctttgagaaacaaacacgtttataaga

SEQ ID NO: 114349 - DNA, 1044 bp, Homo sapiens
ccatagaaagaatgaagtttgcagtgtgggaaacctaagaattattggtggtatcctataaatctgtttatgaagatgtaggattttactaatttataggtaatgctgcatttgttaagacctaaagaccagcacttttcaaacagaggcccataaactgcacatgatttttgtttgtttgtttttttgagatggagtctcactctgctgcccaggctggagtgcagtggcacaatgtcggctcactgcaacctccgcctcccagattcaagcaattctcatgcctcagcctcccgagtagctgggactacaggcacctgccaccatgccccgctaatttttgtatttttagtagagacagggtttcaccatgttggccaggctggtctcgaactcctgacctcaggtgatccgcccaccttggcttcccaaagtgctgggattacagatgtgagccaccacgcatggccgagctgcatgtgttttgagcccatttcagcaaggaactccaggattcttatctggccaggctggctcggagtgagggagggaagggcagtggcatatgacattctcaatccagaggtgagagcatccccacactagaggcacagagggtccaagacaagggtttatggctttcctgtcatgtggttttcattccaagtgaaagagatcacacacgcgttgtgcctggcttttcacatgactgggtttatggcattcattggggctttttcatttaagaggcagcattcaaaagatgccataataaaagatgctataaacacaagaaaatgaagtcatctatctttctagtatttgttgatgtagagatcatgcaggccgggaggaatgcctagagagtattaaatcaaagaaacagcgatgatcgccttacatattttctgttaaaagcctatgatgtcacaaaaatcctgagtgttatccgctgtaaaaaaaataaaaaataaatgcattgtgagtaaagaaagctagttagagtatttaaaacagtacaaaataaagattgtattaggttcc

SEQ ID NO: 114350 - DNA, 1025 bp, Homo sapiens
tttcctgattattatagcagtttatgaaaaagaaagaattgattatttcaagttcaagtatgcatcggttagaaaagactcaagaatctctgcttctgccaacactttaaagctgaaatttcatgaaaggattttcccagcttcacttgtgaaatttctacatccttgtcttagactaagtcaccaagcctttatttgaatctcaataaagaggcagtgaaggacccttgccaagagctattagttctctccatgaatccctactcgtaaattgctcaatgtcaaaagcttgggaaacccagagccttggattagttcggggagctgattgacagacacagagggaggacctggatcttgtgctgtcacttaactctgtgaacttgagatgcattcactgccctctgggcttctgtcttgctctgcaaagtgcagggccagaccctgaaattgatgattctgtgaccctggcattccttctctggaccctggggcacatgtgtccagctgattgagggaccacttctagcaaatgtccctccctggtggctcatagctccagtgagctcagaatgagacacttaaaacacagatgtttactccccacttccaagtaggctaaacccacaggagcatctggggtcctctggtccttggtgctgctctccaggtctgcatgtcagccctgcatgcctgtggcttcacagagcgggtggaaggagcagggtggtgggtcagaggggctctgcctctgagtcactgtgagatttgacctgctgttctacttctccacatggttgttttcaaatgaaatatgaagcatgaacacttgaatgacagagctgtttagaggattacatatagtacctaatatttctatatatcctagcccagtgccaagtctaacatagacatttataaaatagaaatgattgtcactgtcatatgtgtgtttccttttaaccctattttgacaatagtaactgtaacaattgttgttggatgaagacttgcaaatcccaact

SEQ ID NO: 114351 - DNA, 1021 bp, Homo sapiens
aaaaaaaaaaaaattgaagagaaataatatgactcatgataaggataaaggaggctttggatatttggctgacatttggaaaaatatgtagaagtatagaagtatattcaaacactgaaaaatagaactaatatttgtaaaattgtataatcaattctttttgaataacgagtggtcttttaaattgtttggcattcttctgagagcctacaaataaatttaaaagtagaatagcttaagcagtatataacttgggccttcatgctaatcccatgctctaacttttctttaacttatcctaatataactatgggcttatttgattcaagaatgagaaaggaattccaagtaaagctatgctgactttgtatctgtaatctgctttatctttcaatgtttatgttcacaagataaatgccctacctagatattttctgtatactcttatttttgggtgtctgtttgaagggttttgtttgtttttcctttaattggctgcacaggaagatccatcctgcattgtgagtttagcattttcttcattgtctgccatgcatcccattgtctgtgcacacacagcatggccagcaccacatctgccttctgtatggtgcaactgctcaaaatacaaaaagctcctccacgcagagcatgcccatgtgttcaacatctggtgcagggatggagatggaaacgtcagtggtttcaagtggcactaattagtttccttgtcattttggtttcctcattacagatactgcaatgaacatttgctatgtcccccacacatgttctggacaggctggggtccttgggaacggtgcacagcccaatgcgggggtggcattcaagctcgccgcaggatctgtgagaatgggcctgactgtgcaggctgcaatgtggtgagtagccttcttctcacacccagcccacaatccagaaccaggaatacagactcaatacacacaaaattctctgcacacactagatgttctgcaaacaataaatgttctgcacacac

SEQ ID NO: 114352 - DNA, 1027 bp, Homo sapiens
aggcaaaccagggaaattcatctcatttgattttaaaactgatatagaagcgggagggataaagagagattgattaatgggtacagatacagacatagatagaagtgagacctggtgttcaatagatcagtatggcaactgtagttaacattaattgattgaatatttgaaaaaaatctagaataattcagatatttctagaataaagaaaacataatattttaggtgatggatttctcaattactgtgatttgattatatgaatgtatctaattatcacatctaccttgaaaatatatatatctaatatgtttcaattaaaacaattaaaaaggtaaatctaaaaaagaatctgatattgagcacacatgctagagtcctttcagtctgggtgcacttgctataccatatccaggagttaaacgagttatcaactgatagagcatgggtaagacattcataactaatgaatgtgaagctagagtccttcctaccttacttgcagaatcagtttgatatccttccaggcttgggaatccaggtttggtggtaggtgtattttcttttactttgattttacatgaacacatgcaaatgggaggaaaccagccaatggctgtttgaaaagtcagtttattttatttgtccatattgtctacagatccatgtgagctagacttctcttgctggtgtagttcatctgcgtcttgcctctttggtggcatttcccactgctgccactatgctgagtcagcagtcttccccagatacattctgggtccattttcatgctactgccctgtatctctcctggtgtccatccacccagggccaggcatgttatctgaatcatgactgtgctaatattttgtaagttggtttttgaagattttctcagagccagagtcaagtggaaatggtagaatatttatgactggagttctgttagtgacggagtctcatatgctattgagttctctacaaagacaaaattaaggtcatgctgagcaatcaggtattctgggag

SEQ ID NO: 114353 - DNA, 1051 bp, Homo sapiens
caagatatgagttcaaatctaacatgaaaaggatgctaaggataggggctgcagggaggatggagaagcagacatgtttgcatacttcaatgatggattgtggcttacttgatttccaagttactttccagctagggtggccacagccagctgtgggtgtccaggctgccggctctggtaacctggcccgtcttccctttcagtgtggcaccgtggaccagggcctgtacgtgaacctgaccgagagaaatctgcaggatgctcagaagttcattctgatgcatgaggtggtacagccagtgaccacagtgccctccttcatggaggacaatagccgcttttcccacgtggcagtcgacgtggtgcagggcagagaagcgctcgtccacatcatctatttggccacaggtaggagctctggccccctctgaggggttttctaccatcttctgattttgtgttttagatttagattctaaacattcaatttcaatttcaagctttacgcctgatgtctctttttgcaaccagcaaaacccgcgatgctcacttatcttcctcagcctctgtccctctttttggaaatctcaatctattttcactatattggtcataactttaattggaaagacaatggcttgtttctttgctattattcctcaactattcataaaataagtcttttcttggcaagaccatttgaatttggataatttaagacaaaggtatgctttgttggaagatgttgttgggtgaaatattatcttgggattgtcatggttatttctcatttgttcaaaaacagtgccttcagcaaaatatttgcgtggatggtggtacatggcagtgttcaaagaatatgttttggggcataaataatggaacatttacagcaaatgtaggcagtgatactttcaaattacaaatgacaattaggtctcttcagtttccaaagcaactagagtgtagaaagcatgttccatctcagttcattacacagacggctctgggtgtgtgaggccagctgtagggacctggctgagctctgtgg

SEQ ID NO: 114354 - DNA, 1024 bp, Homo sapiens
tggtcttatttcaaagacagggagacaagatttggagatcacccattgctgtatgtgacctgagcttttgttccctgtttcattttcatgtctctctttttcctttaattaaatgattaattaaaatgtaatgtgttttcaattcacttataccactattggcagagggactaccctgtgataagtcatggagaataactgtatggactgcaattgggatcttacaaagaaaggaaccaattgctcattatttcttttctctatgttagtttacagctaatgtggccaccaacagtattactattttttatttaattatgtattcacttttgcaaaaagtacctacccaatatcccctccacctctagcctaaacattattactaatttggtttaacagtttctctagttcaagtactggacatagggctaaattagacatatggcagatcaataattgatgtaaataagcctccattttggaggaggagaaagaaaagtaaaagagaaattagatgatcaaataacacaagtgcaacaggcatgaaaggaaaattacacaaacacaaactgtgacaaaatatgcagaatttaataacatgtattagatttattcctactgttaaaaagcagcaattactgattgtccatacagtgagtataaaagctggaatgttgaccattccatgttcaaaagttcaagtttgtgtcccttggtgataacttcctcttggaaattaaaacaaagggaagtttatttttcatatggccctgggtgaggagatggcttcttaaacccttaagaagtaaaagacactcaaggaagacattttctcagaaggaggcagttacctggatggctttgagtatttcatttcaagtattcaagaaattagaaattataaaccgtgttgacaaaaagatatcagatgccacctccttgcactacattcttccaggagagagagagagagagacctgagagctctctagcagctcacgttccagttgacaagataagattt

SEQ ID NO: 114355 - DNA, 1049 bp, Homo sapiens
tgcctcttagatacaatcacatgtgtttttagaagagagatgcagaagaagattacacacacacagaggagcaagccatgtgaagatggatttgagagagatttgaagagatgggctttgaaaattagagtgatgcaactacagctaaggaaagctggcagccactcagagctgcaaggggcgatggattctcccctaggccctcctaggggagcatagctctgctaccaccttgagtttggcccattgatactgatttctgacttctctccagaactgtgagagaataaagtcatattgatttaagccaccaaattgctggccatttgttacagcagccacaggaagctaatatgcatggctcctctttctcatatattgcaggtgggcaggtctcccaggaagcccaacaagagaataatatcctctgggtcctgagtgctgtaaatgacccaagtgcccttaatcagtggcctttaatgacattgcactgtgcctgagagctgcaagaccaatttcttctttgcaatcatgagctcaaagagtgacgtcaagtgcaggctacttgcagccatcttgtcaccatatggagtctttccaagaagaaggcccaacagaggccattgtaactaggagtaagaaccatggaattcttacagcatactttgactccctgagtttatgcttgaatctgtgcttttgtttttggcgtaacctagttggcattgagtttttatcacttgccagagagcctgaagggcttgcgtaatacgattttactcctgtctgctgctcacattaaaacttctcgaaacagatttcaatgacgttgcacattttgagacacctgatgcttatgaattcgctgcctaaaatttatcaactctgagataagaggctgtctttagaaagttgtctgtgatacaaataccaagtgtgactttcttctgtttaaaatactaaacattacctttggtgaaggaagtcatttagctcatgtaactcatgagaaacacttagcttgttaatatagttgtcaaagtttttct

SEQ ID NO: 114356 - DNA, 1443 bp, Homo sapiens
atttgtttcttttacctcatgtcataataacagattcaaatcttcagtataagttttcttcttgccttaatcatggagattattttataagaacaaagctttttgaaaaatataaaaatggagctggcctcagactaattcacagcatttgcccatctgggatcctaccgcagatggctggaggtagatgctcactgaacagagttcaaaaaacacaaaggggctggagctcatttaacctcactgtcttactaaaattcttttgggaaatagctccaaatccatttttatattgttttgtttctaacggaaataaattcactgcttgtttctcactcacaaatgctgggataagcagaaaaaatgaaatctgtgttccaatttgccacctgcctctctatggtttctaaattgaaaacttaaatctctctgactacatgatcaatatcggtagagaattctctccaaagttaaagtggatattaacttctttcttctttttattttattttattttattatcattatactttaagttttagggtacatgggcacaatgtgcaggtttgttacatatgtatacatgtgccttgttggtgtgctgtacccattaactcatcatttagctttaggtatatctcctaatgttatccctcccccctcccccgaccccacaacagtccccggagtgtgatgttccccttcctgtgtccatgtgttctccttgttcaattcccacctatgagtgagaacatgtggtgtttgtttttttgtccttgcgatagtttactgggaatgatgatttccaatttcatccatgtccctacaaaggacataaactcatcatttttatggctgcatagtattccatggtgtatatgtgccacattattaacttctttcctgtatatctgggttggggggattgagtttcaacgtgagtcaatttttagactagaagttctcaacttccgacaatttcaccttctgggaatatttggcaatatctggggacattattagttgtcacaactggtgggggaagctttgactggcatctagcgtgtagagaccaggggtggtaccaaaccttctacaatgcacagagcaggacccccccgttgagcgaaatttacctgactctgaatgctaacagtgccaacgttgagaaaccctatgttccttgattgttgcctcagtttccacatgttttaaagaagccattttctaatctgtgatattaagattacttgattgaacatataagatctttgatgtgcttagggaatttttcggtttagatttctatgtatatatgttgaatatatatgtctccacatatgaagaaatctaaacactaaagattcatatgtgtgttcatgtatatatatattatatatgcaatatatatattgtgtgtatatatatacacatatacatatg

SEQ ID NO: 114357 - DNA, 1020 bp, Homo sapiens
gcaataattagactgacgaaaatggtttattgagttttgaaaattattaataactttcatgttacttttgcgttctagggccactaattaaataatttataagattgaatatttatattttatcttcaggtaaaatttcaattgttttttggttgatttatctcaatagggagatagtttttattattttaagtctttgagtggattgcttgtaagtaaagttgtgcaatttgattgagttaaaactgggaataaggatttgtaaagttactgttagaattctgatttaaaatagtgtttccatttggcctcaaatggtacgttattgtattttatctatctttaagtatattataatctttctaagcattaaatgggcaattcatctgtttgtcatactgaaggtagataaaaatccttattttatgtacagaggaagagttggagattaaatgtggggtgagtaaagttttaattaggcagtatctttcttggattatgtcctcctttcttctctttatatcagcacaaggtaagccaccttggttacatttgggagacaaagcttatgccatctccagtggatagcagtggtgatgtctctctgttaccaacaaaacaacagaaaaagactgcatgaaggtttccaaatcttatttactttggtttttaatttaatcaacactttaaatttgtattttcttgaatcttttttattattgactaaagagaggctgggaggtaatctctagctttattctttaatttctcttttgctctcccaattccttcatatgactcaggggcaagtctaatcacacatgttccatgagtgagaaagtgttcttattcatgattaagagcctgccagactcatgctgtcatccacagtgatgttgtgtgctaaagcaccaaaatgaatggattcctctaatccccagtgtaaaaagtcggggtaacactatttgacccatcctaccttgaaaatatgtctgggtgtgccttagagaggctgcaaac

SEQ ID NO: 114358 - DNA, 1048 bp, Homo sapiens
ctaagattactcctgcctgcagaatcaggcagggccctattgatttccattcccaggtcccagcgatctttatctttaactccttaatgttcctgtagagtgtcctcctacttatgggtttattgattggcctgagaattgttctgaaacttaagcaagagctgcatggactcgtgatagaggatttgcaacatttagctccagtggcttgggaagggcatggagggaattgagatgactgctccagcttgggccatcaccgggactgggctagggggttgcacttggttttctgctgcttccctaaggaacttgggttttaacagctgcctttatccccatatgtagtcttagatgattgaaaaaacagtgactgaaagtgaccaattaggattttaaacttgggttttattcccatatcacagtatgaatgattatttttcatggatcctatattttcctttcaaaacatatcattatattacattatatttatgtgtgtgttgcatgcattgctttgttaaattttgacaggaagaatatctgacatgttttgtaactctgagttggctctttctcgtattcactcactgtgcccccagcccctctcctagtctaagaagctctttctgcccttctctaatgtggccatgtgcatattacatgttgtcatcataactgcccttcttgcctgttttctggcctcctgtcactcttcccttgaccccgtgctgtcttgtgggccactggcattgctcagcctgccacctgctcctcctgcggctggagaaggcgtaacacggacagtgtcaaggtacaacaaactgtaacctctcagaaaatgaaggcatgctggatgagtgaaggagatgtttctgtgctaggctccatgtgtgtccacaggtccatgtgtgtgacatggctccgtgcatgtgtgtctcatggctctatgcatatccatgtctccctctatgtgccatctaagtgcctcccatggctgcacgtgtgtgacatggctccatgcatgtgtgtctcatggctccatgca

SEQ ID NO: 114359 - DNA, 1084 bp, Homo sapiens
gtatttgtagggtttccacatatagacctgtgtttgcgcaaggggttaggacaggtgaccaagggaaatccggccaatcccaactattaatctgcattccttaggagtgagtgtgacgacagtacagcttaagcttgagcatttctcgtttaaaacaaatgggctatgtcatgcaattattgggagaatgagaggtctgtattgagatacacgcactcacgcatgcattcatacacacacacgacctgggatatgactagaaaaatatgctgctctaagccctccaagctctcctctatctccacaaagtgtaaccttaaagttagtgaggaagttttaccagaagaccacccaccagaaaacgaactcacagtcatctgattcttctcttttgtgtgttttaggcactttccacacatgaggagaagaagagcttctgtttagaagacacgtgcccagagtcagaggccccttgcccaccatgaagggaacctgtgttatagcatggctgttctcaagcctggggctgtggagactcgcccacccagaggcccagggtacgactcagtgccagagaaccgagcatccagtcatctcctataaaggtaaggaaccagcacgcactgattgcaaagccgtcatctaaatgcacattctgtgtttagtgatagaagataatagagcatcacgaatgctgtataatccagtggctcttgtttcagacacagtttaaaataaaggtaaaactacaaaagcctctatcattagaatttcatatccagaaactgattaccacctcaagagggatctaagacagggattaccaaggtaaaaaaatctcattatttctggtcacctttatttaacaggtactgtgggcctcctaagtgtttgaaccaaaggataaaaatgtgaccataaaaataacaacaaaaccaaggaaagcctaaaattcttcactatggcatttccctgcaaagccttagtcttgccacaaacctagccctttgtttctatctagcattgcatggcagcagaattgatttaatgtcccaagtatctctatggattggtaggattaaat

SEQ ID NO: 114360 - DNA, 1054 bp, Homo sapiens
tagttggacttctgacctagtgtctcagtgtcttaaagaatgtgttctaagctacaggatgtagcaactgccaggcttttaggtcctgggcttggaaactagcacaacatgacttctgttgtattaaaatgagcagagcgagcagagcagtcactgagccaacccagattccaggtggagaacatagatccagctctcaatgggaggaatgcccgaatctgtggccatctctaatttgccgtagtttccattacccacagttattgtgtactatgtttgccttttgattcacattgaaaccctcaaagtcactgcttcatttatttctcttcttaacaattgtaatggcttcaaactgacttctccatttctatgttctcatctgcctagtttcctaggtacactattgtgataatggtcttattaatattaataagatcttctaacattaatgtactatggtagcttgttgcctgaaaataaagacctcacaccttagtgtagtttgccttccatatcttaacctactctgtaagctcttcccaatacttccctttaaacttcctagatcgagtacagcacaccattcctaaaacatgttgcgtacctcttcctcttgcccctccaatgtgccttttcatcctcctccctggggacggaacgtccttccagaaacctccatctgttgaaatcctctttatcctccagcattacactcagatttgagcccctgcatggacccgtcatagatccttctctgtagcagtcgtattctcccttgactcccacagcactcctgttctttttgaggtttgctaacagcttggattatagttatttttacaggcctgtattactttaatgcttgttaatcatttaaattgttcataatctttaaagtttccaagcatagtacttttatttcacccagtaggtgctcgatatagattttatttgattcacacttgatctctagccagatattttgcaggcagattatctacaattttaaaaggttatcctgcatcactaaatacagaatttagcaaatcgt

SEQ ID NO: 114361 - DNA, 1459 bp, Homo sapiens
aagccattttattcagaatattgttgattcttcccatagtctttgtattaaatcatcataaatatcaagaaaatcagtgtaagaaattctagcctcacacagggaccattatattagtatctagatttttttcataaaggcagggatggttaattcttccactaggatattaacttagcttgatatttaattaacagtttaacttctgaagatattgatgaaagattctcatacagtcaacgccagattagaagaggtgtgttggcaagctccaggaaggcagggaaagcctcaggagggagcaagtgtgcttggaattgtagcataaacatattcctctcctaaaacacatataatgtggaccgcagccaggcacagaccacaacctgaaactctgcatgtggggttgccagaattagcaaatttttcagtataagtataccctatatactgcatgtgatatagttatattaagatgttattcataatttatcttaaatgcaaattgaactgggtgtcctgtattttatccagtgccctatcctcagcaaacctcagtgtgggccattgtgtgacatcagcatggatcagctcagtgggttccctgaggatggagtgggatgatgtctggatcagttaggagaaaatgagtgtcttgctggtactacaagacgcactttcattacaaatgcacatgtcaaaagctaacatgatgaaaaccgttggaaggtttgctgttttgccagatatttcttaacatgtgtcttatgagcagaagctctcttgtcatttggaaagaatatcacttcagaggccccatggggatgacatccgccccaccatcaggatcaatatgtagtgaatttatgaaggagcaagttcaagccatgcgctgcatttaataatgcattataataacataaaatgagctgaggattaatcaaaactttataaactggtgctaaattgacttagtaatttacatctggctctgtgtggttggcccattgacaataacttatctccaaaaagttgcatagccatttcttcttaattgcatatgttgcgctgtagggtgatatagaagatattaaaatatgagtaacagatggatactggctaatggagcttcagatctcatatattttcttattgttttctatttatttatgaacctattgctgtaaaataaaaccttttttttttcagggcagaaccagcttcagacttttttccccaagccttcttatttcggtttcttcttgctatattactctatgatggaagcacttctgtgctctgtgctccatgtgatgtttggtttttgttattagtggatgaaagttaatgatacacaaccagactgggacactttgaaggtaacagcaatatctgtgtatagatggggttgtggttttgttatttatctgctattgctgtagtatcctttgtcttgagc

SEQ ID NO: 114362 - DNA, 1025 bp, Homo sapiens
acatttattgacttaaatgatgccaaatctttgggttttaaataaatctatgacttaaaattaatttttgtttcatcctaagaagttgttttataatattcccagtgtggcgggcaatgaactcctctatccttaaagagagatggcattgtaagagcagtgctgttatgcagatcttcatccatgagaaggtgtccaacatttgaagtgtttatttttaaaattttaaatgcaactttaggatgctacataaaatacacagagatgattccatgtgaagttgaaaccattcaaggttggctccagcgtgtggatgaatctgctcagtagcacatggtaatggagtgaacatggatgttgtgagcccaggctcttgtgtttggctctgaaattaactcactgggagcttttcatggaaatagatagtctctaggacaccacctcctagatacagacaggctttccccagcaacctgctatgagcatccaagatgttacctgtgcctggagccctcggggctcttttagcttcctcttccctgctgaacctcacagttctgccttaggtcatggtctgtgttcctaaggaagaaagtcagacaagtctcttcctcctggggggtgaagaagtgcccctcttatgcgtacctagtcctgcaaatggatgagtggtttcacaatgtattttgaattcattcattctgtctctctctctctctctcttttatgctattttcaatactggagaagccagaggctctgtttcctttcactgacagctttatcccagttattcatgtattccctgtgctatcattatttggacacagtgcaaaatgatcaagaaaatgccttcactgaaataaaacttgtagctctggttgagtccaggtttaatgtgctaccatccctttgggaaaatatccaggaaatcaaagaatggaacaaaatctgttgacccctgacacttttcttcttgtctttgctttcctttccttcttccttctccgtcactctgtccttcc

SEQ ID NO: 114363 - DNA, 1050 bp, Homo sapiens
ggttccaggatgctttgatgaagcaacgtcttaggaaatggctctctccttgtaaatggtcaacccctttctccacacaaactgtcgtgtctcttcacactggttccctggggtgggatgacaaaggattctcttgttcatactaaagtgaagacagttttctacattttaaaattttgtccagtgggcgttataaccttcacagctgactatacgggtagttcactgtgagagagtgtagaaatggtaaataagagaaatctctttttctagagattctaagtgctgcttccaacggtgctatgaaatccttgccatgtgtacgttccctgttctccatgtgatgggcaaaactcctgctcttcatggacagcaggtgtgtgtgtggtgtgtgtgtatacgtgtgtatttatgtgttgcgtggtgtttgcgtatctgtgtctgtgtgtggtgtatacgtgtgcagaggtatgtatgtcatgtgagtgtgtctgtgtatgtgtgtgtgcatgtctgcacacctctgtaaaggcagggttcacattggactcagcagtgccttgcacagtgctttatataccgtaggtgttcagtaaatttgttcagttaaattgaattaagcacatggtacctgggctatgtttcgttcaataaaaagagattgtttttgcactgatttcacaaatgtcgtaactatattcagatatgagaaaatgatttaataagagaaaagtgtccctgtcccactttcatttatgaggtgctacgtgggtggcagttgatggagaagtgagatgtcctatgggtctccaccttgactagggaacacagtttggttcttagcatactattttttgggaaggttaacaaattaaaatcccatgattaagtgaatttcagattttacactgacattaagctgttttcttcttcatctttttcttatcagttgctcttaaggagctggatctgacatgtagcagcaccttcctgacagctgctattcccggggactatcaggttagctgcattaccctttggactggccgg

SEQ ID NO: 114364 - DNA, 1081 bp, Homo sapiens
ggattacaggtgtgagccaccgttcccctcctacttctcctcttatttgcaattacgccctttgtctctgcctcattttctctgtctcgtacgtgcaggctgactgcttccaaggtatgagattatttattacattagcccgatcttgcctttctacatggaagttgtcaacatcctttcttgagtcatgtgtgggtgtcaccatggtgtcaggctgtggaggtaacagaggagggaagaagaaagggctgctaagttcaatccatgcaggcgaaggctatgcgacggggaggctgtctgagaccctgttttggaacccaggacggtcttggacctcagaaatcaggtggagcctctcagtggcaccctggacccctaaagagagggagggaggatcctgaggacaggtgtgacaggcagcctgaactgagcaggtgctgtcctctctgcccctcctccctgtaaggtgtctaggtcacctccttggagtcagaccaggcatgatttgtggggtgaagggaggctcagaacacggctgcagggagcgcgtgctttattaggaaagctctctctgaggacttgaggcactgctgacaggaaaggaggttttccttgtagtgtgtggccctggaagaaagagctgggaccaatagggaaaaacataatcattcagagtttcaaataaatggaatggccagctgtgagggctccagcagatttcataaaccgctcagcaggaatagaccgagcggtgttaaatcctgactcattcacctgtacagttgtttcacatccaccttttttgtttgttgcagtttttattctggaatcattatttctagatagagagcatttgcatctttttttaacaagataaacttttaaagacatttcattttatttttattatttttatttttttaagacagtatctcactctgttgcccaggctggaatgcagtggcgtgatctccgctcactgcggcctccacctcctgggttcaagtgattctcctacctcagcctcccgagcagctggggttgcaggcgtgcgccaccacgcccggctaattttttaaat

SEQ ID NO: 114365 - DNA, 1103 bp, Homo sapiens
atcctgtggtggaatatttccaatgatccaaaattagtgatggtatcttggacaccacagtatcatgggctcagacgaattggcgtgttcaacatctttcaattgtcaacctaaatctaacactaggattgatggctttggtcaaaggatgcttcattctttggagaaaacaaaagaataacctctatttgtaagcatgggggttggaggctttggaattaggtgcttgacaaagtgaacactgcatgaaattgggagcagttgcaggctattagaagatgacagtcttttggtggtaaggaccattaatacctaccaaggacatgtttattgtattggcagggagcataaaggagaacagctgagatttttcccctcactcttctctttggtttacatgaaaaaagtgtcaaaggagaagcctggtggagaaagggcttggctatcatggcaacctttatctgtggaaaataaaaggaagatacagttgccctctgtgaaaagatctgtgataacactcgtccccaatcatcggagagacaaatgaccatttctctttgaaagaattatatttacatttccccatgtctagagaaatgccttcttattaaatacacatgcaggtcgggcacagtggctcatgcctgtaatcccagcactttgggaggccgaggtgggtggaccacctgaggtcaggagttcgagaccaggctggccaacatggcaaaaccccgtctctactaaaaatacaaaaaaaaaaaaaaaaaaagaaaaaaattaactgggcatggtggcaggcacctgtaatcccagctacttgggaggctgaggcaggagaaatgcttgaacccaggaagcggaggttgcagtgagccgagatcacaccattgtactccagcctgggcgatagagcgagactctgtctcaaaaaaaaaaaaaagttcattgattactgtttttccccaaggttttttgttcacctgtaaagtaatatgtagttgataagaggatgggggggatatttaagatctttattctgacaaacactttctgttgtcctaaactgatgtggcagataggatagatttgagtcaaagaaaggg

SEQ ID NO: 114366 - DNA, 1049 bp, Homo sapiens
tgcgacaacataaccagattaaatcagttaaactcatcagccagcctcgccgctgaatgttgggtacaccccaattcccagtcattgcttagagtatgcttctctgccaattttattgttttatgggcatagctcagggggaacatctttgacaacacagaatcttgtggtctcattagagctgcagagtctggaactcctagcatcattctgctcaacaaatgaggttgctgtcctttgatgggggagaagttcatgatgcctgcttctgtgtccttgtacactttcttagcaaggccttcgcttcagctggagtggcaggtaacttctaacagccagacccagtggcagaatgcagagttttaaatgcccagagcctgagtatttaaaggggagtgtttcccaccccgcgcacctccccccgccccgctcttagagaagaatcaaagaattgcttctagctctttccattctgctttggcacattttgcagttaaaatgtaatgctgaatataggttttgggtagagatacatacgaattgcctctcatttccttgctcttccactgttttctctgggtagaagtgagtgtctttagctctcccaccttgtttactgcaccttccatctgtttagtgtattaaaatcctctctgcctcctgccacaggcttcctcagctctcttgtgggcaccttgctttcctcacaccagttggtttccacatagtggctttccatgggagtgtttactttggcacaggtggtccatggtccagatacactcagcatggctttggggatgtggtccaggctagctggcctttagcactcatatgcatttctccactggtaatagagtatttttttatccagccctgtgatgcttcaggcaagcattttcatagtgcctaatttcttcagtatttctagttacttgttcacaaaaatggagatcaacagcgttttaagtcctagtgcaatagctttattgaccttttgccagggtcatttctgaccagctcactttgaacttgcctctttccaaaca

SEQ ID NO: 114367 - DNA, 1031 bp, Homo sapiens
catgcccagctaatttttttttttttttgaatttttagtagagacggggtttcaccatgttagcctggatggtctcgatctcctgacctcgtgatccacccgcctcggcctcccaaagtgctgggattacaggcgtgagccaccgcgcccggccttctctccatatcattttgcagaactccacgcactgcctttatttcttaaagtctttcactgatacagaatgtcagcttaggagaccaatgagactgttttgttcgcagctgtgttgcccacgctgcctagaacagtgcctggcacgcaggaggctctcgggccatcttgggtaagtgaccgaatcaaaaaatgcccttagagactatgtatatagtatagactgcaatagagtatactgagagaaaggactaaggcttaagcaagacttttgggggctaaccatggactctaaaactacttatattctttatttagagaaaaatgttccaaatgcctccaaactgattttttagcacagtcttaaaatacaaatgtctttgtaaactggcaggtggagggttgggagagggactgcatatttcctagttcctaatacacaacaatttgcacagtaagtcagtgcttgttaaatgaattgacgaccttgcatgacttggagattagcataaatataatttctgtgtacagattgaatattcctaatcaaaaaatcccaattccacaatgcttcaaaatctgaaactttctgagcaccgacatgaccctaaaaatgctaatatatataatacaaatattccaaaatctgagaaaatcccaaatctgaaatacttctggtcccaagcattttgggtaagggatacttaatctgtattaaaacacagaaaaattgaaattcagggatgttctcatttaaaacagcaccctctcctccaagcacacaaattccagggaacatattgtgtctttattacatatgtttacacattacagagattttagacatcctagaatattttaaaaatatggcaggcttt

SEQ ID NO: 114368 - DNA, 1033 bp, Homo sapiens
ccgccccttcccggtacaggacccccaccttcgctcctgggagccccgctgcaccccaggagttccattccagcctccccagtgcgagtgcggccgagcgctgacttttgggggctccctcccccgtctcactgggtccctctgcggctcccccgcccgctgtcccggttcagacgtggctgcaccccggaggggggcgccggccgagacctgagacgtggcgctccctctctgccggcctcggcttcaggtacgtgcggttccctcggctaaatctggcccgggggatggggggcaggggccgtctggtcctccggaactcgaactttgtgattttgttctttctgtgtgacatcctcatccgttctgagggagaaactccttaaagaagacgagagagtcagtcgttgcgggttcttggaggagcactttgggggtgagactcccggctagttcgggtcgatttcagcgggattaagtcaaggaaatgaacaaatctgacgaatcagggaggccagagaaggcgtccccaggtagccacgctgagcgttaagagagaagtcccgtatggtcaaagtcattcgtccaattctgtgtcaattattccttgttgcacttttgcaggatccttgggccttactaagtactcaggtgaaaagttgataattgggaagcaagtaaagtacctttgaagacgtgtataattggacactttgttgcagttcttcagtttctggaggaggcggtggggggggagagggagggggtcagcctcgcgaaaagagcaaatggtaaagttataggagtataaggcataaaacttgggttgggagtcctgactggccttgagtggccctttcccactggatgggggtgcgggacagtatctctgggccctttttactcagtctgcgcctcagagggaggcttgaaggtcccctgcatgaggaaatgtgtgaattgccccctcctgaccgcagtgaggtagggacccccgcaaggacccacgttcacaccagcgcccttccagcca

SEQ ID NO: 114369 - DNA, 1078 bp, Homo sapiens
cagattgcttgagcccaggagtttgagaccagcctgggcaacataacaagacccctctctcttaaaaaatggtggaaaaataatgtcttaaatatatgagactaggtatattgaagtgttgaagtgcgttatttaaaactgcttcttattaaaattactgccacatcctgattttatttagaaaactataaatctatgatagacatctgctaaaaatggcatattttataattaatactagaaggtgttcttacaactgctgtcagtgtatcttctgtatttcaatggattgtttgtttatgtgtttgtgtcccagagtgctctttttaacaagtagtaatttttgctcaggtattttcagggactcttaaaaacaggaaattttgggatcatttcctctgactcactgctcactaaaataatagctgttactctccacagatgctgcagttggagaagaaacttgaacgtgaacttgaggatgatgcacgagttattgcttgccggttccctttcccacattggactccagaccacgtcacgggggaggggatagacacagtgtgggcatatgatgcaagcacttttagaggccgtgaaaagaggccctgtacatcgatgcatttccagctgcccattcaagcataaacttgactgggagtgtttttctgaaatattgtagtcttccctgatcttgtagagacttacagctgtgtccttagcaaaggagcataattgtctttggtttggaatgagaaattactattactttccttaactgttggagaaaacaaacgaagaaaaacaggtagatttaaaatctgcttttgatgctattttcttaaaaattgtacttactgcctttccatgcacctggatgcatgaaaagatgaataagtgatggtcatggttatgggtaggaaaataagatgccaatagctcttcacattataaacaatatggcttaatgcctcgataaggagaaatgatttttaaagacagtatatattaccaactgtttgtagtatcctataactttgttcatacttaagttgtatctctttcctttttgtacttc

SEQ ID NO: 114370 - DNA, 1802 bp, Homo sapiens
ccaaaagcttgcgcacgcgcagcacaagacgcgcgggacttatgtttctactgagactaatttcacgccagacagtatcttctggaatcggcggccttcgggaacttctattatccaggaagccggggagggggaggtttgaagacacttagtggaaatcttaggacacacaagtcaagagcagattgaatttgtcattttttaaaacgttaccactgatagtttctcgatagtgggtcccaaggaggaattcattgacttaaagcactatttctttatttcttcgcactccggctccgagaagatggtaggacccatttccggtttttttttttttttttttttttttttttttttttttaaaaacgctgttggaaatctcgcgatggagggaggaggaggtgaggctggagcggcttggcgggttcctgggggcatgagaaggggtgcgggcgggccgggggctcgcggtcagctgaggtctccactgtcgaggcggtgaccgggtgcgggcggctgctctggcctccagcctggccttcggtgaccagagctcctggtcgccgcgcggtgcccgcgccggttctggcgatccttgtcggcgggcgcgtttccccagagactgttctaggctacttagtgcaagtgactcagcctttggcacgatcttaaggaatagggatagtggaggcacactgatggattggaatcgcagttctgccgctcttcctagctgtggctttgaggaaatcccttaacttctttgtccctcgggttccctgtctgcaaagtgacggtggtaacagtagtgcctactcacagggctgctgtgagattcaaggagaacggtgcctggcaagctgaacacagtgttggtaaataaattaacattttgcacaaatggttcagtaacttgccactggtatacagctagtaagaaacagttacacagcctgatgcaatgggtcccacactctttttttttttttttttttttgagacaagactgtagcccgggctggagtgcagtggcgcggtctcggctcactgcagcctccgcctcccgggttccagtgattctcgtgcctcagcctcccaggcagctgggactacaggcacagaaccaccacgctcgctaatttttgtatttttagtagagacggtgttaacgccgtagtggccaggctggtctcgaacggctgacctcaagtgatgtacccgtctaggtctccccaagtgttgggcctgagccaccgcggtgcccggcaggtctcactcttaagccctgtattatgctgcctcagaaagatcttggcaaccgcagctgtcctctaaatctcttatgctgccttcctccccgccctccaagatcatgacttaatatttgataggtttagatttatttgttgagggtttccatccttgcttctcccctactgccatgggcagggacttaactaataaagttgtattattcccagactttattaggcactcaataagtgctgaaatgaatacatgcactataacatttgaccctgtcctgaaactcaagaacagacttggcgactgtgttcccatctactctggggctgaggcaggaggatgggtggagcccaggagttcagtttacagtgcgctataatcgcgccactgcactccatcctgggcgacagagcgagattctgtctctaaaaacagggaggactgactgtcatgggatggttggtgatctgttaactcttcatgcttggcatacttacgcgctagaccttgaagtgttcttcaaggacattttagat

SEQ ID NO: 114371 - DNA, 1002 bp, Homo sapiens
agcgtttttaaaaaaaaaaaaaaaaaaaaaaaaaaaaaaaaaaaaaccggaaatgggtcctaccatcttctcggagccggagtgcgaagaaataaagaaatagtgctttaagtcaatgaattcctccttgggacccactatcgagaaactatcagtggtaacgttttaaaaaatgacaaattcaatctgctcttgacttgtgtgtcctaagatttccactaagtgtcttcaaacctccccctccccggcttcctggataatagaagttcccgaaggccgccgattccagaagatactgtctggcgtgaaattagtctcagtagaaacataagtcccgcgcgtcttgtgctgcgcgtgcgcaagcttttgggccctcccgagaaagggaagtgcattctcgcttccgtagcggtctccgccggttggggggaagtaattccggttgttgcaccatggcgtccatggggaccctcgccttcgatgaatatgggcgccctttcctcatcatcaaggatcaggaccgcaagtcccgtcttatgggacttgaggccctcaaggtaatggcacagggacctgctcgcggtgggctaaggggaggtggccgaggccgtggctctgcgcctgcgcgagttgaggagcggctctgccatgtgctccccggaaaggtcgagaatctccgtctccctgcggtctccggccgctcagcccgcttactgagctcgggagacgccggcgcctaatcctgggctcggaatgtgggggccagccaggctgggccgccagcgcccttcggagctgggtggggccgctcagtccggtcgcccgcgggagcaaagcgggaccgcctccccgcccggctcctccagcctgacggccgcgtgggactgcgctccagtgggagggcgccggggagatgctctgtcacctgtcggttaaggcgctgctgcttaacctttcgctggtccacccgcaacggcccttccgttttctttgtcactcgta

SEQ ID NO: 114372 - DNA, 2995 bp, Homo sapiens
gatgtacaagcctagatgcaagggacttgagcatctgtgaatttgggtatcctcgggggctcctggaacctgttccccatggatgctcagggagaactgtggctcctggaaccaattccccatggatgctcagggaggactgtgttgcacagtggtcttgcaacgcctgtaaggtcatagtcatactgtccctcttctcagctgtaaatgggctggtaaaagaatctgtctcattaatgtgttgaaaattcagtgagataacacaaagcacttggttctctttctttacgtaagaattgcttattaaaactggagtcgtaaatgttataatacttaaacctgtctgttgccccttaaatgtagaagcttctagacaatagaaactaagtcataagtgatttttgtagtcatcagatgtgtgcttttaaccattgaaattatatgtaacagtgtttgctttttctgtttgtttcattagtctcatataatggcagcaaaggctgtagcaaatacaatgagaacatcacttggaccaaatggtaagagtccaccattccgtgttttttagcaaaagatttaaattataaaactgtcaatataaacctctctacagaaaggtggagtattgaggggaggcatcttacttccttaacacagccaaaattttttagtgtatttcaggtttcttaaacatggttataatcgtgtgcaatattaggtcggacctttttttttttttttttagcatgtaacatcatttcattagcattttccaaatcatagttgtcttttgagattaacattatacttaatgatgctccataatgttttgccaattatgttagccaatctaaaaatgccttcatgcagctactattttgtgtatgttgcattatttgtatataataaattgcacagataagagctgggtcaggaggtcttgttttatagtttgtgatattggttgccagttttttgcgcaaagcctactaaacgttgttttttagggcttgataagatgatggtggataaggatggagatgtgactgtaactaatgatggggccaccatcttaagcatgatggatgttgatcatcagattgccaagctgatggtggaactgtccaagtctcaggatgatgaaattggagatggaaccacaggagtggttggtaagaaaagacaaaacatcctttctcatttaagagacgtcatttaagaccacagggctaacatgcctgctgagattgttgtctctgaatcagagcatgaggagacagacaaatccaagttgaaaacatgctacaaaacaaatgtcggactttcaaaactgacagtgttacaaaagaacagaaagagggctggggattgttaggcatggagaaatgtgtaatgattgattggacactgattttgcttgtcttttaagctataaaggatgtttgggaaacgtggaagaatttgattttggatcatgtactgcaatgctgagtttcctgagtgatctgtgaccattatattgcagatgtgtaggagaatgcccttcttctcagctgtatacctaaatacttaggagtgacatgtcatggtttctgtaactaattctcaaatagttgaacagaaacagtatgtacatgtagagaaaatgtggcaaaatgttaataagtaaactggtattcgttttagtattgtaccttttttttctgaagatttgaaatctttaaaaagttggggagattgaagacaaaatatcagtaaggttaccttttctgcagatgaaatttgaattcattcaacaaatatttattggatactattgtatgccaagcactgttctcggtgcgcttggagagctgtagatttaaacaaaattcatctttgcgaccctaaaatgaggagaaaggaggatgggggtggggggaataaataataaacacgttttagtctcatcaccaggctgaatttcactgagtagaccctggcccaggaaacataatagctttttacctcttagaaaaatgttctttttacattatattctttagttacgttcttcacatcactgagggttgaatgttcatctgtaaggggacacatgtcctattcgaccttcgctagaactaaaacgaggctttcttttaaaaatagagggcttctgcctctaagatgacttgcagcttaattctagaagctgcttctttccatgatagcatctaacttgtgctgattatactaaaagtgaagttttgttgtttgcctgaactgattgtctgctggcttatttgcagtcctggctggtgccttgttagaagaagcggagcaattgctagaccgaggcattcacccaatcagaatagccgatggctatgagcaggctgctcgtgttgctattgaacacctggacaagatcagcgatagcgtccttgttgacataaaggacaccgaacccctgattcagacagcaaaaaccacgctgggctccaaagtgtacgtttcagtagatgatatgattacccatttgtagaggaggcagtttgtttgccatttcttaaaggcaacacaaaatgaccactggtggatttgtatcgatttgattatttgttttgattacttggttttgctttgtttttaatgtagatgtagacagatgcattttgtatttaagttgagaactgaatttctaagttcaggtataaatccccttgacaatatttgcaaaatatagttattttaatttagcagaataggttgtgttaaaaatcagctaaggctggatgcagtggctcatacttgtaatctcagcactttaggaggccaaagcagtagcttgcttgagctcaggaattgaagaccagccagggcaatgtagtgggaccccatcgctacaaaacaaaaaactagccaggcatggtagcacacacttcagcaactccagaggctgaggtgagaggtcgaggctgcagcaagccatgatcatgccactgcactccagctt

SEQ ID NO: 114373 - DNA, 1415 bp, Homo sapiens
ctataatggatgttgtggtgaattcttggaaagtttaaatgccctgtccagtcctttcagttcctggttagtgctacacttcattgagataagagtgactcttcctgagtgattacttacctttcccattctgttctgaacttgtaaaatagtaacagtattctgtaaaagtgctgcattctaagaagaccttaattcatgccagactacagtggtttcttgagtacattcataatggaaggaaatagtaaatttcagagttagcgaaaataaagatgtaattttttcctatctaagtatacagtcccctttagggcccatggatcacaggttaagaatctgccccagactgttgaaaatgcaggttgagatggcattcccctctagaagactcaaaacatcgtttgatttatatctttgagtaacattgtgttatgtggcctgctttggttgcagtaattgtgaaaccaatgaagtttgttttgtggtgttttcctcagggtcaacagttgtcaccgacagatggctgagattgctgtgaatgccgtcctcactgtagcagatatggagcggagagacgttgactttgagcttatcaaagtagaaggcaaagtgggcggcaggctggaggacactaaactgattaagggcgtgattgtggacaaggatttcagtcacccacagatgccaaaagtgagccattgcatctcacagcttcgcactgttggttaactcttaattccaccaattaaaatgtctttatgttcccccatagaaagtggaagatgcgaagattgcaattctcacatgtccatttgaaccacccaaaccaaaaacaaagcataagctggatgtgacctctgtcgaagattataaagcccttcagaaatacgaaaaggagaaatttgaagagatgattcaacaagtaagtcttaccagagtcctcagtggaatttaaactcccaaagggtacagttagttaggtttggttagtaaatatgtgtagtctttcttcagttctaaaacatacacaggaaaaaaccaaattgcatagaaaggcataaacagggaagaattctaattttgtcttaaaatggtagcgtgttcaggccaggtgcagtggccatgcctataatcccagcactttgggaggctaaggcaggcagatcgtgagatcatcgagaccatctgactaacacggtgaaacgccatttctactaaaaacacaaaaaattagccaggcatggtggcaggcacctatagtcctagctactcaggaggctgagacaggagaatcgcttgaacccaggaggcagaggttgcagtgagctgagcttgcaccactacactccagcctgggcgacagagcaagactctgtctcaaaaaaaatggtagtgtgttcagggtcctgaaa

SEQ ID NO: 114374 - DNA, 3543 bp, Homo sapiens
tgtgagtgcccgaattagtttatggatccactgaggattgtccactcaggtgagacagtcaagttgcaagtggttcataacattgtttgtttaaaacatactcaggtgaaactactctgtaggtgtttgtgacaggacagagctgttagccatttccccatggttggggaagggtgttagctttgttgacgtttctgtgggttttgcctcactgtaacaatagggttcagcagaattactgcttgtggtttttaaagcataaacaatgaggtgatccccattgataaaatattcactatttagaatttggaactgacagaaaagtggacacttgtctatttccttccttctctttcctttgcttttgtgtttgagtgcacctgccttacacccaactgtgcctctccttttttcaaacattgtaatgaagaataaatacccactttctcttaatacgattgtggtggttcttttcccagattaaagagactggtgctaacctagcaatttgtcagtggggctttgatgatgaagcaaatcacttacttcttcagaacaacttgcctgcggttcgctgggtaggaggacctgaaattgaggtaggatgttccacgtgaagagactttgagaagtaggggttcatcttatgtgttgaggggtgttttgatagccctgccttaaataactgcatcacaccaaggctggcagatgaggggagggtgagctgggagagaggaaagcgctggaatctttgttactgtttggataacagtgctgtgtgtttctggtgttccctggcattttgaaattctctccctgtgttgtctcacttggccctgtcgttgacttactaaggctggaagacctggtctcatccaaatactaatggcagtcccaggcaacggtgcctcggtggttctcactgcagcgcagtgcaaggaacatgcaggctgggttcccagagtgagggagggctgcacagatgggagatgagggtatgagcttaggggacgggcgccgggtgatagatctgggcagcaccaaagccccaatcaagacgtccagctcaagagccttgttacctagcaaggtgctttgggttgaactggagatgtctcggtcaaagtggggcagcagttctagtgaacaagttggtcttagatcaagttttgctcatttgtggcccagttttgaaagttaacttcaccagtactgtcttcatccttctccctgaccaccccaattagctgattgccatcgcaacaggagggcggatcgtccccaggttctcagagctcacagccgagaagctgggctttgctggtcttgtacaggagatctcatttgggacaactaaggataaaatgctggtcatcgagcagtgtaagaactccagagctgtaaccatttttattagaggaggaaataagatggtgagaattcaactatttgtcctatactgttgcttattttgcttcatggtctggcttttttgcctgtgtgtatttaacagagacacagtcaccataagaaaaataatcgtggttctcaaacaatgacgtatcatggtgtaaaattactgaagaccatgttaaattgttaatttcacaaggcacatttgcctttctgctgtcccttagagtatacaatatacactatgagatttttatatctttttaaatacttaaacacagtttaaatattcaagtcctggattttagaatgtttgatacagttacattaggggttggttaaactgctagccctagcaacataagactcattttaattacaatatggtattattaccaaggatgacttacatctgtcccttaggtagaaaaagggaacccaagtgaataaccattgacgatctctgttctttgagaatgagtttttagcacattgtgataaatctttgcgagttttgtcagtttttgactcttgcttgaccgtgtatcctagaatgagtcactggccgcctctgcctcttgaattttgttaactacattgcaggaaggaaagctagaaagataaatattatccgatagtggaggccatctaaatattagagcacagcctctctgtctttaaaaaggtgccagatacttggctctaaattgactagatcttgatcacattaattcaggcaaagctgttttccttagatcattgaggaggcgaaacgatcccttcacgatgctttgtgtgtcatccggaacctcatccgcgataatcgtgtggtgtatggaggaggggctgctgagatatcctgtgccctggcagttagccaagaggcggataaggtaagggatctgtgcagacttagtgaaagattcaggcctcgctgatggtggagactgtgaagctgcggaacagcgaggtgctggatgcaaaacaagcatcgtgagctgtgtgtaggtgacaggtgttttaatctaagttaattcccacgttcctgtattcagattctggttaccataacctagcatttctcagctgttttcagccagttcgtccttgaaataataaatctatagtcttttaatgttatttgaaattcaaaattaatattataacttaaaaataaagccataagagctgctgtattttgagacatctctcacatgtatgtataccctctgcctgtattctgtggtgacattataatattctgatagatacaaaaataaagacagcctgttcttacaattctttgtgagctgacttttcaaagtatgtgatacagttgtgttttcacggtgccgctgggttgttttgtttcgccaagtgcactcaccatacttctgtacctttccagtgccccaccttagaacagtatgccatgagagcgtttgccgacgcactggaggtcatccccatggccctctctgaaaacagtggcatgaatcccatccagactatgaccgaagtccgagccagacaggtgaaggagatgaaccctgctcttggcatcgactgtttgcacaaggggacaaatggtgaggagctgtcacgcctctgcgtggagggggggggatgtctgatttaaactgaataatcatccactgtatgtgctgtgagatgatggtgtctttttaaatatgtaagcccacttcaggtgttcaagtcctgaattttagaatgtttgattgccgtaggaattggttagactactagacctagcaacatgagactcattgtaataacagtaaagtgcatatggtactatcaccaaagatgacttaggttttaatctctggtttttgggaagtaatgccttattgctgtttttacacagatgtctgtcagtgggcagcatatatataacagctctgaagtgggctttagttcacagttcactgtgtggttaatcctgcacactgtggagtgttttctaaatgtaatatataacctctgtagccacttgtgtagctcggctcccaaaaagatatggtggctgtagcttgttgaaacagtggtctcaggcatttctgtactaaatcaggccatgtctgtaatccatccacagaatgacagctt

SEQ ID NO: 114375 - DNA, 1293 bp, Homo sapiens
aaaaaatacaaaattagccaggcctggtcagggcaggcacctgtaatcccagctactcgggaggctgaggcaggagaatcgcttgaacccgggacgcagaggttccagtgagctgagatcgcactgttgtattccagcctgggtgacacctgtctccaaaaaaaaaattagcatttctagatctttcttggaaatatcttacatttcagctgtggtcagatggacttactttagatttcctaagttagggtatggatactttgtgggataagatgttcctgaaaaatgtcaccctgtagctagtcattgaagacagtgccctcccaacagctctctttaccaggtgcgagttccagagtgtccttggaagtaatgaaattacattcatctgaaaatgaaatataactgaaattagtggcttcctgcttggcttccaggagtttgtatttcttaagtcttactgtgattccctaaatcagaaagagttggttattgatagtttattgtatgctattttaggataatcagtgtccttgtatttttcagatatgaagcaacagcatgtcatagaaaccttgattggcaaaaagcaacagatatctcttgcaacacaaatggttagaatgattttgaagattgatgacattcgtaagcctggagaatctgaagaatgaagacattgagaaaactatgtagcaagatccacttctgtgattaagtaaatggatgtctcgtgatgcatctacagttatttattgttacatccttttccagacactgtagatgctataataaaaatagctgtttggtaaccatagtttcacttgttcaaagctgtgtaatcgtgggggtaccatctcaactgcttttgtattcattgtattaaaagaatctgtttaaacaacctttatcttctcttcgggtttaagaaacgtttattgtaacagtaattaaatgctgccttaattgaaggggtttgggtggatttttttttctcaaaataagctgtagggactattttaacagcttaaacaggagctctcaagatgcactttcatattgagaggaatatgggcttgatcctcttcctatctaaatgggtgggccatttgattgtagagggtccaccacagaattatgggatgccttaagtgctgttactaggttgctcacagcctaacctggcgtgttgtttagggctgatggagacccatgtgagcctttgctttcctctggccccggccccaccctgaacacagctcatacacagaatcaggaccagcatgtgcagag

SEQ ID NO: 114376 - DNA, 1136 bp, Homo sapiens
ttgtccacccgctgggcctctgggccggggagcggaaggtgaccctctgcgcgccccccgccgtttcccgcccgcgccgccgaggggggcggggaccctgccgggcaggggccggggccggggtcggggcctcggggctactgcaggccggcgtggcctcccttgtccccgccgtcgcgcgctggcccagaaaagggggcctctgtcgctgccgtccgggggcgttttccgcacccttcccccactgggttttgtctttctttacgtccttctgcctattgctcgccaggccctaccccctcgcgacagaacttctttgttgactttgaaacttcgcgaaaaataccccgccagatgacggccgagtggagtgagctgacccctgttgaaaagcctggtcctcggcttgcctgccgctcgagaatctgtttactaaacggggaggctcttttgttgcgatccatttggttttaaatccttgacacctataagcagggttctgtttgttttgttttgcgattgcttgtgttttggatacggttacattgaacaaactgacccttgtaaaatgaatacttaagatataaacgtccacaccttatgtctcttcaaacgcattttcttacccactgaaggtagtagattatttttaaccagctgtgtttttaaatgagtggtgagtttatagaggaaattactaaattttgctttttttgatgttccggttatcgtgcaaatgcttttctactttaggtatatttatgggggtatgagcgtctttcaaccttatgggttgcgattttggcgattttaaacgaaaatgaattatcaaacgccgtcatggagtgcaataatgagtgaaaaaagtttgatattatctatgtaatgagttgataacgacttatttttttttaaagaagtcttgcctttaataaatacctcaactataacatgtggcacttgatgtacattcgcgttccatcttcgtaaaaagcctgtggaataggtaggtattatcttttatagatgtggaaatgtaggcttcgttattttaatagcttgtcgaagctttacacaggtagtaagaggcagatttgaacctaggcattctgattgcaagtaatttccctttcatt

SEQ ID NO: 114377 - DNA, 1062 bp, Homo sapiens
gagatgtctgctgcatgtttcttaccacgcattacctttcactgttttggcatgcttgtgaccaagtgtacatgcatttattcgttaaatgtttactgaggacctgttatgagccaggcactattctatgcatttgggctaggcaaggaacaatatagagaaaatcctttctttcatagagcttacattatagttattagcttaagacaaaataaacatgtaaattatatggcataactagaaggttataaacgctgtggagaacagtgaattgggagggaataagaagtgccaggatatgagggcatgggttgctttttttttttttttttttgagacggagtcttgctctgtcacccaggctggagtgcagtggcgcgatcttggctcactaggggtcgcagttttaaatatagcagtaaaggaaggcctcactgagaaggagcaaaggagaaggagttagccatgcagatactctgggcagagcattccaggcagagggaacatagcctatgtgaagtgtctaagatgggagcatgcctagagtgttcaataaatcaccaggagagcagtgtagctgtaacggagtaaaagagttggagaagagtaagtataatatgaggtcagaaagatatggagccaatggggagagagcatgtaggacttcattgacttttatagtgagatagggagctatgggagggttttgagctgacgtgagacataaattgtcttgatatgcagccagctttctgtatttgtgggtttcgcatctgtggattcatccaatgtcagatggaaaatacttggaaaaaaatagatgattacctctgtactgaacatgtacagcctttttttcttgtcattattcctcaaacaatacagtatgatgactacataacatttatgttataattattctaagtaatctagagataatttaaagtacagttgactcttgaacaacatgggtttttgaactacatgggtccacttacacatggatttttttcttcaataaatatattgaaaaaaattttggagatttgcagcaatttgaaa

SEQ ID NO: 114378 - DNA, 1067 bp, Homo sapiens
ctgtggacttcctgaaaccaatcccccagggttactgagtctatctctttcctggttaagacaagtttttgtttgtcttaaattcaaatttctggaagctacaatctcactggctcatcttgggtcagttgcttatccttttgatccaggtagctgggtggtggtgggaaaggtaatggaagaataagaatcatgactggctgtgtccattcttgagctggtaagacagtgcaaaagagatctgctatattgctcaattagaatactttttagactgaagccctgtgagtgattattgctgggctatcctcttccagatgcctacttcccatttcttccaggccaggcttactttagtgggttttacttctgtcctgtaagactatgaagatcacttatttttagtataatacagttagaacagaaagagttcttgaaaagtgaataggaagtaagaaccccccaagggaaaacttaataattcagactatattttagaatgctgttgcagtaggctagatgagatataggagttacattaaggtagagggaatggaaagaatggaaaagaagaaatagaccaaggtagaattaatagaacatagtaattgaagaggtaatataaggaggaggagttaaaaatgattgatttttatattatttcaaatgggaatggaaagagataagtagttcagttttagatattgttttagtttgcaggggctgctgtaacaaagtactacagattgggtgcttaagagaaatttgttttctcaactctggaggctagaagtttgagatgaaggtgttggtaggcctggtttcttctgaggtctctctccttggcttgtagatgattgtcttctgtgtcttcatgtagtcttctctctgtatgtcttcatgtagttgtccctctatgtcctaatctcttctttttttaaagacgctagtcatattggattagggcctactctaaggacctcattttaacttaattacctctttaaagatcctgtctccaaatatagttacattgtgtatacatgcaggttagggcttcaacacgt

SEQ ID NO: 114379 - DNA, 1242 bp, Homo sapiens
aaagagcaggggggaggtgataatgactggtcagctgcttaattgatcacacgttcatattattacgaacaggcttcagatgtacctaatcacaagaaactgagcttggggcgtgactgccttcagcattccttctgggtggcataggcagtttgtcagtttgccaacattctgcgtttatgagaacagtttgctgttcactcttatagcctccagtggtatactgagttgatcacgaccctcagtctttcggcctccaacagttacaaatcatgttgatggcatatcccttgatatgatatgatatgatataagatgccacttcatgtgatttttttccttcccaaaacccatagccccagtctattcatgaatcatgcaatttccagtaaacagacattctacagtgtacctgaccagtactccttaaaattgtcaaggtcgtcagaaacaaggaaaatctgagagactgcccgagcccagaggagcccaaggagacatgacaactaaatatatgtagatcctagaacagaaaagggacgttaggtaaagactaaggaaatcagaataaaccatggatttgagttaatgacaatgtatcaatattggttaagtgtaacaaaagtgtaacaaatcctaataagatgttaatagtaggggatattgtgtgctgggtatatgggaactctgtactctcttcatattttctgtaagtctaagacttctaaaatctaaagtctgttagtaataaaaaataattctttgtatattaaattatcactgatttaacaccagaaggtaagtggagagattttgaagtcttacatcaaagaactttcaagatagataatagcttaagagttataacatgtaccccaaaacttagagttttatttttttcctcatactaggcacttaggataaattattgaactgtactgttggctagaaaaactttgatgaaatgggctgacttccacagtggtggtggttttctttctttctttcccatctcctgggcaatctccacaagaatttgaaaaattactaaggacttgaagcttttttttaattaaaaaaaccactattgtttattgagccaagctctttggtggaatctttaaaaggtatccatgtgtaaagacattaggtattcaaatacagcaacaaaaattgctacaggattaaatagaaatttccctttgaaaaccaggaagagctttgccatattgtttctaagta

SEQ ID NO: 114380 - DNA, 1079 bp, Homo sapiens
tttctgggtctgcctaccttgcactcttgtggggtggggtgacatgaaaagcttgtcttctaactgctgttattgtggtgagtcctcacatgtgttttgtggagtttaggctgttaggactttaaaccgttaaattgttaagactggagtttaaaactgttaggacgctaatggtgacctgattttacatatttttattatttgttgtggagagcgcagttttgaataaaaccatctgtttctcttattttcgactttgatttatttaaaatctgtcatacgaaggaacaacttaacttttaatacattatttaggaattttttagttttagataaacacttgaatagcaacttaatcacaactttcagttctccgtactattaatgttttgtcaagtgatagattcttgctttaatgtccaatattttggtttatgcttgtttcttgcttttttaaaaaagttataaccaaaggaaattcaattttcctttttcattggcagacatatgtagagtgtgtcggtcagaaggaacacctgagaaaccgctttatcatccttgtgtatgtactggcagtattaagtttatccatcaagaatggtaagtcatacttttagaaagttatgtaagtctgagcttcagtttcgtcatgtatacagtaacagggatcatttcaatgtactttctctgtaattatttttaaaagttttattgtattttcctgagcacaggaaactgaaaaagcccttttattgtaaaaattaaaaaatttggaaaagaaattatccattaattcttaataccatggctgttattttggtgtatcctcttccaggtacacgtaattacccattgtttatttctaccatggagagcttattttgtcctctgaaagtgttatgattttctagttttgcttggcataatagtagcttacatttatgaagtactttttgccaagaactgttcttagtggtttgtacatctcaactcatttttaatccttataagaaaattgtgatgaggtggagtattattattatgcagatgaggaaattgaagcatgggaaggctagata

SEQ ID NO: 114381 - DNA, 1036 bp, Homo sapiens
ttttagtagagacagggtttcaccatgttggtcactctggtctcgaactcctgacctcaggtgatccacccgcttcgggctcccaaagtgctgggattacaggcgtgagccaccgcgcccgtccgggatgactttttaaataggctgtcacgcagtttgagatacatactactgtcttatgttcacaaaagtttttttgttttgtttttttaaatggagcctcgctctattacctggggtagggtgcagtggtgtgatctctgctcactgcaacttctgccttctgggtctcctacttcagcctcctgaatagctgggattacaagcatgtggcagcaagccaggctaatattttgtatttttagtagagatggggtttcaccatgttagccaggctcgtctcaaactcctaacctcaagtaatctgcctgcctcggcctctcaaagtgctggggttacaggcatgagtcactgtgcttgcccaagagttcgttttaacatgtgtttttaacatacacatttgaactcaaatttattttttaaatgttttccatgattattagaatataaatgctaagaacttgcctgtagttactttactatatcttgatattaagcattgttgcttgccttatattggcaggcttctttttccctctcacctgataggcttgagggtcacctgaattgctttcattagactactcattgactccagaggaccactggaagcctagtggggctagtcaaaataaattataaacatggcttggttttagctgtcttttacagtttgaaaaattgagccagtttttctgatagcagttgtgaccaaactactttttttctgagtaatgttttacactctctatagaattttttttctgtgaaattttactttaaatttccttaatgtcttaccagtttctatgtattctgtagctcagtaattgaggtcatgtctaggtgcactgtatcagttatctattgctgcaaaacaaactgtcccaaaccttagtggcttaaaacagctacc

SEQ ID NO: 114382 - DNA, 1120 bp, Homo sapiens
ggttcaggtgtcagctaatcaagtttttaaacatgtgtaaaataaagatacagaaactcttagagttggacagagtttttaacctttggtaaattacataaatttaatgcatggcctttgtcaagtgttagactgcttttgtctttttttgcgtgctgcctttctgtttctaggccattttcaaaagataggctatggataggtaatttccatatagttctgatggtatttgatgcctaaataaaatacataatacaagtatgtaaatatgtataggttctcttgcaagtagaatttcaccataatcacaaatagttcttttggagaaacttgagattttcatccaaaaaattatgatttattcttctggctgttttttttttttctgagactttagtataagaaaattttttacctttgttttcctaattttaagtcttctttggagtaattatatgtacttttttttttaatagggaaaatttgttggcagattgtttgcagggttgttttgtggtgacgtgcacactgtgtgcattcatcagcctggtgtggttgagagagcagatagtccatgggggagcaccaatttggttggagcatgctgccccaccgttcaatgctgcggggcatcaccaaaatgaggtaactcccctaccccaaaattgattttacttaggtaggtcatgagaattattgtttctctctgagactcaaactcttgacttccatgtccctcataaacattcttttgttattacaaaggagggcagcggaaaggtttgggtgaagatgaagagagatgtgaaaaatcaagaaagtggtattacgactttgcctcttaattttctagttagagtgggaacagcgttggggggtatactgaagtccatgtacacagtcttacccactgagcagaaatttgaaaacatttcctcaagtgtttgatgacagagcatgtatgtatatatgtatgtacatttttttaaaaatgtattttcatccctgatgctgtcaataaagacaaaggctgtcttataaaaaggactacagaatgtttttaagagagccagatttgttaaccattttctataatgctttgtgaactgttaatccgcta

SEQ ID NO: 114383 - DNA, 1180 bp, Homo sapiens
tgatcccacatcagatacatttaaaaaagatgtctttgaaaggttttgtttttaaaaagaatttagtagagtttatatttgttttctagttttttgtttgttttggttttttgagattggctcttgctctgtcactcaggctggagggcagtggcatgatcacacctaactgcagcctcacaacctctgggctcaagagatcctccttcctcagcctcctgagtagctgggactataggcgcaaaccaccatgcctggctaactttttaatttaagtacagatagggtcttgctgtgctggccaggctggtcttgaactcttgagctcaagcaatctgcctgcctcagcctcccaaagtgctaggattacaggcatgagccactacacctggcctaggttttttttttttttttttttttttttttagcaggaataatgtgatttggaaacagagcaaaacagacaagtggatctaaatttctgggcttttctgtgattttaggctccagcaggaggaaatggtgcagaaaatgttgctgctgatcagcctgctaacccaccagctgagaacgcagtggtgggggaaaaccctgatgcccaggatgaccaggcagaagaggaggaggaggacaatgaggaggaagatgacgctggtgtggaggatgcggcagatgctaataacggagcccagggtaatggctgcttgtgtgtcctcactcttcagcactgcaaatctgttctcaacttgcattgaggaaaagggctggcgttttcaaatttttaatgttgtgaagttctatttctaacttatttttactttattttggcaaactggcatttatggatgtacatatgcataaatatgtttttttctatgaaacagggcatgttttgtgttttaaaatcctttttacacaggccttttttttttttttgggagactgagtctcgctctgtcgcccaggctggagtgcagtggcgctatctcggctcactgcaagctccgcctcctgggttcacgccattctccggcctcagcctcccgagtagctgggacaacaggcgctcgccaccacgcccggctaatattttgtatttttagtagagacggggtttcaccgtgttaccagtatggtctcgatctcctgaccttgtgagccgcccatctcggcctccaaa

SEQ ID NO: 114384 - DNA, 1663 bp, Homo sapiens
agttcatattactctgctgcctttaaatcttttagtagttttcccattactaaagaataaaatccagactccacattcctcttgtatgatctgatttctgtctttctactacccatatcattagtcagaatgtccttagttccctggcttccttacttttctcaaatctgccagattctttcctggcttagagctattgaattcctctctttcagataaccttatttattccttttctagcatttatctcaatctaggattaccttactttatatgtattatttatttatatgtatgtttttattcttatttgttccctgacaagcaaatactcagtatggaaatgtggcttagcttctcaacaacagcttacaaagtactaaattttactatttttagtgcattctattttttttattatttattatttttacttcaagtaatctttaaattgcaattatattttcagatgacatgaattggaatgctttagaatgggaccgagctgctgaagagcttacatgggaaagagtaagacctttttctgtcaagtatcctggtgttttaatcctaaaatatattttaaactttggtgtatttagatgtatacactaatgttatcgttacagttgatgaaaagttactagaattttcattcctagtgaaagttaagtgatatattgtttatggtcaaaatattgtgatgttggtggctttttttggtcttacaaaatcttgctccatttaggaaatgttttacctgaaattgtggacttttgaaaaacaaaataacaatttaaatttaagtagtattttcatgcttcagttgacaaaataatacagttttattatgaagtaatcttaattagctgtatatcttgagtaacaaatccaagacggaattgttttagactttataaatcatgtaattttgaataaaaggagacccaaaatataaaactctcattcagaaacagaattttttttattttctgaaaatgataggaagtattggaaagtataggaagtgggtgaggactgtgtttaaagatattgaaaggaaaatgaggcttttcataaattagaatagaaagttctgttgcatcttaaattaatgcttatcgtttttgtttattttagatgctaggacttgatggatcactagtttttctggtaagtaaaactaattttttttttttttttttgagacggaatctcactctgtcacccaggctggactgcagtggcgtgatcttggctcactgcaacctccgtctcctgggttcatgccattctcctgcctcagctttccaggtagctgggactacaggtgcccgccaccatgcccggctaattttttgtatttttagtagagatggggtttcaccatgttagccaggatggtctcgatctcctgacctcgtgatctgcccgcctcggcctccccaagtgctgggattacaggcgtgagccaccgcgcccggccaaaactaattctttctagtaacagaattggagttgtcttagtgattcagaaacttcacatttatagtatgtagtaaaggtcaagatgccctttggcttttaattactttatatgttgaagattgtatgtttagtgtgctgaaaatattgaaaaagcataaaggtaatatttttaaaa

SEQ ID NO: 114385 - DNA, 1065 bp, Homo sapiens
gtgacagtatgtaactgtgggaggtgaccagatggtcaggtgagacaggacaaagaaagtcagggcaccatagggagtggagggaccagaggagatcaagctagagttttccaaaggagtggtagccaggcaatagtgaccttgtaggtgtcaagaaggcagattggacgttgaaagaaacactgcagttgacgttaacatgatgtttacaattaatttggctttcaaatttttctccatttgaaatttttagtgtcatttgatttaaatgaaatctggtggttatgaaaatctatgtaatttgtcgtagattatttctaaaaaggaagtgtttataaatgaatttgttttttgtacatgtaacatttttgagttttattaggcttagttgtatgagctatctaatgaaaaatgaaagttacatattatgtctagattgaaatcccaaaacaatagagggaaaatttcaatcttagctgtttttactatttggctctagctaaataagtggaatagtccaattaaacatacattaagtatgaattgaatatgctttattgatgcttttttcctttaggaacatgtcttctgggtggtatctttaaatacactgttcattcttgtttttggtaagttgtgtttgtgctttttttttttatagtattatggtaggaatttagttttgtaggagccttgttataggtttattattattttttaacatagaaataaatactaagcagtatatgaaaatagtttcagatacaaaccctgtatagataggccccagacagacagatactttcctaagcagcagtgactgcagttacctacctatctctccctctgttgggcatttctgggttttttttttgtagaagctggttttagaccgacttgaaaatatacagtttcccatttctggaattagttttatgctgattgtgtgtgctcttccctatggtggaatatcttgttttcatctgtcaaaatcctgaccattgccttctagagatcttgacttgggagctgttaccagagctgagtgtaggcttgtgggaagac

SEQ ID NO: 114386 - DNA, 1012 bp, Homo sapiens
tttttccccctttttagcattttgcccttaccatattggtcatttctcccttgttggtttgggatttgaagaacacgtgagtataatacttttacaaagttactttcattcattactcccaaatgtgattattaataaaatagtattctaaagagttacatcatttcttcattggcattatgcaagggaatagttaggcaataccgtctcattcttttttaaaaaaaataacagtggctcaagagatagtggtcatgttgccaactaatgaaaatgtgctctgaaatccagtcagctgggtgggcctgaggcataccgtgggaaagtttcccacaggctgattttctgtccatctcaagaacctgtatgttctcttctttccctttccccaggtgccccctgctgaatttagaaaagtaacaatatatcaatcaatttaaaaagggtagaatattttggaatgacgggttgtagtgttttctagagtgctttagttttgacattttatcagtattttccagaggtaaataaattttggaaggattattacttctctgttggggccctagaacaatttagtcttttatggaaaagctgactatctgggatcatatgctcagtttgtatatttgagatctgagagatcacgttctgaagtcttctcatatttagtacacctctgattctcactagttgaatgcaagaacttgaaaggttcaggtaagtgttttgaaaaattttgactttccaaacttttgccacttgctatctgaaactcaggaatcaaaaaataccgacaggcactgttactttcaaaattctttctataagttgagaatgggacagatttgcagagcaagggaaacttgaacagttacttctagtggtaggaaatgaggtggctaggatattacccagctggtgggtgacttgggcagtgtgttcctgctttcagtggttagcctttagcaaatctgctttagagtgagagtagagggcaggctgttgtatt

SEQ ID NO: 114387 - DNA, 2139 bp, Homo sapiens
gagatgtcatccaaagcagattttacagttgtttcctggttataaattgtctcaacaattctcttttagtcatttagattgtttaatatgggaaaaccggggtgtagaacatgttgtaaaattaaattttatttacttttttcttatttccaggtccaagcatctcattttgaaggcctaatcacaaccatagttgggtatatacttttagcaataacactgataatttgtcatgtatcctttaatgaaccaacttgggtgtacactaatattattcataccaaagaactcttcattaatggcgaaacttgtctatccttgtcctcttagtaaaagttgtaggtatttgcagtaagggtcagtgtggacaaaatgtgaaataaattaattctgtcaaaaaatactaaatgttggctaagtagttacctgtttcattgtacctttaaatactcagtttttccttgacctgatgctgtagggcttggcaactcttgtgaaatttcatagatctcgtcgcttactgggagtctgctatattgttgttaaggtaattcctgttataacttaaaattggaaatgatttctcctacatttgggtgatactgatgacctttattttcacttaaggtctctttgttagtggtggtagaaattggagtattccctctcatttgtggttggtggctggatatctgttccttggtaagttgagtattcattattgtataatagcataatttaagggcttcaaaagaggaagtcttcagcatgtattctttttaaaggaaagcaaatatttgataatttgcttattcttttggcatgtgtatcagtataggatcttaatgttaatttttcttgagtacctgagtttttgaggctttgtgcaaatttttgatgtcaggatagtttgggtggaatctttctaatagtggaggattttattgcccattttgctgtcgtaaatttgtgtagataatgccaagacattatatacatagagaataatttgataaggaaactgtctttgtagtaataaatttaaccctaatcatttgatttaactaatatgctcagtcttgattatactctttaattgctgttagtgataatcagtttttgattgtttcaaaaatattttatgtgtagaaaagctgcctttggttctgagataacatttaccctcccataccttacttttaaaacttctcaagaatgcagacctataaccaagaaaattttttacattcatcaaaaatagttctttaatagaatcagtattaataaagcttttactaattggtttatcattctttatatttgaagcagtagccaatcttgtatatagttctgtgacaccgtggaatgacattaagtgaactgcagttctaggaattgttccttgcatgcatattgattatttatttcctagaagatgaaaatgttaacttggcaaatgtagggggcacagatttctcttacctgtcctcttttgtctcaggaaatgtttgatgctactctgaaagatcgagaactgagctttcagtcggctccaggtactaccatgtttctgcattggctagtgggaatggtatatgtcttctactttgcctccttcattctactactgagagaggtaagtccacagggaaatgctgatgctgtacatttataaaaaggacttttgctttcaccaccagtcatgtctcaaaggctatgatgatttcctacctaaatcatattctctactattttattctaagagggaataacttataggggactttgacttaattactttaaactgtttcagttgtttgtctccataattggcaagttttaatatttctgtctgagtttgaaagacgattcaactgaggaaaaagataagagtactcattttgtcacacttcgtatatactttagccatcctctaatacagactcttggaattttgtatgatgtgagtgtgtctcagacttcaaggaactgtactgctggaaataaccaaaaggatatggttttgcaggatcagacatgtaaaatcattttgatttaggcgccttaagtatagaattacaatgagggtcctttatgattccagttcactggcctgatggattacctttatttatttat

SEQ ID NO: 114388 - DNA, 1045 bp, Homo sapiens
aagtttgggcagattagatgcgttacacagagggtaactcagtgagtttggaccacatagaactagtacccagactcctcctttaccccatcacctgcagcctcttgggtgatgattttcatttacagggggaaggcaaatcagaccgtctatttagtacatttataaattgcaacataacccttttacgatagtaatggttgtatttatttttcgtctcagaggtctagatttcttgacacattggacccaatgaatgttttttttttcccccgcccctagtgaatgatgatgtcaaaggacatcatcagacacagggtagttttcataaagattctggtttaggaacttactttcctaagaataccatgtacattttctggggcccactttagatgccagaataattctaagtgcttatctttctgttaatgttttagctcatatatagaatttgaagacattggtgaatattcatagtatttaaaatatatttgcaggtacttcgacctggtgtcctgtggtttctaaggaatttgaatgatccagatttcaatccagtacaggaaatgatccatttgccaatatataggcatctccgaagatttattttgtcagtggtaagaagatgtttccattgttttttttttttgaattaattgtgctaacctatagttttgtttaggtttttttttccagttctcaagcaggctgatagagtatattgaataatatatttatctaagcctgtggtattcagttgtcaagtagctgtgttattggttactttgttaaaataaatatgtaaaaagatatttactaaaaggaagatacttccttgttccatagtagtataattcaggggtccctagcccccatgttttggctgggtactggtgcatgtcccgttaggaatggccgcacagcaggagatgggcagcggtcaagcaagcattaccacctgagctccacctcctgtcagatcagccttggcgttagattctcatgggagcgggaaccctattgggaactgcgagtgcgaggg

SEQ ID NO: 114389 - DNA, 1035 bp, Homo sapiens
tgacatagtgattcgcccacctcagcctcccaaagtgctgggattacctcacccagccgtaaatctaagtttttctaaaataaaattcttaaagtaacattatgtcctttgaaagcttttgtagccattaacatggggcaagtcttagctggttacaagtgatttattaagttgcaggcatttctgcttcctcattttaagtttccagctcattccttaggtagcaagtggtgattatcctttgtggcttccgttttagcatttgtgtcctagatgggaggtccttacaggaagaggggcaggcatcttaggaaaacatttttatacaaaatgactcaaagataatgtgtagagtgggaaccgcttgggctttgagtagacacaggcctggactgcatattgcttgagtgtgctcagaagtctgcctgtcttgcacaggagtgattgactcttatagtggtgtcataccctgtttccttctgcagattgtctttggctccattgtcctcctgatgctttggcttcctatacgtataattaagagtgtgctgcctaattttcttccatacaatgtcatgctctacaggtaagttttaaaaatttagaatagctttactaatttatctctattagggatttgatgttcagattacattaaacatttaaaacatttcttatagttactggaaatcatctgacaattaaattttgctttattttacctttatttttattattttttaaattaaatttaatgtttaaaaaattttctggaccttttccactttgcataaattttgccttattttagatcagataaacattagtacttacattttgtaaaggaagatgtttattttttctgcgcataaagtatgcatttgcacaccattgaaatgttttaccatacctaatgagagtgtattagcatcatctttattttgaaaagcacattataaagaataaagccagagttgcacatttaattattaaaaatagggtacaaggcttgtagatggaacatcttttttgctt

SEQ ID NO: 114390 - DNA, 1029 bp, Homo sapiens
cagggtctgactatattgcccaggctggtcttgaattcctggcctcaagcaatccttccactttggtcgcccaaagtgctgggattataggtgtgagccactgcgcccagcctcttatttggatcttaatgctttgcataggaacatgattgttcaaaaataaaaggtttactctacacatagtaaaatctcaaatttgtattttattaaattagaattggaaaatacttatatcctgattatttaaagtggcagaaaaaatgccagtaagggtatagaaagtgggcaggatggggttacaatttaggaatagtgactggtaaagacctgagggggtgacagttgaggaaagccctgaaggagttgagagagtgagccacgtggatccctgaaggcagaatattcttgcagaaagtaggtgcagtggcacccaggtctgtttgaggatctgcagggaggcaagtttgtctgtagtaggaggaggaaggcaaagaattggccctgaagtcagaaaggtcatggagagccacctcctagagagtcttacacgacataagcactttggcttttgcttgagtgaattgaggagctcttggaaagctttgagcaaaggagtgatctaacttaggtttaaagaggatcattctgactgctgtgatgagaggaaactgggttggagtggctaggtcagaaacaggaagccagctgggaggataatgcaatgatcctggtgagaggtgagggtggcagagatgaaggggaggtagcagtggaggccttgagaaatttttaggatattgttaaggtacagtcaaaaggattctctagctgtttggatgtgaggtgtcaaaggaaggagtgaccttttgtgtaacatgctactaatatagcaagtgaggagagaaccaagacctacccatcagtttagcaaaatgaaagtctttggtgacccttatcagaaacaatttggtggagtttgtggggaaagcctcactgagttggagagagaatgaaaggagaggtaataaa

SEQ ID NO: 114391 - DNA, 1100 bp, Homo sapiens
gttttctgtcttgatgaatgagccaattggaagatagttactctaaattatttgtaatgtttctacatattaaaagtattgacatcacaaataagagaagaaattccccacttttgtcctattatttgcataacagtttcatttggtgataaaaacaatgaaaacattaattccctcaaaagcttttttagacctaaaagaataagtaattggcatgacaaatcagagtgtatgtcccagtagagctcgcctccattgaacttaccttgttttggttgtgatttcatcaaattgtgtactctttagacattgtgatttttgtcttttgtttttttgatgaagacattgatatatcgaatgtgatatctttttcctaatgtgaaaatactaacataacaacatgaagatgacaattctctttacctagccacatgtctcatttatcagcttttctattttcagtatttgctggccgttggttaatgtcgttttggacggggactgccaaaatccatgagctctacacagctgcttgtggtctctatgtttgctggctaaccataagggctgtgacggtgatggtggcatggatgcctcagggacgcagagtgatcttccagaaggttaaagagtggtctctcatggtatgtgtgtgtaatacaagactgatcttgtatgttaggaatagtgaatatttttccagtcatcttaaatttttttttttggcacatttatttccttactatattgtttcaagagagttgattttttgaattagaagaaatactctttcaagatagtggctttctggttcattcttgttcagagtcctacgttcagatatatgaggtttaaaagaaaaacaggttgggcacaatggcgtatgcctgtaatcccagtactatgggaagctaaggcaggaggattgcttgatcccaggagtttgagaccagcctgggcaacaaagcaagaccccatctgtattttaaaaagtatatgtatataatatatttttactggatcatttagtagcatgtttttctttatacacgtgcatgcacacacctacacatgcttatattacttacttaagggcctta

SEQ ID NO: 114392 - DNA, 1074 bp, Homo sapiens
tgcactatctggtatactagtcaggtggctaaatggctaccatatttgacagatacagggtatttctatcagtatggtaagttctattggaccatgttgttctttgagggagccagtttgatcagctttattaattactttaggattgtgcagagccctccctgtataccagtccacctcaaagttcacagatcagcctgtgtatgggtgggccaccgttggagcaggggccttggccagtcggtagcttttcttgggcaaacagaaacctagtcctaagaactggattgtgagaaaaaaacagcccagccagctgtgtgctttttatgtaagagacttgagtacctgcagattttctggatcctaaaaccagtccccgtggatactgagggatgactgtggttgctctgttaggcatcagtctcaaacctcaaaatggaaatagagtttggctcagaaagatcctctttaatgatgtgggctcctgtttcctaatagatcatgaagactttgatagttgcggtgctgttggctggagttgtccctctccttctggggctcctgtttgagctggtcattgtggctcccctgagggttcccttggatcagactcctcttttttatccatggcaggtaaatgtatgtcttttgctcatgttatttcattaaggatttgagatcagaaaataatcctagccaggcatggggcttacgcctataatctagcactttgggaggctgaggtgggaggactgcttgcacccaggagttcgagaccagcctgggcagcatggcaagacctagtctctataaaaaattggctcatgcgtctggtcccagctgcttgggaggcaaaggtgagaggatcacaggaggttgaggctgaagtgagccatgttcatgacactgcactgtagcctgggcaacagagtaagagcctctgtccaaaaaaaaaaaaaaaaaaaaagacaaaaggaaaaaaatataatttttaattattttaggtgattttaagcagctggtttagaaagactaattttttttttaattctaggaactcttataaaattgttt

SEQ ID NO: 114393 - DNA, 1050 bp, Homo sapiens
tagtaacagttccccagtagaaccacaaatgcttcaagctagaagctatctgtgagcctttagaatggtttcttaggccaaactttgctccacagtcttaatttgacataaatcagctcacttgaaaccaatgaaatagcctaaagatagtttgaaataaaatcttggcatttattttatttgctttttgagatatccattaatgaccagactttctctaactcttgggaaaacaatatagatttttaaaagatagaagaacaatttttgatggaaacattgaatttgagctgttgaagaaaaaaaattctctgggttttcagtacgttagtcttttgtaaaattgttgccaatcctatagaacttctattttgatgtgaaataatgtaagaaaattatacagcctctctgctgtgtttattgttaaaaaacaacagaaatatgttaaatggtttttaattccctaggactgggcacttggagtcctgcatgccaaaatcattgcagctataacattgatgggtcctcagtggtggttgaaaactgtaattgaacaggtaagcaaaatcagttttcagagaaagacattctggaattggttgtgtttatgtttggcagctataactcttatttcttatcttcctaccttgctgagttttctacattttttttgatgggcatatataacctttttttttttttttaaagacagcagtttagttttaccactgtaggggaggaaaataatttgttctcaacccttgttttttttagttaaaatggaaccctttaataaaagacaacagaaaaacaaaagtttattaaagtacatatttcatatatacatggagatacccagggaatgagtaatttcaaagaggtggctttgaattccaacgaatcttcaacaaagaataataaatttttagagaagtgacaagatgaaggaaaaggactttgagtctctaggggtggcaagtgaggggaagcaaaaaattggcagatgcggctccttagtaaagcttggcagtgttgattcctctggtgcca

SEQ ID NO: 114394 - DNA, 2009 bp, Homo sapiens
ggggacccctcttatccttaggccagtgccacataagtaagacataacagttctgcagcagtaaagtacacctctttttgctgtatgagaagtaaagacagtagttagccaagcatgctcaagaaaatctgttcaaaaagtgcctgtatttcaagattttgattcttaggagtaggggggttagggagccagcaaattgcagtgtgtttgtgtgtgtctctaaagtatgggctaattctgaagtccaccaggagtgtgatggattgggggcttctggcttcatatcccttcaggatcagagtgcaggccagtacactctagaatggccaggttagcctctggcccttgaaaaaggagcatggagatgggatttattcatactggaggctgtggaacatcattgatcttctaaataatttgttatcttattcattgttttctcttgcgtatgtgcgtgtgtgtctctgtaaatttaagaaaaatggttggaaatggttgagaaacactgggatgccttgcttcattgattaaaatgcatttgggttaactaggtgtctttgggaatggcagcatgcctttaaaaggttaagcatgtttgccattcaaattccgaggtgatggggttgagttatgctacattcagtcacagctaagagaggtttaagtgctgctggtgaggcaagaggagaagaaaataacagccttctaagccttgtttctgtctgcactccatctaaattttctgttcccagggttttcccatttccatccattctttcctctgcattactcttgtagaattttctggataagatgatggaaatattctagtaattcttggacttgctttttttatattcactatagaattctttcatactaaatttttaaataccttttgatttgttaaaatttgatttatgcaagcttttcagaaacgcttcctgcttcagtgttttctcatcatactcagataaaatgaatgcaatattgtataataacacaatattacatattacgtatctctttcataagatgtatgaagttacttcaagtaatgtggtcttgaatgaataccactgaatgtcatctggtattgtatagtgcaagtagagtataaattattctagattagtgtcttatttcatcacttagcagagctaactgcagagcgttagtgggtaaatacatttcttcagaaactcgtgggcactatgcttatgttgatataccagaatttgccttgactttagaagaagtaaccagtttgactatttttgggttggcagattcagttgtgtggagattgctgtattaacttggaggaatttgtcttgtatctttgttctaattgctttttgtaatgtttcaggtttacgcaaatggcatccggaacattgaccttcactatattgttcgtaaactggcagctcccgtgatctctgtgctgttgctttccctgtgtgtaccttatgtcatagcttctggtgttgttcctttactaggtacgtaatgctggttgtggagccttgaaggagcacttttattaacattggacattctctttacccctagtaaaaaggatgtctcactccatatgctttatttgtaaatgtgaatccagctaagacaatgatttcaaaataccacttttcttagatttgactattctgggtaagattagaggatcataaagctctttgatacagttcttttctctaccagaagataaaacttgaaatttacatgctgtacaaaataggcaggatcagatttccttcaggttgtcttcttctgactagaagtgctgtgatcatataaaattaagtaacagtgttgttgtatttaagttttaaagaaatattctttggcataaaagatccaaagaggagatgctaatgggcaacacgtttatactgaaatacactgtcttgttgattgtgtagtgaagactcctcatagctccttaaacccaacatattttcaaaattataagcagagacttttcc

SEQ ID NO: 114395 - DNA, 1060 bp, Homo sapiens
ctcactctgttgtccaggttggagtgcagtggcttgattgatctcggctccctgcaacctccacctctcaggttcaagcgattctcccaccccagcctcctgagtagctgggactacaggtgcaacgccaccacacctggctaatttttgtattttttggtagagacagggttttaccatgttggccaggctgctctagaactcctgacctcaagtgatccgcccgccttggcctcccaaagtgctgggattacaggcgcgagctactatgcctggcctccttgttttacaaatgagaaagttgggggtcagaaagggctcatgacctacacagattgtagaaagttaacagacctggggcttagaaagcttgtctgccccagtccattcttctaggggaaggacatgtttacgtttcatgtcactgttatttcacatacactgaaagtttttcttttttggttttctaggtgttactgcggaaatgcaaaacttagtccatcggcggatttatccatttttactgatggtcgtggtattgatggcaattttgtccttccaagtccgccagtttaagcgcctttatgaacatattaaaaatgacaagtaagtctggcgttctgttcgtctcttgtttaagtgttttcacttcttaatttatgtatctgatgtgacaaatcataggagggaaacatgctcagattctggatatacttggaggtgggattagcaaggtttgctgacagattgtgacatgtgaaggagagtggaatcaaggacttagttggcccaaacacagggaatatggagttgtcatttatggagctggaaaagactgggtgaaactgttttggagagggaggttttttttttttggtggtggtttttttttttttttttttgagacggagtctcgctctgttgccaggctggagtgcagtggtgcgaacttggctcactgcaacctccacctcccaggttcaagcgattctcctgcctcagcctcccaagtagctgggattacaggtgtgcaccaccatgctcagctaatttttgtatt

SEQ ID NO: 114396 - DNA, 1048 bp, Homo sapiens
gcttgtccccccttgcacaacaaattatagagttaccttatttattctgaggagtaagatttttgagaatgaaatttatagtgttcaagacttctccaaagcatttactgacagtaaaaaatacaagtacacttaggcagtcagagtacaaaggactgtcaactgaaagaaggggaaggggtattttcaatgatgaaaatcaacttcttagcactcaactttttggcagaggagtaaatactgcaaacagaatgacaagcaagacgtgccctcagggaactttctacctgcttctttctttatgctggatgcctgcctttctgcaccctgcccttctcagcctttgccaggggtctagacgttcccattgacctcttctttctcatgctctatcttcttctgctttttcctgtagcccagtgtcctctttcctcttttcccatctgttcctttatgcagaaaggtgttgaactgtagacttaagtgagggcatgtcttgtcagctgttgtatatgtactctttagcacagggtttggtctgtgggaggtgctaagagtgagtgagtgtgtgtgtgtgtgtgtgtgtgtgagagtgtatgtgtgtgtgtggtgggcttgagtatgagagagtgagtggtggtggaagagagggagttgggttcagagtctcctttctctgccactgaattactctttggacttgtacaatttaacttggtttctgtatgctttttatttacttactttgtcattgccataatgctgaccatatttttagtgtatcttgctatttagtcattactgtgtgccaggtagtgctgtgtatattttagtagatattgctcagccttcactgtttaaaatatttacaaaattctcaaagttttaaaatcagtggttggttggggaacagtggggtaaggaatggctaacttcaagaaaagaaggtaagacaaaagaaaaggaataaaacagtgacattatggataaagatgcagtaagattagcgtacttttaaaaaagtgacatattaagctactggacataa

SEQ ID NO: 114397 - DNA, 2922 bp, Homo sapiens
atgttggccaggctggtctgaaactcctgacctcaggtgatccactcgcctcggcctccctacgtgctgggattacaggcgtgagccaccacgcccagccccttcctagctttctgatggtcatgtttttagtctgtctccttagatctgcccactaagttgttttataaaatctgaaccttaacagataaatccactgcataagtttactgtatccctcctggcctccacaggtctgagtttctgagaccccctaaaccactgactgaagcatgtcctccattgcacagcattggaggccttccagcctgtgctgcttctgcagcttcctacaaacccatacctaggtagatgtgtcagcctttacaggtgttcactcgggactccctttgacttgcccaaccattgacgagttttaagtaggagttagatttaaaaagacatatgaatgttttactctgtacattcatagaagagagtaaccaccttgtttttgcaacctaggtaccttgtgggtcaacgactcgtgaactacgaacggaaatctggcaaacaaggctcatctccaccacctccacagtcatcccaagaataaagtagttgtctcaacaacttgaccttcccctttacatgtccttttttgtggacttctctctttggagatttttcccagtgatctctcagcgttgtttttaagttaaatgtatttgacttgtgttctcagcattcagagagcagcggtgtaagattctgctgttctccctggatcttctgacattactgctgtctgagatttgtatatgtgtaaatacaagttccttgataccctaaaaccttggattaaacagaatgtgcattgtacatctttaaacaaaatgtatattaatttattaaatctagttgtcactttattttggacctgctgtgatctcgacaggaaacgtgccacagagcagtagtgcgcaggcaagacttttcagtgacgccttgtggaacgcagttcatgatgtcctagcagctctcactaagggaactgtacattctttctttcttggctattcagaccttaccaagaacgttaaaggaaacaagtagaaatcagcagtggagtgtctgtggtaagaaaacatgaactttatgcttcactgttagttgtttgtggaagttattttgtataacaccaaagctgttgtacatttcctactgcctgatttttttcatgtgtctgtgtttgtaatattgtatagtatcttgtgctaggtgaggaaattatttttaattttgataatttaatattcctagtgtgatcagcattgggagttgggtttcagtggggcatgtctatacttagagaaaaaaagtccaaatgaagattttcatgagtcagcccccccgcccgcccccaccccacacccacatcctctcttttccacacacaactatctgtttattttttgtagcagtggccgaaagtcctgcaaggtcataaatctttcagagtgacatcaccaactgtactgcatcttactggatttaggacttctgagatgcttgtgaagtatagatgtggttgtggtcttagattgacagcattagagaagactggttagaacatctggtctcgctggttagtgcctcgttggctgaggactaggtgtgcatttctcctagcttttcatcaggaaatcccaaagtttccaaagctttttgtttacagaataaaacttcaaataaaaccaattcattatttgtccagaaggaagcttggctgagctggccttttaacataggaatgtatttcgttggaaacattctgaaaaatctcagagaactgaacccttacaaactttgttttccctcataaccaaagcttcaggttagaagtttagaaaaatagaatggttgggtacatgatctaaatgtttaatgctaaaggtatatcgtaagggtagtgtttgtttttgaacgataatttagaagttctcatagaaagcgtataacataggtcttcagaaactataaaagaattttcatatagtattaaaatccatagactaaaatctgagaattttttaacatatgcaagtcagccaaacataagctaccaaaataaagagcaatgtgttctggctgttttatacttcaacaattttttccctaagtggtaagcaattactttaaaacatatttttaaaaacatcggtatcgggagctgcggtggctccggccggttgtcctggcacacaaggaggcgaggctatgcgttcgaggccaacctaggcaaaattggaaaaaaaaaaaaaaatcagtatcagaaataatgcttgacataggattcagtgttatactctttggcactttagagcagccttttctctcatttgaaataaggtctttgttagccctacctttactcagaaatttagtcctactataaaaaattaggattttaaaatataatgctgcctgtcatagtgtatttctaaattgctctctttgggagaaaaacattattattgaattgagcatataactatataactatataactatatatatatatatatatatatatatatatatatatatatatatatatatatatatatttttttttttttttttttttttttttttttgcccccgagacagagtcttactctgttgcccaggctggagtgcagtggcacgatcctggttcactgcaccctctgcctcccaggttcaagcgattctcctgcctcagcctcccaagtagctggtactacaggtgcgtgccaccacacctggcttattttagttattttagtagagatagggtttcaccatgttggccaggctggtctcggaactcctgactgcaggtgatccgtcctccttgggctcccaaagtgctgggattataggtgtgagcccccacgc

SEQ ID NO: 114398 - DNA, 1853 bp, Homo sapiens
gtattttcatagggaaagcattttccagcataatatttgcttgggtagcatccgggttttagtatttaaccaagagccttttaaatattgaaaacccatagttcagaaaatgttagtattgctgcccttcttcacataaatttttttttaaattatactattattttgcttaattttatattgggttaaaacaaccttcaagaaggttaactaggaaagaagacctttttgttttatttttactatttatatatagaagacaaatcagcatttggtgatagttttacatgaccagttatcaaacggtcatagtatgaagtgtgcagttgttcattattagtaaattatgtttgatttttaaactatttagtactaatagttgagatgaaaactgaagaaaaatgccaatgtgacgtttgtgtatagctagccttaaaaaacttcccatgtttttaggtgacttttttccccctcttagtactctggagaaacaatgaagatgggccatctcaattccagatgtaaacaaaaagtaatttttatttcaacatttaatgtaactgctattattgtggattcttgtcttgtgtattttctttcccttattcaagtaatatagaataactttccttaaaatgatttgatccaagatacgtcatttctgtattggcaaaatgccactattaaagtgtaattcttgaatttaggttgaattgatgactttttaaaacaaaacaaacactggacagttctacattgtattgcgtttgcgaatgtgcgtgaacacacgcacacgtgcaggagaatgtagtgccataagaacactggcgctttttaaaactttccaagctagctacttattttcattttcagggttgagtactctaagctctctacttactgtgagaagttttctacattgtaaaattaaaagattatatttaaaatacttctttaggatgttattcagccatcaaaaaaaaacccaactaaaatgtcttaccagtaaagtattattaaaagcctcatttgtggagattcgctgacttccttggttaagctgtcttgtatttacttaatttgtcccctcaaccaggtgttttcttttcagcctgttactgtcctgtgccatttttaaaaatagccatcatgagtaagggcttctttaaaataatccctgacaatatctttggcattaatacgacataaagacaagacagtatatgtatgttttcattcctgttttgtacgagtgcctcattttgtagtcatgaaagtaacatagtaccttaaataaaaatgtaatgactaatctaaggtctaggaataactattgtagaagctaagtagaacacttagtttggggtgtcaattttctatcaacgcaaacaccttagggtacccagaccaattttatgtatatatattctgaaatgctccctttttaatgtggtcatttgttgccttctaagttgagaggacaaaactgaataaagtgaatgttaattgtagtctagtttttttgtttgtttttgtgttattgcaagattgctttaagattgcagaaatatgcattattagccagcatagataatccagatgttataataggaaggaaaaacaactccagttaaatgtgactgtggcgactcccttttatgtatacatttaaatgcatagttgcagaggacacatccctccccttctgtctccctaacttgaactgtagaccgtcctcactgggaagagtaaggccccacattttgtgcaatagcaagctactgcccacttctgcatgtctgctacgagatcagaaagtcagtttcactaaggttgtcttttagctgaatact

SEQ ID NO: 114399 - DNA, 1056 bp, Homo sapiens
tgactgggtctgagctggatcccaagattctgcatttccaaggctctcccaggggatgctgatgctgcgggtccttggaccacactcggaggagccactcacactggaggacacactcaacataaggccacactcgctggcatgcctggaggatggggaggggagggcttccatacggctcccacctggaccccactgcccccgcctcaccgacccaccccaagcacacgcagtctcaattccaatgtgtgcatctgttcagcaaccaaaataggattctccaggctgtgcctcccaggggatcctaggaatttcctggaacagagatggggttttcaggatggccctggtctccagtcccctcctgacaatcctactccgggaggttcatctggatccccctccagcctcctggaagtctggctgcgcatcaattgcctggcacatagatgacagccattaaatgcttttcgaattaatgaaaaaaatctatcagtctatatttgtgtatttcgtagctccaggggacaatcaaaagaaaataaaatcccccagctgaaataactacattggtttatggcctatttattcatttatctgcccttgtggaagctaagaagttcctatttttagcacctcccatgctcagacatgggttattttttgtcttcaaactctcctaaagagttgacatgttggctgggcacagtggctcatgcctgtaatcccagcactttgggaggtcgaggcaggcggatcacctgaggttgggggttcaagaccatcctgaccaacatggagaaaccccgtctctgctaaaaagacaaaattagccaggcgtggtggcgcatgcctgtaatctcagctacttgggaggctgaggcaggaaaattgcttgaattcaggaggcagaggttgcgtgagccgagatcgtgccattgcactccagcctggacaacaagagaaactccgtctcagaaaaaaaaaagagttgacatgtcccagcctattaccgcaaagccgtgccgtgcatttagtgagaggagacagtaggga

SEQ ID NO: 114400 - DNA, 1038 bp, Homo sapiens
ccggaaagcgtcccggagacggcgaccctcctgcgcgccgcctgcgccaacaacgtggggctgctgcggacgctggtgcggcgcggggtgagcgtcgaggaggcgcaggagactgaccgcaacggcagggtaagcgggcgtccccgcaggatttgagccccctcactgcccccactcccctcctccccaccacatccccgcgcctcccagctcctggctccggaccggtccctcggtcactcagccgccgcccagagcgccttttccccgctgtttgggagcgcggtgccctgggtggcttccccgtctcaggctgggggacgcggtgcggggagggagcagtcgaggtgtcagcgcggcagaaacgccagtccggcgtcctcaccgcatccccttctcgtttaccggtccccgtggacctcctgactgaattcgcgctggctgcccgtgctgcaatccaggatgggcttcttgcggcccggtcccctcctgactattacctttccccaggtccctggcaggggaccattcctcctcccctgcaggagacagcccctcctgcccagcgccccatttggcccctgggcccctcgcgccgcccttgtcctaacacgctggggcgcagatcggctcctccagccgcaatgatttggaagcaacagtttcttccctcgccgggacagcttggtcccctaccccacctccgctgagctttgtggcccgcgccgcgaccagccaacgtgatctctgactggtctgtccgcaggtcaccttcgcgagccaatgccagccggggctccccagagtcagggcatagggagagccccagagccgcgggcatccacccgggtagggcaggaggcgtggaggcaggcacaggctatcctttcgttatgaccagattcagagaaaacgagatgtttagaaaagaaaagaaaagaaaggaaaagaaaaaaagttggcttaagaagacctgagaaggactggctggtggaacaccttccaccaagcaaagcacttcaagggaaaactgcagag

SEQ ID NO: 114401 - DNA, 1117 bp, Homo sapiens
tggggcctccccagccatgtggaactgtgagtcaattaaacctcttttcttataaattacccagtcccaggcagttctttatttctttacagcagtatgaaaacagactaatacagtatgtatgtccataaaagaattggaagaggtttttttttttttttttttgagacggagtctcgctctgttgcccaggctggagtgcagtggcgtgatctcagctcactgcaacccccgcctccgaggtttaagtgattctcctgcctcagcttcccgagtagttgggactacaggtgtgtgccactacaccgagctaattttttgtatttttagtaaagacggggtttcaccgtgttagccaggatggtctccatttcctgacctcgttatctgcccacctcggcctcccaaagtgctgggattacaggtgtgagccaccgcgcccagctggaagagattatttttaaatgatgtccctgaatttaaaggacagttgaaggtggattttacttatttctactaagtcagagatacagaaattgaggtagaagtgaaatcccatgtcacagctggctcagtggcaactgattggattggagtggtgggatttgagagcaatttcaaagaaacagagaaataacgacgtatgcttccagaggcatatttatgtcaggtctgatgaaactcagatcagaagtaggcatctgatcagatgggaatgaagaatgaagcatttctctctggcctctgtttctgggatgcttacctggcccttgaattaggacccacacttctggcaagggacattccagctgggagaggcatggacagggaggcccaggaagaagcaggtgtaaccacgtcagcctgtgctcagcagaggtgcccagtgaagggtgttaagtgcattcatagtggcacactttttctgagacaaggaaagacagaagtcacattccagtgtccacttggggaacaggcccagacggggctgcctgacactaacgctgcggcatgggcagtaggtgaagccatgtgttgtggggatggtaagtttcagactcagaccacaccggaactgcctcctggctccaccacgggagcacctatggcacctccc

SEQ ID NO: 114402 - DNA, 1063 bp, Homo sapiens
tgcaaatagagttgaaggagctgggctgagtagttgggatttcactccccgggtgattggtgggacccagcagggccagtcctgggcttttcctatggcaagtaactcaagagctgcaggagcagatgttgttaagcagagaggaaacaccaaacatggatccctatctctagcgagtgtgccctgtgactgtggagggtggaggggagtcacgccagagggaggtgctgtgttggggccagaccggagggttacatcctgagcaggagaggagggaggaggccaggtggaggagcggcctgggggacataggtggttgtggtgctagattggcagtggatttttttctgaaggctgccgtaacaaatgaccacaaagtaggtggcttaaacatcagaaattgattctctcacaattctggggggcagatgtctgaagtccaggtgacagcagggccacgctccctctggcagagctgggaattctgcggtctgtgacagcatcgctccaatctctctctgtcctcatctgtcctctgcacatctgtgtctcaaatctccaggatgatctcatcttaggatccttaattatgatctataaagatgctatttcccaacagagtctcattcacagcgaccggggttaggatgtggacatgtcttttctgggcgatacatttcaacctactacaggcagttacctgaaggagtaactgaaggagaggggttcagaatcctccagtggggcctgatgggcagaggagagacttggacacccttaagagacgaaatgaatcttcagaggttcagccattgcttgcaatgtcatcttctgggctcatccctgcactccaaccctggacattttctctggtcttttctagtggccaccatctggatgattacgactctggaaatctctgtccatcatccatttttttgcctcctctgtgaacgagcaggtgtgatggcctgaaaacagagagggagaaggctgagtgtaccagggcaggggaagcgcttcctggaattacgtgtcccaggacaaaagtgaaactgccttc

SEQ ID NO: 114403 - DNA, 1048 bp, Homo sapiens
tttgttcttcttttgttgctcagtagtattcccaagtttgattatagcagactttgcttatctagtctcttgatgaatatttgggttgtttgcaattttgggatattatggataaagctgtcctgaacattcttgtatacatcttcatgtggatatagactttaatttattttgagagagtatccgtgaatggagttgctggctcataaggtagacatgtgttaaactttaatagaaactgccagtttcccagtgtggttcttccattttacactcccacctgctgggaacatgagagttccacacccttgccaacatttggtattgtcagtctttttaattttaaccattctggtgggtgtatggcggtatctcattgtgggtttaatttgcatttccctgtgactaacgatatcgagccctttcacatttggaaaaggttataatttaaattttgtacattaaaaaaaaatcaagttagaagacattaatgaacacctgcagaacagacatcccaaagcccagaatgtcatgtggaagccaccgccctgacagctatgagtcagacagacagatgtcagtttcagttacaccttaaatcacaaatgagttgccaactcagtttaaaaagaatagggttggggggcatatatttaaagaatattttgaaaatagaagaaaatgtggcaaggctgtctcctcccacaccagctcccacctgagagccagatagttagcaggaaaatctgatcacgctgctttctaagaccctgcgtggttctccaccaactttggatgcacttcagcctcctcagccctcgtggaagcccgtcatgacccagaattccccactcgtcagctccacgcctttgcacatgcttgcctcccgcctgggacacggtccctccaccatccctggcgctgcggacctcccaccattgcttggctaacgaggctcaacctggctgggtgccaactcctcccagcctgggcaagttgccagtcatctgtgctcccaccatcctctgggccgagcctggcattctca

SEQ ID NO: 114404 - DNA, 1131 bp, Homo sapiens
agtctgttaggaggcttggggccaggggtggggggtgggggcagttttgcctttgccccaggctctgcctgggagggaagagtccttgttgccgccacccacttctgtttgtgttttgcgttttgcaggggcggatgtccacgcgagggacccccgccgtgggatgtcgccgcaggagtgggccacttacacgggccgcgtggatgccgtccgtctcatgcagaggctgctggagcgcccctgcccggagcagttctgggagaagtaccggcccgagctgccgccgccccctgaagcggcgcggaagcccgcgggctccaagaactgcctgcagaggctcacagactgcgtgctgtccgtgctgacgccgcgctccgtgcggggcccggaggacgggggcgtcctggaccacatggtccggatgaccacgagcctctacagccccgccgtggccatcgtgtgccagaccgtgtgccctgagagccctccgagcgtggggaagaggcggctggcggtgcaggagatcctggcggcgcgggctgcacggggcccccaggcgcaggaggaggatgaggtggggggcgcggggcagcgcgggcggaccggacaggaggacgcggactcccgggagggctccccgagagccggcctccctcccgccctggggtcccggggccccgcagcgcccgccccgcggaaggccagcctcctgcccctgcagcgcctgcggcggagaagcgtgcggcccggtgtggtggtgccccgggtccgagtcagcaaggcgcccgcgcccaccttccagcccgagcggccggcgcggaagggcagcaccaaggacagcggccacctgcagatccccaagtggcggtacaaggaggccaaggaggagaagaggaaggcagaggaggccgaaaagaagcgccaggccgaggcgcagaaggagaggcgcactgcgccctggaagaagaggacgtgagggcccgtgtgcctggcgctggggccggggctggggccggggcggggccgcagggctgggcgcggagaaggaggcggccccgttgcgcatcgcaccacttccgctccatggaccacggggctgcgcgcatttccaggctgtttgtccaggctgct

SEQ ID NO: 114405 - DNA, 1083 bp, Homo sapiens
ttccctccacgcctctcggtgcatttggaacttgtttatgcgctggtataactcgagtcagctgcttatttctgtgcccttgcactcacaggttccttcattaacattttaaataagtggctaaaaaaactcctctggaggttgtttttgaaagagacaggaaaaagaaacacacagtacctggattgttttgacttattttcaagcgactcagctgaaagccggtgttgcatacacaatttcctcacgctgacccagcctgactaagacttgataaaaggcacagcccttggcagcaggcagtgccaatgtggacagtgtacactaagctgtgagtgtgtgcacgggcgagcacatgtatgtgtactcatacatccagatgaactaaagggacactgggctttgtgctggcaaaggttacgatgctgctgtagcttggctgtgggccccaggcagtgtcagatggaacctgctttgatggcgtgttgttcagtgtactcagtggggtctcacatggcccgaggacccactgtgagcactccgcccgctgtggcacagaacacggctggggtcatcacagcccaggtctttattgaaaggcggctcatatagaacccatttggccaggtctgggccatctctctgcctctgccctatcttggctgcctggaggggcccaggcccaagaggattctttacccctggaagagctccccaggcattcagcctatggcccttgacatttggctgcaggttaccgtcagaatcaacaccatatcctgaggaagccctggtatttccccaagtctgcctatgtattagacactctaatcaatgctaacacagttcagtttttgagggaactagttttgtcataatactacacccctctattgtttttaaataagaaaaaaaaaaaccccacgaaactttccatcaaagcaatggtccgtgttggcctgatgctttaagaagtttgaggaggtaggtatggaggcaccttaacaccagtttttgagcagaagttctagaagctgatttagaactacacagctatggatacacctgatgaaaaccgcaaaa

SEQ ID NO: 114406 - DNA, 1028 bp, Homo sapiens
acctaagcatcattcatattgtttctaaagggaaaaacatcttactgtgtcccaacaagtaagctccctattttgggagcacccctgctttgtaagatgtgtcctactgcccagagtgagtcattcctcacagagccctgctcctaggtgcttggtgataaggggaatcaacagaaacaggctgtttcccagcattcacttgcagatgactaaacccagaaattgtggagtagccttaggtaaggagacgaaagttgaaaacttaagacccagattcttcaggcatttgagactctggctgaggaggcaaggcatgccagatcgtttatgctcagggtaagggtgcacatctgtctgcatgttactgtcccttttgcaagggtttttttggtcatgagtgacatcgcactttattaaaaagacatgctttcttaacaagatgagctacctttgatgcttagtctttctctggtttaggcaagagtcctgcaaagccatccagctgttgttggcagctgccaggagttgccataaagaaggtagatggagtttttcctgttgaattcgttaattcaggctcgtgaatgtggtcattgataacaccccatccctcttttccttaccgcctctagctaattgtgcttatcatttaagcttcagctcatggctctatcaccattctcaagtttgccttgaaaagatctgaagaagtacctgttagcctgagctccctctaaagagggagaaaagccaatcttccaggtcagtctggcaaaagctggaggaagggcccatttgcttggggactccagatatcaacccatggccagcagatccagctcagccagattgtcgggtcacaaaaataaatccactatctctaatcgctcttttgcctcttttgcaagcctttgaggcgggcagggcatgagagttactcattcctaagaaatgagcaacaaacagttccagctaagcaccctggttcattcactgcctggccacgaccacaaacttgtgctaagctg

SEQ ID NO: 114407 - DNA, 1001 bp, Homo sapiens
catgtacacgtcctgaatagcaaacctaaaaacatttataatgcatacctcatacagtagaacttcagctatttgtgttaattatagtgaatggtagtcagatgtgctttttaaaaatccagattattaaatacaaagaaatatggtggtactttcatgatcaagccatggcacatgcttgtctattccagaggtgccaggtgaattcctcgtagaggagatgtgactgaaagcacaaaggaggattacttgtaatgaacgtatcaattatttgtagattgagggtcttttgattttaatattctttctactatcttgtttatgttgcctataacctttgacccaatgaacatgaacttcaaattagtgaaatccaacgaaataaggttttactctgtcagaaaaatcactcacccaacaacaggcacagctgtgctcctgtgctcctgcaccctagttagaggtgctgagaacatttcacagcatccagagccttatctgttgaccccaaacgcattcctatatgggcctgcagtgtaggagtccacctgcacaaccgcacaaggactttcccccattgcttacgatgacaaagaaaagtggaagtgtggaaactgttatcattaataacatggtttcagagtcgctgtgcttttcacactgtacgctatagcccgttggtgggtcatgaagtcagttgagtggatggagatcagcagggatgggaccatacagatcccatattacatgggattagtgcatcccaggatacaaggggcagaattgtttgtttagggagatatgtgcgtgtgtgtgtgtgtgtgtgtgtctgatatgtgtatatgtgtatgcctgtgtgcgtgtatgtgtctgcatgtgtgtgtgtatgtatgtctgtgcatgtgtgtatgtgcgtctgtgtgtatctgtgtgtgtatatgtgtgtgtctgtgtctgtgtgtctctatgtgtgtgtgtgcacttgtgcccactgcatcaca

SEQ ID NO: 114408 - DNA, 1060 bp, Homo sapiens
ccaagccaagcaggagcagcttcctgtggctcattggttttctgatggtggacacagctgccagccaccctcttcccaaggctggaccaccagagtggacgaagtaggcaaattcttgcacctgtgagtcttttgtactccaggtttctgttgtcattccagagaaacaaatactaacaatttctgggcagtagtttgcaacttaggcttccatactgaaatcacatggagacccttgagaattgccgcactagttgaacctcaggggtggacctggctgtctgtgtagctggggcaagaacttctgatttcagaatggttgaagcatttcctccctcggatcatcagccagatctagaattacaaggccatgcccttatgagtgactgggtgtccttatatgatacctctgctgccaaccctcctggggcctgcacaggggtctccttgcagacccctcctcccctgctcaacacctattttccttaaaggttcagatttccagttgggttcagggaccttgaaaggaatccatttctctcgactttgcaatacgcaaacaggcaccactaacacacctctgcgggagctcgtccacgtagaagaaagcactaagctctctacttatacagcctgtctccagatgatgtctcagtcagaagaggagagggtgtggaaggggaaagaggctgtggaaagaagctaaccttgattcctgtggattaggcccatgcttttatttcatttcattccagcagtcctgaatagtaggtggtattctccccagtttatgtacaaggaaacagaaccccaaagaggatatcagcttgcccatatcatgcaccgtgctaggtaacgtagcaggaagttcaacccagttctcatggagtgctcagcgggctaggcttccaaatggatagttgccaagagtaggcacccacatgaggaagtggtgcatgttcttggtaaccctgcctgtctgcttctaagtggccttccccattgagtattgtctataaaacctgatacagtatgagttacggagcggccacgtgaggga

SEQ ID NO: 114409 - DNA, 1042 bp, Homo sapiens
ttctcctgcctcagcctcccgagtagctgggtttacaggtgcctgccaccacacctggctgatttttgtatttttagtagagaccggattttgccatgttggccaggctggtcttgaactcctgacttcaggtgatccacccacctcagccttccaaagtgcccatatggagatttttaaggtcagaggtataaactgtacatactcactccctgggagaaattccttgctggactctggttttctttgaattgcagagtaaacagctaggctttgtgaattacagagtaagtagtttatttacccctgaggagggaagaggcagcttatttgtgctagtgtagcagtgagcttgggttctaagtttgaagacatcacttcacgcttcactggggctcagtttttctcctttatgaaattcgaggtttgggcctcggggcaagtcacagggtggggctgtgtttgctgcagtgagtctcacgtcccgcttcagcatcagggtaccagcactgttcatcccccaggtaaactcctctagtaacttcagggcaacccctttagacttacggggtgagctcttgcgggtggctgtcaccatctgtcatctgtctccaagaccatagttagaggaggggcccaatagcagcacccctcaaatgccagcagcatccctcaaatgccaacagcacccctcaaatgccaacagcacccctcaaatgccaacagcacccctcagatgccaacagcacccctcaaatgcgctttcctagatgttacagaggaccatgtgtgaaccttttctggcaggaagctctggtgttcttgtttagtctggcattgccagagagtaggcagctctgaagggtagatagtttttaaaaaaaaaaaaaaaaggcggcccactacactaaaggataatcatcaaggatagccaagagcacagttcataaatcaaaatcactgccttaaaaatgttgagaatgctttcattaagtgcttaaattggataacagacttgtgcctcaatgctcaatcagaaata

SEQ ID NO: 114410 - DNA, 1018 bp, Homo sapiens
tcagagtgcccttatgagagggaggtaggagggtcagagtccaggaaggagatatgatgatggaagccaaaatcagagggatgtaagatctcaagccaaggaatgcgatgcaggcagcccccaggaggttgacaagatgaggaaacacatcttccccgggatcctctggaaggagccagccttgccagcccatttcagactccagccctccaaacacaaacctataaatttgtgtttttcaagcccctgtgtggtgatttgttaaggcagcagttggaaataagagcaggattattccaaattaaagaaagtgttgggtcacttattgaattgcaaacgtgaagaatgatacatatttttaaattaaatacttgtcacttaaaatgcattttaaatttagttacaaagtgtagctggatcatccttgctatatcttgtatactctcacattggaatttggaaggaataagggaacaagtggatttaggtaagagaggagtaagaattaaagtgtcctgggaaggcgagagggaaaaatgagtccatccattgtagaaaggcaaagggataggaaagtgaagcagagagaagaaagcaacagagagagtgggagcttcataggaaaggaaaggtatattgtctattgctgcataacaaattactccacaatttagcagcttaaaacaaccaacatttatgtcacccactgtctaagtgtgagggagtacaagtaggagccacagatttgggtggtcctggctcagggtctgtcatgaggctgcagtcattcgaaggcttggttggggttggaaaatccacttccaaaatttcggctgaaagccctagttcgttgccatgctggtctctctataaggctgcctgaggatcctcatgatggcatgacaattggcttcccctcaaataacaatctgagagagggtttggagggagccacaaagcctttttaatgacatagtctcaagtcacagtcacttccaccatgtttcattggtcacaa

SEQ ID NO: 114411 - DNA, 1058 bp, Homo sapiens
cagggggaaaagccgagtaagaaggactccagagacaccaaaccatggtgattcagtcgtgtttttacttaccaatagatgggacagatgagaagcaggggatcccaggccaggtgggccactgctactagctgccatatgcatctattttttgcacattgtatacctctctaccctcctatctccactgcctgctccttttaactctcctttctcctccttttcctcctaaacctaagctgattctagcatcctgtagccatcaagaggcttgtcttggccttggagattttccctgcaggctaaagagattttagggctcctccaacaaaggcctctcctcccaaatgtcagggacgcatcagatgtcagcgtgacagttctgtgtgaggtgccaaatgagcacctctcctggctctagaggtcactgagtagagacttcagtagatatggctcccccaggaccaagttcaagggcccagctcttgatagaagagctaatctctctaggggcagtagagacctcactggtttgatgatcttttccatttagaagtttaacaggagaactaggagaggaaaggaagctacactgggggaagatggggcctaaggatgggaatagcccttaaagtttgtaggaggcagcaagaaaggaaaactggcatcttcttccccaactggctgtcaactcagcttctgagctggtgacttgccttgggctgctggagtacagtggggagatcacacagggattcagccagactttgagcaaggactgtattcctttatgcttaaaggtcccttcaaggaagatggacaagggcagggtcacaggggagagaagagactagtgatggagggatttagacgtgttcctgcaggagcatggcagaaggggtgaagcaaggtgtaggcatcaaagatgtagggccaaagatgcaaagatatggggtggcagagagcttcagccacctaactggcccctgctaaagcccaggagtcaccttggcagagatggcccacagacataggcagtggcctggtggcctctagcc

SEQ ID NO: 114412 - DNA, 1143 bp, Homo sapiens
gggcatggaagtctttttcagcttttgtaaggtgtttctgtgtgaccctgaaaaattcactgaacggattggtgcctgagcataagcttgtgaacagtaatagcaatgttgatgagtgagtgttttaaaagatttttagatgaccagatggaagccatgatgctgccagggagagaaaagaaaggagagcaggggcccatccagcccctccaaatgctttgggcctggtcagctctccattccctctttgggccatatgtcggctgcctccctggcctgtggacattgtgaagatgcagcatatgttggttccctgatgggcaggactttgcactactctgatatctgggattggttagaagaaatccattcagcctaaggtacgagtctcgcttcctgccaacacggcactcagggatgctacgctgaaaggatctgactttcagagggatctaagtttgactgagacaccagatcagttgaagagcattattctcccccaggagtacaatgaactgaaagcgctgcaccagctctattccccgatggaagagggcttggaggagtaataggagaatgatggcgatgttgaaatgcatgaggagagttacttagcatggagactgtcaggtgccttaccatctaaataagtgcagtattgcagagctataagtgaggagccagcagaaaatagtcattcgtttgcctggcaaggttcatgggacactgagaggcaggacatgctgtagaaagcccatcaaccatcaggctcctgttagggtgggtgataaggtttggctttgtgttcccacctgaatctcatctcgaattgtaaccccatattcctcatgtgtcttgggagaaacctagtgggaggtaattgaatcataagggtggtttctcccatgctgttctcattgataatgagtgagttctcaggagatctgatggttttataagcgtctggcatttctcctgctggcacttattctctctcctgctgccctatgaaggggtgccttctgccatgactgtacgtttcctgaggcctccccggcgatgcagaactggctcttaaacctcttttctttgtaaattacccagtcttggttatttcttcatagcagcatgagaatggactaa

SEQ ID NO: 114413 - DNA, 1033 bp, Homo sapiens
caaagaggtctaaacaccaggaaacaacattctgtccatttatcctctcagcatgagtctttgtctatttaaaatatatttgcctgcctgctatgtttcttctcattcctatggtctgttctactcctccttcctatctccatcacttcacagcagcaaatattagatatgaacacatcattcaaggaagggccatctcggatgtaatgaaacagactgatagattatttcactcaccatatgcagagctgcataggaaagtcataaatgagttggaaaaattaagtagtagttgcaatatctccattttaggacaatttctgagtggcttaaaacgtgtttatccctttaaaaaatattagtgaaaaagcacagcagatgaacagctctctgggtccacagtcttgatacagtgagctaaatccattccaggctgactttgagggttgttaacaacaaactgatggcctcaacaaagcggttcttttcagatcttttattcctgtctgaagagaaagaattcagcaaaatccaggtgctatttggacacattgcattatcttcttgactcatttgaagaagctctttttcaaatacaaacatgactcgagaacaacatagcaaaagctcttcctatatgtcattgccatttgctgcataaccaaccaccccaacccgtagtgtctaaaagaacagtgaatcttcacctctcatgattctctgtgtagactgggcttagctggacagttctgacttgggcagtctcatgagcatgcagtgagatgtcagtgggctgcatcatgtaatggtcccacagggctggatgtccaggatggcacaatctggtgcaggcaggtgaaactgctgtcaactgggagctcagcaggggcaattgacctagcatcttctctacatggtgccatctttttttttggcgtggtggctgggatctaaaagggtatatcccaggaataaacatcccaagagacccacatatacacacagagagggagaaagagagagattgatttta

SEQ ID NO: 114414 - DNA, 1025 bp, Homo sapiens
caacttaatgctatatgtcttctgagcagaacagtttaacactcagtcaaacgctcctagagtgtttggagtacttttgtattaagggaataaaagattcagcaaaacgctactgagtaatacaggagtatggtttgggggcaagtaaaaggcccgtctgcagtgtggagaggagctttgcagagggtgggaccatcctgcaaaagaagggcttgtgttgtgggacatcaccctcatggtttctcctgtgtgccccagaaacttgaaagaaatccctttaattgttttttcagctaggaaaaccaccagaaactttgagatgtacatcaagctttcactgattccctaagatttttgtttcctctgttctctcatgtacattattttttccagtcctatacacagattgtttgagacactaatgttcaataactctgaattttaatttcctgaatcttctaacatatgtaacttctttagaacatttatggcagtttttttgatttaatacaatttagcctgtgtttgttttgcttcgaacttgttgatatctttcttttgccaagataatatagttctaaaatatataatttatggcagtttttttgatttaataaaatttagcctgtctttgttttgctttgaacttgttgatctagttcttttgccaagataatataggtattggaaaagcttgctatttatttatttattttttaatgagacggggtcttactctgtcacccaggctggagtgcagtggcacaatcttggctcactgcaacctccgcctcccaggctcaagtgatcctcccatttcagcctcctgtgtaattgggaccacaggcacactccatcatgcctggctaattttttgtatttttagtacagacagggtttccccatgttgcctaggctggtcttgaactcctgagctcaggccaaccgcctgcctcgccctcccaaagtgctggtattataggcatgagccaccacacccagccaatgaatacacttttaacaaa

SEQ ID NO: 114415 - DNA, 1015 bp, Homo sapiens
ataggtttatgatacagttagtgtctgatacctgacagcctgtataataattacacccatgcaagcgctcacacaacacaaagaaagactgatttacattacaagtaattcaattagaattttgttagcataattgacatggtgttaaaattagttagcagttgtttttcccaagtcgtatttaaaaaaaaaaaatacttgaaggcacactagaaaacattttagaagcagtttctgcacaaaaagaagaacatgaatgtagatgattgtcagtacatcagtgtcatttaatgtttgtgttacttttggaatcctaatctcataggactttaaatatatagcaggcgtctcccatgccacctcaccttaaaatattggcatgttttatgcaaaaacaaataacctgccgcaatgcatctgcctacagtagtttaataacttagaatgcattgaattatataagtgtcatacctgaatgatgtctgacatggtccagaaattttcccctaattcataatagaaaaacacattgtaaattataatacacataagaaaataaattatttgctgttacaaaataaaaataaaaaaactacagctgaggaaaattggtaattcgcatttattgtatcaactgactgatgcggagtttttattttggtgtagcatttttgtgtagttttttggaactggtccagtgattcaaattataattgaggaaaatcaacttatcttcttatgctagaaaaggaggcatattcactttctagaaaaacgaaatgtactctaaatgcagctctcagaattgtctaagcctgtcccctgcacttcttgcatgttaataaaacttttcaaatcatccctttatagtactgtaaaggtcgtatatggactgttattcctgcatattgagaattaagcaggacactaccttgaacacttctaaggatgccattcatatatgtgtttgcccatgaactgctttatgtgttttaaacattggcacctttggcat

SEQ ID NO: 114416 - DNA, 1008 bp, Homo sapiens
gacctacatctacattgttagcacatattgaatccatactgcagcacatgttggcacgaacatttttatttctttacaaaaaagaaaaaggaaaaagaaagagtatatttatgattttttttcagaggatgaatggcagtaccagtatctgtgtaggagttgggaagaatgaaggaaattgtctaagtagttctggcatccctgatcgattgcttattggatgtgtggtctttgttatatttttcatttccggcatctaccttatttttcttattgtagaccagtatctcttctctgttagagagttttagtattattcagtgagaagtgtttaagcaaatactgcattttgaaataataatttgaagtcatggcagttccacttcatcattagacttgaaaccagagaagccatattgactttctgtgactctaagtcataggatacaaaaggattggttctgaggggttgggattttcttgttgatggttggctcagtcatttggattgtggcaaagctttggtcttttctcttttgactagtcatcctatatgccaacagaaaacccacagaaatgtcttatccaattttctttgtaaagccagcagtcactgagatcatttttaaacctgtaaaattccctttacagccccatttgctaagaagattttatttgtaattgtatgttattttccataaaatgtgaatctcttaaggattgttatcatagctaatatatttgtaggtactacaccagctattgagttctatatactgttgtttttaaacatgaaagtcaaatataactcttaaattatatgaaagaagtgtcagtcatgttggtagtgataagtcacaaaagcattctcattttgaaaatttgatgatgaaacaaatggaaaaaaacacagcaagactgatatacccagatatactaagggtattataactgtcttgtctatcaaataataaaagtcatggttaagatatattactgacataatgt

SEQ ID NO: 114417 - DNA, 1023 bp, Homo sapiens
tagagacagatctgggacagaattcacatattcttatttcaagttctgtgggcaaaagtgacacaagaaacagcaggaaaattactactttagataccatttctgtttacctcaaactattgaacatcaacaccctgaggccacctttcatgtgtagaatttgaggctgagccatgttgtcatgattcttcatagtagttgtacatggaaatgagagccaaggattaaacgtgtcaacatagaagcaggggatgtctgaggtcttgtgtcccttcattctccagtggtcccttctgcccacctctctgggtccctagaatctatacctccctccctgccataggactgaaccctttcctcgctcccccaacaccaaccccacagccaagtggtcagtagtcaggtaggttctgagctgtttaagcatccattcaggtcacctgtagctgtggtgaagaagagatggctctgaggttccatgacaggatatgtggtagttcttatacagcaaatgcctcaggcttagtcctagatcagcttgaaagcccttcccagttttggggggctctctgaacctataggagcagcacccagcacagaacatatctagggaaattccaataccctttagtcctcctgcatcatgaaatcttccttaacctgtaagccaagtacccatgtttcagctgtgagtcttcaagctcattttcagaaacgcattgtatatgaaaaattgccagtgcctgagctctctaggccccagttttgccctgtgaagagaagaaataggaagagcaaaaccctattataaaattgagacgttaatgctggatgatgtaggaattgttgcggtaattggtcatgaaatgctttatagacacagggattatgattgcatgacattatgtctgtcatggcaggggaaaccatcaggaaagttggtctggtctgtggatctacttccccttttctctttggctcatccatgttttgattgcactttgccatcctgcagggtcttgg

SEQ ID NO: 114418 - DNA, 1026 bp, Homo sapiens
cagcaaagttatgggaacaaattctgtgttttgtacgctgccagagactgcatagtattcaagttattagtgaaagcagcaaagctgtactaagttagtataagaaaatctaacatttatgaaatatgatgaaataggagggcatttttttctttccaaaaatagatttataataagatcattttatattatcagatggcctgttacactggaattatttggtttcagtgcaattttatctttgaaatcatatgaattaacaatgttccttccaaacgtaagtctgaaatacgactcaatctatatgagaaatgtgtctttatatctttgcatttataacaacatgatataagatgtcaaattaattacaacaaagtaatgatcatttgcaaatgaaattcagttgataggcttgattcagaatacataggaaaatattttggggccctttaaatagcaaatttaagttttgaattaacataggattaggaaggagactttggagttttgatttaggtcaaaagcaaaaatcaagaataaaacaagtcaatctcaggaaacagagttcagaaggaaggatgtgaatgtgcccagttcctcatggatactcctgaagtagcatttgaggcacacctttcttaatgtgccttctttgagataagttttattatgatgaggtattcttcagatctaagatgtaatatttgcacctctcaacaatttacctagtacacatttctgagataatgttaaccaaagttatgttagtttttgtatatctcaaagtgtttatatgctgatatcaccttttccccttggagtttcatgataacaggtatcaagccaaacattttaagaggttcaaagtccagaaaatagctatttcaaagccatcaactatcatagagtacaggctgactacctgcaaagccatgttgcctagcgatgctgacctatcatcatgggacatacccctaaaatcaggatgtccacaaaggaacaacagcagtgtagatttgcaaggga

SEQ ID NO: 114419 - DNA, 1157 bp, Homo sapiens
tgtagtcccagctactggagagactgaagtgtgaggatcacttgagctcaggagtttgagaccagcttgagcaacatagtgagaccctgtcttaaaaaaagtccaccctagagatagaaagatgctctttccccactagaagtgactcttgccccagctatcctgctcattaaggcctttgaagtccccctggtgtggggcccggacaactgtagctaagatcagtcactctgcagcagctgatagaatggtcacagttgtcatggccagcacagcttgtgcttgcagagcccaagctgatgagcacctgcattgccagtgtctagctatactcttgaactgtgcctttattgaggccacttgtgtttgcctaacaaagcaggagtgctgggcacagtggatcacacctgtaatcctagcactgaggcaggagagaccacggcattgatggtctgtctccggggctcctagagaccagatatgtattcatagctagacaaatatgtcctggcttctcaaagggtggtccgtggaccagcagcgccagcattgcctgagaacttgctaaaaatgaagaacctcaggcccttcctcaaacccactgagccagaacctgcattccaattaaggcattcatatgcctgtggcattttgaaaaacaccaaaatacgtggctagtaaatttggtgctactttctacttcctgtgagataggaaacccagaacagatattggttgcaggtgtcaaaccatccctgtgtacttcatatgttttactattaccagtaccaccttagccataggttcctaccggttctttgttaagttgaagccgtgcatgaggggtggggtattacactccatccatttcactagagaggaagaacaaccttccactgcaagtaaaaatgcaaagcttgacacaggaccccacattactcattatactccgttaccactatcattattttccagatgcctgcctgttacaaaaagaactgaacaaaggaagcctgttttcctaacagtttgggaatagatgcttgtggttaaaaagaaagtacaggaacaaggggcatatacttttctagggatgagatcacatggacacacttaccatgatgtcctgggcagtgattttgacttttaaattattt

SEQ ID NO: 114420 - DNA, 1112 bp, Homo sapiens
gccagaacaaagtcagagttgagagggtgtgtgtggggtgcagggaggcaggggaagacaactggcagctcagtgtttcttgagcaaagacagagtggtaggggtggtgagacatgaaggcgcagagggagataaggctgctgcatcccactgtaatggacttagcgttttatccatccagcagacaactgacatggtcatatgtgcttgttagaaactttgttctgggcagtgtgtggaggctggaattacaaagaaaaaatgggcagagaatcactttggaagccagtgaagtagtccttcactgcttcttaaaactctttcccgtttgctttgaaatgggacaatacaaaaattatcacttataaatggttgagaaaaaggctagtcagcgacagaacctactttttatattttttcctgacccaaagtttgtttagtttttttttaataaattaagagttaaatgtattattttaatacatctcatgtagtctccagcaacttgatgaggcagacatgatttttacccccattctacagatttaaaaactgaagcttatggatgataacctccttgcccaaagctactcatctagaaatgacagggatgtgatttgaacctacgtcgctttgaccccagaatctctgtagtcttaaatgtacgtgatgcatagttagaggtagtatatttttgtgtcagtggagaaaaacacgaaggatgtagaaatgcaatataaattttcagcttatttaagtgactcattattttaaagaaagtaataatagtatctaaaaaagctgtcgacatcctattgaatgtgtgattgtaacttcaccagtaccaatttttgttcacttttacaaagagaataacataatcctttcactttcgggatttgtagctaaattaatcctgttttgaaaagaaatacgagttgtagacatgcattgaagttgagtcaaacatcagaagcttattttgaggtaaaattgaaatgaatgaagtggagactcttaaccaatgatttaaatcaaaattgacctaatatggagaggaatttggtcaaggcctgtctaacttgtcccccagtcaaatggacataaaattc

SEQ ID NO: 114421 - DNA, 1185 bp, Homo sapiens
gtgcagtgaaagtgcccagtctattatttgccaattgccattccagaacgggtagagaggcataattgaaacttttaatggctagcatctgttcaatcttctcttcctcccttccctcgatctctctggagtcctcctccccacccacctctcatccctcatttcaaatccctccttcccagcttctctccaactctgtgtacaatcctactcccttttcacaccagcaggctctcaaaatcctctctgctccccggggaaagcctggaagatctgagacctcctgcccagaagtggttgacaatgtagtgttttcattcgaatgcaaatttgtctctggacaagattcaaggaaagtgctttcccctccaactgtctctccagctcctccccagcccttgttgtcttttgtgttcttgtaaataaatgagaggcgaatggctttcagtttgaagacacagctgcagggggctcttaaagggagctagagagagaaagatgctgaaagattgggagcccagtattaaaatctagaaaagggaggcttttttagcattctcatttccaattgctctaattcctctagatttttttttaatgctgaaaagacgaagcgaattcattctgacttagtatttttccctccgtttaacttttcattgtccaaaaagaagaatccacgcgacaatagcaacagaataaactgtaagaagtatgtttattcttgatgttctccagataagtatgtaactcggccaatctcagaggtagaaagtgtatctaatgaaatgacctggggcaagggtggggagtgggggacagaaaaagatttactgcccgaatttctcattaaaacaaacagattgtgattgcgaccagggagatcatgattgccctgtcggggtggggctttaaaaatctttatgtgactaatgcgatgcttctgctatttccgaaataacatctacatgtaagcaaacacaggtctcatttgtcaaacgtgacttccctccagtagtcagctggcctgtgccagtgtcaggacaagaaatccgccccaggagagttcggggcgcaggttcgcgtactgccccgagcgcagctgggatcgcagagccgccgggcgcccgcggcatccccggtgtgcctctgctctcggggccgggctgggccgggtgggccgtg

SEQ ID NO: 114422 - DNA, 1044 bp, Homo sapiens
aatgctaaattacagacattttctttagaaatatctatgtattgttcacgctatacctgtcttatatatgtttccctgtgtgactatgtcagtgtccatctagttactccctctatgtctatatgtgatataagtatgatatacattctgaatttgtgagtgtactcggaaaaaatactgagtattgtgtctcctaaaaaaaagcatgggattgctttgtggtttttgatatcaatataaagaaacatactataaatgtgtaatcaggtaaacagaactgtttggaaaatgattgtgatgagtttaggcatagctgcattttgtgaagtctgattttgaaatttgccctccattgtttctttaaggcaggtgcttgatcttacagtttcactgcacaaatacattagctgcagttaaaaccaactcttggtaaaaagaagcagctaccaatctggaaatttttttttttcaagaaagatgtaaatgttgttatttagaagagaggagagaagggatgctaatattttagtttttataattttgaggtacccaccagagtataattttgatcatcacgccagagttaatttattggaaggctgtcttgttttaagcttattttcagcaacataagtccttctaacctctgtgtttttgcttctggaatgaagaactgcaagccccacaccacgtttgcagctgacaaagttagtttcagcccttttgcatttattgggcactatctcttccaggaacccttcctctgaaatgctcactatgcaccactggctctgtaacccccgagcccatctctttcaccaatttattgatgttatccatccaggcattcctctaactaaactgaaagctacttgaggtcaggacttttttcatgtttgtatcaggagcacctggcaggccacatggccccaaaaaatgaatgcagaggtgagaggcaaagagggttaacagcctggtgcaggcaccactatgtgttcatttatgtgacattcacattattgaagcaggagctggaagtttttt

SEQ ID NO: 114423 - DNA, 1043 bp, Homo sapiens
atccaggatgacctcatctgaagattattaacttaattacacctgcaaaagcacttttcccaaatatgttaccattcacaggtcttagggttttgatgaggacatatcttttgagagaggaaggccctccgttcaacccactatcaatatggaagtgttttctatctgtgtataaatccatggcatgtaaacacttaaaatattataccaccttgagaatttgtccagccttaaaatatagaagaatgaagttgtggggagccctaaattaataatggatgattaatgaaaatagtatctagtgttttacaaagttagaagcacgcaaggatcatcatggaagcttgttatgcaatgcaggctcccagcctaatccgtagactttttcatcttgtaggtctctagtagggccccaaaatacatatacttaagaaatgctacaggtgattctgacacaagtaagcatttggaattactcagaacccatatgcctgagttctagtctagtttctgcaaatgaccaatgggattgatctttaaacagtagtattttgatattcacattcttgaaaagtaatgatccatagacttcttagaggattaaaatagccaggataactatggttctgatttttgaattggtgattcttgaataataagatgggactactttatattaaattccacttactaagtgaacctgttaatttttaaaaggtttttataatttttaaaatcatttttattacatttctattttaagggctaaactttgtagttatatgttactattatataatgtcacatctttttgtgcaagaaatagttgcattggactgaatttgaaatattatcatttcctgtatcaatattgtctacagctctcattattataaaaccattgtccagtttcctaatattgattgactcaggggcaagataccccataacagtcacatgtctcttaatggactactcttgttttcatttacgccagtcatggcctttctgaacattgatttatacccagaattccctttttc

SEQ ID NO: 114424 - DNA, 1086 bp, Homo sapiens
tcacatttgatgggatggtgctaatgatttattaatagaatagttgtgtctgttaagaattagaagctgtgttttaggagagaggcatcttgcagaggggacaggttttgaagtccctcagacttggttttaaacttcagctgcctttgccaccttctagctctgtggtctttggtgagtcacattagttccctgaagtgtgacatggagatgatgccacttgcttgtcagggtagccaagaaagtctgagaggcaaatatacagtacttcaaacacaacaggaactcatcgctgtagccatcaatgagtaacactgatgagtgtgatgtaagatttttctggagaaagtttttcttcaccctacaattgatcagtgtcatatacatatattaggatagatcgcaaacctatgtacttcagacaaatgtgcgcacatattatgtgtatttcaaatttcaaaattcttcaattttaaatgaactacatcaaaagtttagattctatgccagagtattttttttctttctgaaaccagccgatattttataaattactgggtaaagattagaatgcctgtttgtgaacaggctacctagaatgaatagttagaatgaaaagaatcttgaacaatcttagtgtcactcagcatctatctgtattttgatttttaaaaaattataaatcaaacattgtgaggtaatggtattcatccctgaaatccagagagctctgtgtgttttaaaggagctgagctgcagaaagtgaatttcctgggaggaaggagcacttttacacctgtttagctcttctctggacatcagtgtttccagtcacatttttaaaaattattttttcgatacttttaagagaaattataaaattttattcttactttggggtatattttccatagcaactcattttctctttgtggagcatgaaattcatttctgtttaccaatatagtctcttcgttaattcagggacttgtgataaaactatatccaccataatagttgaaaaaccaggataaaaaaagcaaatattgaattgcatttgccgtttttattgatgttcagtagcct

SEQ ID NO: 114425 - DNA, 1021 bp, Homo sapiens
tttttctaaccccaagtatttttttttatcttcacatgaatattaaaagtttttcagagtgcaacataaaagagattatttcacttgataatgtgttgatatatgggtttgggggctacattaaaggaaatgaattttctcgtttgcattatcgtgtcagaagcagaaggaaaacacttcacctccctacctctacatctgttgtttcaacctgaagtctcgggaacatggcaattgtttgcttagcagagcatcatcagaacagcaagggaaaaagtcagatcccacatcagcctgaaacattgtcttcaaatgcagtgtgttgaagagagaaccgttactacaaaacagacttctggttttgtccataagtaaaggaaatatttacaagcaaaattattttggccagagaagagaccagctgtttacagtagctgaattgtttctatggaataattccttagcgataggagaacattgtttcattaaagtaattccaaatcctaacaaccgtaacataaaatcccagaccttaggacagagatgtaatatatagtgaatcatgtaactgctgcttttctctgcagctaatgccgaccaaaaaaaaaaaaaatccatttctttgtatgtccaaagcctcacaacacgagccttatttgtccttatttgctggagttcagcccattcaacgaggtttcccaccgagtattttggaacattgtgcctgggacctcctcgccaggacggtggaacatgccactccatttttgtccttaagactccttgggtccccagccatctgtggctgctcgtgctgtgatctgcacacgaccgtatttcttctgctgttcacagccacttgtcctccaactccaggctgtgggacaggaccctgtgctgtctggtttcccacagcacagatcattaaaagctgagtgttataaagaccaggaggaaacccgtggaggaaatggcttacacctgctctcagagctgtctgcttgttgctcttgatcccctt

SEQ ID NO: 114426 - DNA, 1051 bp, Homo sapiens
gtgtagaaataaggaatcttgttaaatgcagatttaggctgagtagcttgggaaggggcctgagattctgtaatttaacaagattttaagtgatgcctttatttctgtaatcaaagatcatattttttagttgccaagggtttagatcttagagtaaaatttagggcttaaaaaaatgggtatgggacagtggctcattcctgtaatcccaacagtttgggaggccaaagcaggaggatttttgcttgaggccaggagttcaagaccaccctgggcaaattagggagacatcatctctacaaaaataaaataaaataaaaaatttgccaagtgtgctggcatgtgtctgtagttgcagctactcggaggctgaggagggtggatcgcttgagcccaggaggttgagatttcagtgagctgtgattgcgccattgtcctctagcctgagcaacagagcgagaccctgtctctaaaagaaaaataataacgatttgttttttgcttttttctaccttgtgaagctttgattctgttcctaaaagttacagtaagcatttctgcctttgtggggaggggaaactctctgtagaaaaggtgtgaaatccgaaaacattcctccgtagcacctgtttggtacagctgtgtctgtgttaaaatttaaccacatttctgccgaaagagaagtaaagagactagatccagttttaagatttttcctagttcagagattttatgagttatacatgtataaaagaaggatactcatttcttatttaccttttatctatttgtttaaatttctcatttgttttactttgtggtctcttccgtaatgctcaatttctgtatcctataaatgtaaatattctcctgctttcaagcttctcttatgtgatccgctctttaaccctcctactttcctttttttcattattcagtttttttgccttttttgcccttaaagtttactattatgtaggaaaaatgggaaatataaagctgttttgaactggataaacattataaaacatcctatgggatggcttttaaa

SEQ ID NO: 114427 - DNA, 1024 bp, Homo sapiens
gtgcacgttagagagggtggccttacccaggaggtaggtcagaaaaatttcacccaaggtaacgagggcttccagaggctgcagagctagggctgagaagatctggaggctcacttttgtcaaaggacacagggcaggattgggaagctattacttacttcaaaaaaacatttaacaaaacatttggtaggctaatccaatattgtgggcttaacttttaccacaaccattctccattttcaacaagaaccctttgatttttaaaaaattttcatcctatgtgaatgtattctaattcccttttatccaggagaaactatcatggaatgttaaatttcagagattgctgtgttagcagcaggcagagaagaagtcgcctaattagttgacagtaacgctgtattcataagtcccagtcttctcacacatctgtttgtttagtacctcaagagctgaggaagtttaaaaattgtcacacattattcctttgtcttatgcacttatttgagaatgggactctcagcaagattttattgaaaagatctgtccaaggcattgactgccaactttcctcgaaatttaacaattaaccttctctccctaatgtgggaatgatggcatccacctgttgggaagtcctcgtcattttgacatgtctcatttaaggtaaagagttcaattttgtcttttggactcatgtattgcttgtcatatcataaatgctcaacaaattctgaagctctaatttaaggaggtagtagccagggtggtggtgaagacaacggagtttggaaccatagactttgagatttgaatctcagctctgcatattactagtgatgtgtaattggaaagtatactggtaaaccccatttacctatttgtaaattcgggagaataacagttacctcagaaatctgttataagcattaatgtagaagtgttttcaaacaattagcatggtgttaggcactgagaaagtattccatacatgtgggctctttctcttcttaaataattaatt

SEQ ID NO: 114428 - DNA, 1037 bp, Homo sapiens
accctcacctccaaggcagcacctttaaccactaccctctacgcatctgaacttcccaaggctgtaggaagttaactatttaaaggacaaaatgttccagcctaaatgtaaaggatttttataataccaaaggcaaatatatcctacagggaatggttatacaaaaacatgtatatagttacgctttgatgtattgaaatgtgatatatcttcaagaaattactcatttgttttatttctctttgcaaataaatatttttaaagtagtctctttggctagtgccttagccaagcacattgtgggaagaacttaaaatgcttagtcatgtgcctttttcttattggtattccttaggtgcctcagccaagggcaatgacataatacctaagcccagccaaagaaacagggcccactctgtcttgacagagtattattcatgatcaccactttacataaatgttaaaggatatcaagtaaagacatgagctaattatgcaaaaaattgaaacaaatgccactcttaatgctgggtgattaggatgcagtattcttagtagtcaaacaagtcgagttatttcttagaagacagtgccttaaatttatgcctgaggtctagaaaaggataaaatatgatagatgctttccatctggtaataaacaaaaaatactcccagttctgccataaagagactcccaatttgttaattgaaaattttgcattctgcaaagttgcgcttgcgtgtgtgcatgtctgtatgtgtcttggagaaagagattactttaaaaatgagatcctgcctttgttattattgatattatttggaaagaatatatatttatagtaaaactggtgcattgtggcattttaggaggcagtggtgctgattccatatagcagatgtgtttctttacctctaattaattaatgtgttttaaaaagtgtgttctaagttaattttctggcaatcgttgtcgttgtgtatttgataactggatggaaattgctgtcttcaagctttttaatcccaaaaatgta

SEQ ID NO: 114429 - DNA, 1088 bp, Homo sapiens
tcaaatgattgctaaatgtgatctggttataagctctgttttatgataatatttaattcataattgatctctaaattcttttcagtagtcctttgtaaactaaataaaaacgtgatttgtgttattagataaaactatgattgaaaatttcaaggtctgtacatctttttgaaactcattttagcagccagtaatgctgattgtcaggaaatgtattcatatagcgcagtgtaaatttttaattcactaatttgtcacttcctcccctcagcaatcagctgtcgtttatggaaagcttacaagctgagtgcgtgaagccagggggcttaagtgagttcaagacattgactgtaatgtttttatggccttgacaaagatgagggatgtcagtttttttcagtttagtgagtttccacggaatacaacaatacagatagcacaggaagccaggaaataagagctttcccataatggattctgtttattccttggttgtcagtaatttgacttgactgcatctgatctgctggagaacaacagatagattcagaatgcaccactgtcaccgagctattcacaatatctctgacatgtattagggaaattaatacagatttagttcttcatcttgctcttgcttctcacctgctagcaattatattttcctcacctgtgaaaggttacttggacgaggtttatgtaatgaaggcaatggatcatgagtcaacaggaacacacacacatgcatacaagatattttcaagaatttttttttattcttacttggttaaaaagatgtaataatgtaagtaagtttcacaatcttcataaaacttgaagaggaagcttactataatttgaatataggttttcaggaaatacttgtgtaatagattaaaatatgaatatagcaattaatttttgaaaaataaaaatttgctttagtaataaaaataaagtgttcttctggatgatgatttggagaaaatgattttcaaccactttaaatagaattataaccatctgtataacaaaagtcataaagttaagaagcagcttaggtttttgtatcattcaaaatatgaagc

SEQ ID NO: 114430 - DNA, 1062 bp, Homo sapiens
ggagggtactcttcagggtgatgaaacattctgtatcttgattttgtggtgcttaccctgccttaaatgtggcctgttgcctggaactgcaacagagctcatggccctgagttgacaaacaacactcccaggatggggaagcatccagaatgatggagcctgtgtcttcatcgtacttgagccacactgcagaaggcccgccctagataatcccagactcgccaagcaagaaaaataaacttgtatattttagacattgttattcaggttgtgcaaatggatacatcctagcagattagtatcctgtaaataaaagacttattactagtgttattataattcgtagaactactcagatctctccaatatctagagagaaccatgattaaacccttaaagaaaggtttcatcttttcttacttacagcttttcactttaggagatttcttggccccctttggtaatgtttaattgcttttttccttagcaaactgacgcacattatatattatagtaaaaattaaatacaatttattactctgcaatgggttttgttacattttaccactgataaatctatttaagtttaaaaaatcatctttatagccaggtgtggtggcatgcacctgtagtcccagctacttgggaggctgaagtgggagggttgcttgagcctgggatggggaggttgtagtgagccaagaacacaccactgaactccaacctgagtgacagagtgagaccctatctcaaaaaaaaaaaaatcatctttaaaacatacttttaatcatcaatatatttcttctgaatatatgtgagttaccacttagcatcatagctaatatcctacaattagcaaaatgcagaaatttaggagtggaaagttcttagaaatatttaactttgtctctttaaagatgtagaaatggaggctccaagagattaattagagtcatacagtgagagctgtctgcagtgatgatgtttgaagaccctgaggcttttttgtagtttttcttcttttatttttaaacagactttgtaatcgcaaattgttgtgtg

SEQ ID NO: 114431 - DNA, 1038 bp, Homo sapiens
atagttaaaacctgattatgaaaacatccacatttgtcatccttattacaaggagaaatttgtgctttcacattttgtacatttagaattttgcgcaatgctcaacctgcagcattaccaaggaattatatcccaagaattttcttcccattatgcccatattgaagtatctccatgcagcctcagcgatgataattctcacagctttccattccagctggagttgttccattagtagttcaggttaattttcttagtatcgtggatgttttgtctgcagttgtcaatattttcatttccactttcaatatcttttcagataataaatacaataaaacttatttttaatcactgtgttgtttttactaagaaaatagtagggtcctgaacaaacaggcttagagaaacattactgtgttaggaaaatgtagaaagtttggtttgcattgctgtctctagtgaatgtgatgtgtatttctatcagagtttctgcctgtggtagagagaagaaagaaagcagatgcaggagaatccaaggcaatgggtgagaccaactagaaggggaaaatattaaaatagaaaccatgtagttgtaacagaaatcaacttctggcagctatgaaaagcacttcagagcagttggcatgaaactgcttgcagaccaagagctgcagaaaagcactgagaagatctgattctaaattaaagaattcccagagaaagttggggttagtttaagtaatggttgatcttgtcctgatggctctgtgttgtaattgcctgtttgtttgtccgttccccactctagactgtcagctctgtgagcatagcagtttctgtctgtgctcttgagggaggggctctcagctcctcgaccgtcatctgcaggtggtgggagttcattaaatatatggcaataagtgaataaagtatgtttagttatggtccaatgactgtaagtcttcacattatggtttaaatctgtgatgtttaatgtggtgtggtacagttgaggacagggaaggaagtggccatatg

SEQ ID NO: 114432 - DNA, 1045 bp, Homo sapiens
agaactgacacaggggtcaaccaacaggtcatttgaagagattatacaattcaggatcagatgaaatttttttttttggttttgctattttattcttcatgaaggatttgaaataaatttcccaacattttattatgaaacccttaaagcgacagaaatgttgaaagaattctcccacctagattgtgcaggtaacaatttactctatgaattctttcatgtattgatacactttgccatttctttactcttccatcaattcattgttggtgctttcagagtaagttgtgaagcgaagtacactgtacagactacacatttaaatacttcagtttatgtaacatcagctagatctcagtatttccctatgtttcttttaaaataaaaatttacataagatgacacgaataagcttatattcaaaaagttctgacaaatgagtattagacctaagtttatattggatatattgtatgttagaagtcagagtttaaggtacagacaattgtattttgataactggctaacatttggagaaagtaatattctttaccaaaaaatcaatgtgaattaaagatatgatgtttcataatatgtgcaagacatcatcagagaataccatggacattagtagtttgaccagtggtgtctagtttgtgaattgtcaatccctctgaaagcttaatttatctttaaaaataatttctgttaccgggataatcctagtagtaacagacaattgccaattagtttgtgggatgaaatgaacctttcattacttcaagtgcagacacaagcaccttttaaaacccacatcctgcagtacctgaagtttcaaagagtttactcaacttgttcaacagacatagagcaagaattattgagttccccattaacaggagacctcctatcaaagcagcacattaatttacagtccatataggaaaagaaaatcagatttggagcagttgtgtaaattatcataaaggaaatctttaacatagggtaagcagtcaagagaatttcattttaatatgtaaaactc

SEQ ID NO: 114433 - DNA, 1017 bp, Homo sapiens
cactggtggcgatggatattttctccttggatttctttcatcccatccccctgaaataacaggagcagaggcagcataggtcatttgtcagctctcttgtgattgtaatttctgtctcacatattttcattgccaatatacctaccttcggtaaagctaaatacagagtagcaaagaaataggctactttaaaataattttgtgcttttatggaatttttagcaaagtagagttttttttttcttggttctaatcagcacatgataagagatgatgtatttcctttttcaaagtagagaatttctttatgggtacttcatttctttgcttgaactttaaattgtctgtttggctaatggaatctttttttttttttggtagtttggctccttttagtggtattatctaattttaaaaatgaaagcagaatgagactttgcagaaccatagtgtcatgaaagtggagctaatgtgttacagaaggatcatgtgctcacgtcttccctaccatgcctactgattagctagtcactgtcaaagagtagtatgtggttctctaattctcaagttttctcagataagcatattctccacatttctatagttttctcttagaatctagggaaatcatgatcattttagcactctcttctagtctccaatgcttttttatgttgtactttataaattatgtataaaaacgtgttccattgatgaaacattttgctctgttcttgacgtggcccaaccaacatggagtggtgatttgttgatttaaagggggatgatatctcccaacatttggaaactaaacaacacacttctaaattattcatggctcaaagaggaattctcaaaggaaatttaaaaagtacattcaagtgaatgaaaattaaaatgcattgtatcaaaaatttggggacataagcagagcagtgctgaaaggggaatgtatagcactaaatgcatgcattaaaaaaggggacaggtcctaaacagtaatctaatctcccagct

SEQ ID NO: 114434 - DNA, 1031 bp, Homo sapiens
ctatcttatggccagattgctggaaaaggaggtctgagccttggactagatttggctttcaaccctacaaggctcgtgattttcctactcagccattctgggttcctggccatgggcagaatgtgccactgtggtcagatattttcttttctctgtttctcactgtgccagtctaagtgtaagactgcctgttctttggagaaatttacaaaaggccatgagaatcatccgggacacttcatcaagttctccaaccctccaacttgtggtttgagatacatagagaggtgtttaacagccactttgttaacagatagtgaatacctacctttccagttaagggcagtgtgctcactacctaaaccgtaccaccagatggaccagttctttattctgggcatatcactgacagccagtggaagtttcctgattagttgggactccctttgcaaaccatggaaaatgaacttaacctggagtactaggaaatgtggaatttacagactctcataagtaaaaatgctagaggtttgctccgtccccacgttctactgatcatggctcatttttttctctttctgtctgatatggctgtgtccctacccaaatctcatcttgaattgtagctcccataattcccacatgttgtgggagggacctggtgggagataattgaatcatgggggcagtttcccctatactgttctcatggtagtaagtctcatgagatctgatggttttataaggagaaacccctttcacttggttctttctctctcttgcctgctgcgttgtaagatgtgccttttgtcatctgccatgattgtgagccctccctagccatgtggaactgtgagtccattaaacctttttttctttataaatgacctagtctcgggtatgtctttattagtaccctgaaaatggaccaatacactgtctattagttctgctttcttctttactaccttcatctttagcaggctttttataagtagtgtcaatatgtcaatgggagctccaagtttata

SEQ ID NO: 114435 - DNA, 1042 bp, Homo sapiens
gcaaggcatggaaatgtctgttttagaactaatggtaagaaatgcatcaagttttctagtttcctaaaaccatactccatgaatgtacttttgggaagaagtctttgaatagatggaataaattttttcaaaaccatggtgccttcaaagtaagaaaatgtcatgttgttagtgcatacttgaacaaattccaagatttgagagggaaccgtcccaaaatttgaccagctgtcctgaaaatactatagtaaacatgaattactataacaagtgccttcattttaatggaaaatttctattttccataaattattcattttaaatggaatattttaaatggaaaatttctagtagtaagttggttaaaacaggacaatctttgagaaaagtttcctaacaattggtccatatttagataatataaatgtggaaatttgtttaaatcagtagttgaaagaagtcttaatttctatttcccatttaattccatttcacccaatttgagtatagattatctaatgaggcaacaagtgctatagaaaaccacagagcaagtttagagggattgggcacaaaatgataggggcattgttggaagttctattaataaatagggtagtcagggtaggttacattgagaagacatcatttgagctaatatttcaacaagatagggatgggagccttgtagatacagtaaattgggtccctaaggtgtgagaatgccgagtatactcaagaaatgccaaggagtccaatcatggctggcacacaggcacaaagacaaatcataggaaatgtagtcatcacttcagagagatgatgggagaacacatcaagtggactctgtaggccactgtgagggccctttggctttcacactgcagagttttgagcagagaagggacgtgatcgagttcatgttttgcaaggattcttctgactgctctgctcaattgtggggtggggatggtagctcagatagcaggcccttgcagagggcctgaacaaaagatgacatcggtttggacaatggcattca

SEQ ID NO: 114436 - DNA, 1097 bp, Homo sapiens
attacctgccaaagacccctgtctccaaataccattacactgggaattaggatttcaacatttgaatttttgggggacacaaaccttcattctgttgcagaaaccttacccctgtgtctccaccaaaggttagttttccataaattgagattacagagttatgtcttatcagtaggtaataagtttgtcctctgcacctgactgtttgaatttgtggaagtttccctccaggcattaacttccattttcctgccagttcttgcactagcacatgctggggccacctcttcatgcctgaactgagtgagcagaatggtagcaacagcaaggaccaaaccattctctgctcttcaggagatgtggaaaggacaggttttcttgctttgctctgtaaaagccgactaggcacttgatgcattttttcacttccttttatagggaattgagccaagggagagtctgtttatcctcgagcttacttaagtcagggaattctgcagaagcatattctttgtaagcaaattcatctccaagtttgctgactgtacagctcgctcatgagtgtacctgtcattccatcttaactgattgaccaactacatagaaggctcagctttcatgtagctgacagctctccatttcagcactattggcattatggactggataactgttgttgtgggctgtcctttgcattacaggctattgagcagcatcgcaagcctctgctagacgcctgcagaactccaccacccagctgtaacaaccaataatgtctctagggattgccaaatgcctcctaggggacagaattgcctatgaatgagaaccactgatgtagatttgcagaggctttccgtggacccaacccctatcgcagtgctatattctcccttttgattttctccattgggctcttttgctaggcattgtggtagtggatgcaatatgaccatttttccactctaaatcagtctatgtgtaagtatttgccgggtggtttcatgcttcttcaaggcctctctaatattctcaaggtgcagacattttgagattttcatcctgctaccaattacggttgtgtcaggggaattaga

SEQ ID NO: 114437 - DNA, 1047 bp, Homo sapiens
caccttgcaaatgatggtgccccaatgtccacatgcttccttctctctttggatgctttttctttgttggtgtctcaggaaatatggtgtgggaaggtttgaggctggactagagtgagtctccacagtgagtgactgctaacgtgcatgaagcagcaaggactcttagcaaataataacctgaaaaggtgtagacaccgaatttcacggtcagtggatcttacactgcaaacttcagctcaggattccggaaataacatctagtcactttcccagctgttcaagccttagaacaggtttctggtgcagttgtattcagtttgagatctggggtatagaacactgccaaacatttgcatctgttttctctatgtattgatctatcctgaagatttgaagtaaactgaaggtacaaatgctattgtttcttgggctcctgtgaaccctaccttacttgggcctgaccttgtctcttgggagctcatcccagagacaagccagcaaacttttgtaagaaataacacatcttggtgaggagagagagtaaagaagaggtagaagaaattctttagggatcagagccagaaaatgtgtaatatttataatggagttatttatatataaaattgtataccacatttgttaatatataccgctatagtttttcaaatataaaatgaaaaactagaaaggatataatcacatttttgagtgtttctgattgcttttacaatttctgttcctttgtgtgtctgtgtgtgtgtacaaaattgttaagctattctgtaccacactttcaaaagaagaaagcttgagtagaagataattgccttctacatttcttttcttatacacaagatatatttatttgtttctgccatatacaaagtctcagaattttgcatgctgctctttggtacttaaatatttttatatattagatggatttatatatagtttaatgaaacttgatgttaataatttgaaattgtatttttcctctctttgttctatagcacttcttcccaaatgaaagaaaagtctttt

SEQ ID NO: 114438 - DNA, 1043 bp, Homo sapiens
gtgtttacttttatttcatctcatataagaaatgtctgtatctgagaatttatattaatataaaatgaagtattgcttttataaactttaatatttcctgtttggactccactatcatgaaatcccctgcttatttaaattagctgtgcctttagtgaattatgtctttgaaatataaacctgcacacagaaatgcttgaagttatcaaatgtgtcattagactggggaggttcctttggcctaacgagtattttaaggtagttgccctttggtgtttaattgtggctacccactcaaacactaatttagaatgagttgtttctctcttggagcattgaattggctacatagttgtgcatctttagtgtttgaatctgctctaaattgtatcttaaaatcattaactcagtttagtcttagagagacatttgaaggtttgtaactgaaaatgtgttacctgtggtgtgtctgggtgtagataatctcagagctcagtggaaggtggcattctggccccttctccctatcttcagctgcatggttgacattctgcatgctgtctagttactccagcttttggctttgagtcttacagaaagaaggaaaaggggccttcatctgattatttaccaaggttggtacatgccgtgaaaaggtttctatttaagagtcattctaggggctgggcgtggtgactcacatctataatcacagcactttgagaagctgaggtggacagatcatgagatcaggagttcaggaccagcctggccaacatggtgaaaccctgtctctactaaaaatagaaaaattagctgggcatggtggtacgtgcctgtaatcccagttactcaggagattgaggcaggagaattgcttgaactgggactgggaggcggaggttgcagtgagctgagattgtgccacctcactccagcctgggtgacagagtgagattccatctaaaaaaaaaaaaaaaaagagtcattctgagaacttgaaaaatacacaaccaggccgacattgctgtgttgcaagtagt

SEQ ID NO: 114439 - DNA, 1045 bp, Homo sapiens
atacctccagcgctagataatctgtccccctctgaatggtttagtcatttatttttctagttgaagggtagctatttctatccttttcaaacatggatttccaactgagatggctgtgcagccttaattccatcacatctctgaaatccttccctttctccatgtgccgattctcttaaaatgcattaattgctactaggatttaagatctttcagtagtaaacataaatactgtatgtttacagagtaataatatgagtttatatggcttccttgtggcctgataaatcatgcattttacagtagtgcagttagacctacagaatggcaggcggtgcagagccgcaagtgggagagctggtgacagggctgggtaaagtgctgtcttaagttgaacagagtgtgggaggaaatataagcaaagttattccgtagaattttatagcatgttagtctttacaagtgctttctcatattttatctcttgaaagggaggataagaattttgaaagcaatgtaacagatttttggaccagtagtagatttcgtcgtgttcactgattcttggaatatccttaggtgatattcatctgattttaaatatacatgctgttccttacagttatttatcattttagctaattgagatgtggtgggctgggatttggtggctatgtgaggtttttttttttagctctggcccaaagaaggtgctgtctaactccgaagagattttgtcttttttttggcagtttctctcaagatctttgatgcttacacaactgtccattgcctttcctttttctttttattctttagagcaaattgctttgtggattatgagggaaaatatttcttctttgctatagcttattaattttcaatatgtgtacccaggacttatgttaaatagttagttctactacagaagtaatttcagtttgtctgctgaatggttttcatattagtagagcattgttactttcatgtttactgtcagcatagctttgaagatagatatttatggtcatttggagaaatgtag

SEQ ID NO: 114440 - DNA, 2749 bp, Homo sapiens
aagatgctgcagttgggcaaggtcaggaccttgccctgaagccgggcggcgccgcgcacgcctcttcccggactgaggagctgtcgccggcggagggtgcatgtttgcgaggaagccgccgggcgccgcgcctttgggtgagttgcggggctgggcggccggggccgggcgcagcctcctcccggcgccgtcctcctcctcttgccgctggtgggggtggtcctgggctcccggccggcaggcggcggcggcggctgctgcggggtttctgcctgcctcggggaggaccgcgatcgcgccaggtccccctcggaagccgctgtgcctggaagggggtccggggttagtgcctttcttggagcggttaccaagtggctgccctgcgtgctccccctccctgccacccatctccccgggaggaagcgtatttagggcaacaccgacaatgctgctccccgccaccctgagaacatactcggtgcattcatgacgtccctaatatacgggaggagacggggtgggggtggggaggacttccctccagtcttttgcccttatgttcaatgtcattacgatgtttggctagaacaaaatggaaagacttagtcatatgcgtccatggccgtgtcttcaggctcccgcggcttgccagaccctgagcccccttggtctatatttagcggcttcccagcaagcctttgcagccggcttcacaggtttcgggggcttctgcgtgctgacaatagacagccaggctccagaaagcgccgcctgaaagccaggtttggaaggctgtgcgtgtgtatgggagatgagcgatgcaaaattggggtgatccgtaattaatggctgaaagcgaagctgcttttttctttttttcccgaccctcatcttattctggtgtgtagtgtgttttcttcgattgccactcggcaggttgagcctctgctttcagaattaagtcactagaaaggtgatgcagcctccctggtgtttgtggtaggaaaacagacttgggaatttttggggtgtgtgtgtgtgtgtcacaaataacagttacttccaaaatgcccaaagttgtattttgctgtaaccgtgggggtatgaagggtgtgggagatgagagatagaggggcaggttgtgtttccaaggtgtttttttttcttttcttttcttgtgtgcctcatttgagctgatctgattcgccttagctctggcaggtgttattaagatgtatttttactgtgctcaagcaaatatgttgatttagaaaacagagaatgttgtcagcatagtattaggcctgacaggtgtaaattttcacttttaagaactatgtgaccaatatttaagagtcttgggattttctgcagtgacttccatgaaaacaaggaggtgctgaaactccctaggagttatctcattgtgcatacttcatcaggggctgaagctaccgagggcagtccagctggtctctgctgctggtcattcacctacataatgacaaggcttcggggctgcaccacttctaaaatcccatggagaagtgtttgctgtgactcatatcaagttatggcggtgaacctgtcattattttggggatttctgctacgagacgtgtgatatataggggcgagtatcctcaaatacgaactagatgctttaaactgccctcaaatgtcttttattagcatatggttgccatacggagaatgttcctactgttgttggggaaaaatgttaagtggcatcattactgatctgtgggttccaagggctcagggcttgaaggaagacgattacattcggagttaagtgttgaaatttgggaggcctttgattacactaatcacaagtcagtgttgcaggaggactggcaaggtctatacggctcaagttgattgaatactgtgattagtctttagcaatattgctttagtttcaccttattcacattcagggaactttccgagagcactttgaacacaccgttatgcccactgcattgttttaatataaaatttctttcaaaagcaatagatgaagtagcatacatgtctcgtttccttttcttttttccttttgagcctagtgtttcattcttaaacatgatttttaaaggactagttgatactgctctgtgcctgtgtgtgtacccagagcggccgatgggcatgtgaaaaactacatatactgtatatgtgggttttatgttatattgtggattgaaaatgatattatctgattgaatggcaattgtggtaagtacgtgaggttgttgccctaataaaattgtcatagtcttgcggaaaggagttatttaatttggtgtacgtttgtgtagttgtataacccagtcattatagatgtcactaatgttttcattgttcgtaataaaagtcatacactgtcaaattacagtatttctatccactttacatctttcacaatagaatataagccaattctttctcccagtgaaattgttcatcagagacaaaaatgaaattcaaatactagtttgcaaatgcaatttatagttttgttaaataatttctaaggataatattgctttcataatagtttctaaaattaaaaatgaagttataatctcaaatataatattactttggcatttagttgaatatgcagtgtatttgcagaaaatgttacagaacttgctcttttctgttttgccttatcagacttctttcttgtgtggtatgaatttgtgtggacttgtcgaag

SEQ ID NO: 114441 - DNA, 1071 bp, Homo sapiens
gcttaggcctgtgctgcccccgccgccagggctcctgttcatgttccgtttgggtcagaaccaggtaatgtctcactggcttgttcctttcttctgccctccaaaatgacaaacttaactttttagttgtttcacttagaatcaggagccagggcagaacttaagtaggtatcagatgcagcatcccattccagcgatagcctggaacgtctttttaaaagtgaaatctcctttgggcagctctgagtccctgacctagatcttggctctagcatctaggccaacgatgtctagcagggggcagagaggggtcattctgttggatgggtgggtgtgggggtggggtttgaacagtcagggctgaccgggcaaggaagctgaggagaatggagcagtcaaatccatcagaaatctggctttcttttctaagactcagaaacatgggaaaataggttctcattgactggggaggacagatcatggtgtgtttttgagcctggtactaaaagtgccaacctgacttagacaaaggctttccattgcttgcctttcctttctcagccctgaaactctgtttgcatggctgcctgattttctttcttttttttaaattcgttcttgttgcccgcattcggctttgtctttgtagccacagattgaaaactaataccagtggttggatgaaagaaagagaagactttaatagaacttttaaacaattaagggaagttcagaaatagagtgaacagtcctgtgatttctccattactggaagtgctcacataaaggtgctgtcacctggcagggtttggagttgggctcaggggacaggactgctgccctggagaggggtccgggagatgaccttggggctgttcccctttccctgtggactctggctttctctgagtcctcagtgcctaatcattgttctccgcttttctttgggtagttcagggctccagagccctggtgcccttctcctctgctgagcgtccacccagggttcacctcacccaaggtctcatttcctttgctgtcattccgttctctgctcaggaccttggcact

SEQ ID NO: 114442 - DNA, 1017 bp, Homo sapiens
gagaaaaactattacaaatcaaaggattatatatatgtaattagtaaagggctccctcaaatcaattaagacaagacatatctagaaagaaaataggcaaacaattaaaagaagtatgaatggccaaaaaatacatattcagcctcactcataatcgaggaaatgcagatagaaccaatgataccaacaaaagccaaagctcatataagtaattattctctaagtaaacttgaacaaaattgagttaatttggaaagattttatatcgatttgaaagatagtaatacttgtgttcatactttgctatgtaggacctagcttcttataattgcccgggggtgatctagggtaatggtaaagatagatagggggaaataaagattctttcctgggattctgtaatacgtgttaatttggaaatccatctggtgtataagtcaaatctgacttacaataatctttagctatagacagttaccatttttgctgcttcaaaatttcccactcccatgatttgtgctgctgtccagatcgaagatgacaagtggcccatgcaggatgatcttcagcgcctcacagttcctggtgcgaaagaagaagtttagtttcatctggagggcttcgttcctacatgagtaactataggaggtcatttgccctctgttcttaggcattcttgtatataattgacagctacctatttcacggtattgacaattaataaatggatttatgaagtgttagccccacctacttttaagactcataaccataaaactatgcatgaacttgagaaaaacacagttcaaatttacacgtataatcctaaaatatttttaaatggggtttgttggtgcctgttttttcattgtgtgtgtgtgtgtgtttgtgtgtgtgtgtgtgtgtgtgtatgtatgtatgtaggtatatctcttggaaagtcataaaatacccctctttggatttctgtggaataggtggtttcagtgcaagaatgaatgaatatatcggagacta

SEQ ID NO: 114443 - DNA, 2046 bp, Homo sapiens
accctagcagtcccagctttccggtggaggcatgttggctctgttgagttttacaggctcccccggctcacagtctggggagaaatcctgattgaaatcttggccctctgttttcttggctgtctggacttggactcaagtgttggataggaaatctctggctgttaatgtgggggttgggagtacgggaagggcggggagaggctggccagggagggaggtttcccagcccttgctgtgtgtgacacattagaacactaccagggcttcctttctaacttaggaaaggaacggggccggggagtgagaggggcaggagggcaccacggagctgcctttttggggttggttttataaaatggttgtggtcactcctggttttgctatatatagctgtttcgttgtagccactcatttttttgctgtttttcatcaaaatgtgcacgtagatgatatttagttgggggaagcagggtcatttccttcccactgtctcaggcacgtgtcctaggctgttctgtgtgtgggttgcgttctcatcagccatacctcatgtggtcccctcacagtcaatggcatgattttatgggatgcttgctcaggtttatgcccacataaaacttctgagctgttgttttcgagcatcatttccacactgggaatatgctctgtttttctgtgtgactccacgtttactttggagttttaatatttcagtcaggatgattgaaatgctggtctcttgaaggcagacactgtataatcagaaggtagattgtgctctaaacatttaccagtcacttcctcctagtttgccctaggagtttctaaaactttcaagcttttacatttttatgtaattctttccgtttgaagatttctaggattaaaaggattggcctttaagaccctgggttgcttttgacctgctattgtagtatatcttttattttaaactaataaaggtgatacaaagctcaggtccgaattaacttagttgaattgtgattttgctgtgtagtttttggtcatttagttggtccatgtattaattgtggattacatctaaagttatttcggggtgggggtaaacttactttgagaaggcagaactcatcatgctcaaagaagcaagaacagcttcagatccccagttgtaagtatttcaccacttctgctttgtcttcctctgcttctctttctggatatagctaatttacatgttatcttgtttctgaaccatttgagagtaggttacaaatatgatgatgtcccttacctctaaatggttcagtgcatattttctaagagtgaggacatgctcttacatagtgatcataatcaggaaattagttttgatatgatatcatgatctaaatcactaactttaacacctttttaccaattgtctcaggattgtcctttttggcagttaaaaaaattatggtccaggatctcactcaggaccatgttacatttagtttgtcgtatctcttcagtttccttgaatttggaacatctcctcagcctgtctcccttgttaccctgatagttttgacgattacatggtggttattttaaagactacctcccagtttgggttgcctgattctcatgactaaattcaggctgtgcatttttggcagaagggctgcatcctttttggagcatcgtgtctgggaacatgtgatatccactgtcccactgtggtgatgagcactttgatcacttggttcaggtgatgacttgcaggtctctccaccctatttgtccctttgtcattagttagcattttgtggggagataatttgaggctgttcctctcccttctttcatttgctagttgtagcatccattgatgatcttcacctgaatcagttattaatatgatggttgcgaaatgttgattttttttctaactttgtaattccttttgtatttagttgactttgtactataaggaagagctttccttatcttccacttatttatttatataagtatggcctcagaaattcctgttttatgcaatgagctatgatcttt

SEQ ID NO: 114444 - DNA, 3190 bp, Homo sapiens
tccctctctctccctgtctccctctctctccctgtctccctctctctccctgtctctctctctctccctgtctctctctctctctccctgtctctctctttctctctttctttcgagacagggtcttgttcttgcccaggctggagtgcagtagtatgatctcggctcactgcagcctccatcttctgggctcaagtgatcctgcctcagtctcctaagtagctgagactttgagcatgtgccacgacacccagctaatttttgtatctttttttgtagagatggggtttcgccatgttgcccaggctggtcttgaactcctgggctcaagcgatccacctgcctcagtctcccaaaggcttgagattatacacaggagccactgcacccagcctgttctgtgtttttctacattaaatgatgacacggatattacgtcgctgacttggggagacagtctcagtttcatatattatgttctgtactgcccataaacatcctcatgcttgttagattgtgttctggaaaatttggcctctgtatttctagcaaccctttctatgatgacacattttagcaagaaaaaaaatcataatttgcttattaatattttaatggagaagggcttttgatattagaaaactgggaataggccgggcgctgtggctcacacctgtaatcccagcactttaggagcccgaagcatgcggatcacgaggtcaagagatcgagaccatcctggccaacgtggtgaaaccctgtctctactaaaaatatgaaaattagctgagcgtggtggtgcacgcctgtagtcccagctactggagaggctgaggcagaagaagcgcttgaacccgggaggcagagggtgcagtgaactgagatcacgccactgcactacagcctggcggcagagtgagactccgcctcaaaaaaaaaaaaaatctgggagtaaaaagtcatgactaggggtagtgagaatgactgctaataggtcaaacattctgaggaaagtttttgagctaatggagatgttttggaattagatagtgatgaggctggaaacggtgatttctgcctgtaatcccagcattttgggaggccaaggtgggagaatctcttgagcccagcagtttgagaccagcctgggcaacatagtgagattcagtatctaccaaaaatttaaaattcgctgggcttggtggcgtgcacctgtagtcccagctgttcaagaggctgaggtgggaggattgcttgagcctaggagtttgaggctgtagtgagccatgattgtgctactgcactctagcctgggcaacagagcgatgacacgctgtctcttaaataaataaataaaaataaagaacaaaaagtcatggctaaatgtgtgatacatttcagattttgaaatagcttcagttattgagtgtttactatgtataagccacttaattttcctaccccttacaaagtaggcagtgataacattatacctgaggaaatggaactcagagaggttttttaacttgccccagctcaggtggctatagggacaaggttaccacgcgcacagtgggttctgccgggggtggaatccgcctgtgctggtgtctcctactctgacgtgcgtctcttatggaggaatttgactcagttttttctactcccactccccctctccctttttttggtgttagaaaaagtgaaatcacctctatttgaaggaggggattgtggataagatttgaccaggtttcagttgtgatttgatggcatatttggaaattttgtggaaaaacctgggttaacttttcaggaaatcgcagtcaaaaaaaaaaaaaaagagagagagactttgcttccctgtagattgtttcagtcctggtggtgtcttttgagatagtgaagagcatagctgaaaaagtggaaactgatgatgctttagcttttattgttttttaaacattctgggaaagttgaagggagaggcaactttctgctatgcttctcctgaaagtgatattaacattaaaaatcggtgtcattgtttttctgctagtgtgagctttatattttttttctttttttttttttgagatggagtcttgctctgttgccaggctggagtgcagtggcacgacctcggctcactgcaacctccatctcctgagcgatactcctgcctcagcctcccgaatagctgggattacaggcatgcgccaccacacccagctcatttatttttgcatttttagtagagacagggttttaccatgtttgccaggatggtctccatctcttgacttcctgatctgcccgcctcggcctcccaaagtgctgggattacaggcgtgagccaccgcgtccggccgagctttatattcttgaatattggagtcacctctgctcaccagcatatagaccgagacatagagtatgttgttagactctaaaacagaaacggcattaatttgcataaaatcgcatatgctctgttgcaataattttcattgtgcctgttttagaattgagttgacacttcatacagagtattccaactcaattaaaaaagagacatcgcagaagaatttgtgtggctttgaaatttattttgggcacagtccctgaaagaaatgagcctctaaggacttttgttctttgtggtgttttgaaaccttctcgccagttatatacattaagaacacgtagagcaggttggggttggtctgctgggtagaatgcctgcaaagggaccagaggtctgtcagaacaagagtctcttagtgcagtgcctcccgccggggggtgaccttttcatgatgtttggactgtcatctttgtttcccagtttcaaatgcctagctcagaattatttagtgcttgaagtggttttcatcttcaaaggacgttatggacattatttaatatacatgacactgtgtaatgaatgagctgtttatcccttgagtaacgtcaacatgccaggtgccatacagctggagaagacaaaaataatactctgtccagtgggagctgatagtctaaagaggcaagatgattaggcagattctctcttttggcctcttttaaaaatgtgctggggaataatgtagaaattaaaattataaaagatgatcaactagctcaagtctacctaattgaaattgccctcaaggtggaaatgaaattt

SEQ ID NO: 114445 - DNA, 1090 bp, Homo sapiens
ggtgaggaatttggtgaagaccagtgcagaattattctcagatctccttcccgactcgtccctttctcccactgaagctcctctttttgtttgcatggtctaggatggcactttgtaaccaaggccacatgtgatgcccaaacatacatttattattttttttgagatggagtcttgctctgtcgcccaggctggagtgcagcggtgtgattttgactcactctatcttctgcctcctgggttcaagcgattctcctgccttagtctccttgtaactgggattacaggcatgcgccaccacacccggctaatttttgtatttttgtagagatggggtttcaccatgttggccaggctggtcttgaactcctgacctccagtgatacaccttggcctcccaaagtgctgggattacaggtgtgagctaccatgcctggctcaaacacacatttcttagttgcagatcagtctgtcctttgtagctgggcagacctcctgggaaacttggacttcttgcccctgttggcctgtgtgtcttgtgctcttgtacctgtacctctttgtgtttgctgttccctcttcttcctggtttcccttcctaactcagctcaaacatcctttcctttggaaaactgcacttgaccatcctgtcccagcctcttgaggcccattggtgttggcatgacactttgtgagaactggattctggactggttcctttgggttataattgttccttcactcgtgagtttgagttgctgggacctctgaccccagcgccggcccagagcagtccccaggtagaagtgcagtagatggttgttgtgatttatgcctgtggttccttaactcagattttagcataattacctggaaagttttctttaaaaatacagaatccctagagattctgatttagtggttctagattaggcccctagaaatgtattttgaaaaaactctacttgtagtttgttttgagacagcgtctcaccctgtcacccaggctagagttcagtggtgtgattatggcttactgcagccttcaccttgtgggctcaggcgatccacccaccttagcctcctgagt

SEQ ID NO: 114446 - DNA, 1007 bp, Homo sapiens
gtgggtctgggtttcccagcctccagaggtaggaacgccaaccatcctgggatggtaggtggccgctaggcccagatggactgcatccagacctgctgagtgaatgaatgcctttcttctgtaaatggactccttatcattctgttttagctcctctttttctcatttcttcctttctcctgcatttctcttgtttctcattcttctttgaccacttaagagtgacggtgtcactcatggccattgcccattgctaaactgtgctggaggcagttagagatgagtctgatttgtggggcaggaatttagggggatgctcccggtggagagtctgttggattctgcattagcacctcactacagacttcacctgggggtaagccgtgcctggggggcacccccttcttttctgccccaaggccctgggtctgagcctgtcttcttctgcatgtccccttcctgtctctcagtcgtcccgtcacttagtggggtctcttgacacttaattctcttactgcttgatcccaatcccctttaagcacagttttgtctgatttaaaatttgcattttatggtgatcttaatagatttggcttagcaaataagtgtgatgcttcttaatttcggggtaatttaatccctttttctaaattgtggtatattattccttaaaaattgttttggctcagttgccctggtgtcatgtgatttcttcttgacgttttcttttccgagctgcagttcatgttgaggttaactcctactcatccctctgccccgagtgctcagcacatagtcagtgcttagtaagtgttcaccaaaagcaagaacaagcgcttgctgcatccccaagtccagtggccagtttccctgtctcaggaggctggtgggacgtggtaactattgagccagcaaaactgggccagaggctgggccattttatggtgtaatgtcctctccagtagaaattcatgagaggggaaaaaggagaaagggagacggtagat

SEQ ID NO: 114447 - DNA, 1018 bp, Homo sapiens
aatttattgtttgtctgcagcagaatgacttgtatggctctgggtgctgttttctagtgctgtgtttgtggtgcatgtcttcttcctgtttcttctgattctgagttccgccctttttagctagcattcagttggtctggctttatttgacttctttgacttggtgagtgccatggtttgtgagttatactatcatttgtggtttaaacatttcagtttttgttactatatgtccatctatgtggccatcttctcattttaattaccaatacatgtttcagcttgctttttggaaaaagtgttgagatgcaaatgtgtctttggaagtgtcactgagaaacccaaggtctatctggcattccgctcctggcggcagaccgtagtctttgtccacgggttgggaagagagctgtgaaacagggaggccttgccgactgtcctacctgcaatctggactttgcacatggagcctctacttaggggattagttttttgactactgctgtttgatttttgctttttaattgggttatttgaggtgaatgcatggtttaggtttctcgttctttgtgttggacagaattaaagggaaatttgagacatcctggtctacttatgttcaactccgttatattcttttttaatgggcaataaaactgccttttttttttttttttacttttctcttttttagatggaaggttccccatttttatttttacatcacgttcttcctcatacagttttcttcaacagtaccaagagtcgtatttttaagaaagtgtctctaaattttctttgcttttgtaggactatgtcatttctgatgatcattaattggtatgcctaactctcccctttgacccaggtattactaatattgactgaaagatggaaaatttcaaagatggaaaatttggattactgctgtgtctttaccattgagtcccaggaaataacttgcccagtttcataaattcttagacgttggtttctcttgtgattgtcaagtctttgg

SEQ ID NO: 114448 - DNA, 1001 bp, Homo sapiens
aaaatcggtcctcaccataccgtggcttggctctgtttctaatgcactgcaagtattttatcaacattgtctacttttttgttttacttgattattttatatttattcaccatttaatttaatattacagatactgtttgtcatgtgtttggcttttgtgtttgcttttaacaaatactcttgtattcatggttttccttgtttgtggagtaattcattttgccacttcttttaaccattcttccctaaaaatagtctgctagggcagagattccattcggcctttattactttggatttgccaaacaagcagcagaaacagagttgtacgtgtggtcctacaccacaaggatttttaagagaggtcatttgtaggtgatggttgttgacacaggaatgctgtcaattaaaaaaggggagaaaatgaataatattcaaatttactggcatagagatgtttgcacagattccatgtgagagacgtaggctgttaatcttgtgttctggccgcatgttaggaaccctcttatggtgtggataaaaagccttgtgcctgcctggtattagaaaggtgacaggtgttgctgtcaaatattgatgctttgatatcttcacatttcttgataagctgaccgcgtaattgtctaaacagagatggtgttgagagtgaaagagggtgttaccaataattattctagaacagtaggggtaaactgagactgtgtctgtcaagctaggatgtgtgatgactcgacctactgactgaccatagtttcataattcagtatgtagagggtgagagtcatgtgaagatatttatgactcccactggtcattttttgtggctcacccctaacttggataaaatgatgtttgactcagtccaggatacataaaggcatggacagttggccaaggagagtggtcacaggggtgctgctgagtcagcacctcctgtcagtggtggtctgtttgaaaacagacctacagcacatttgaag

SEQ ID NO: 114449 - DNA, 1046 bp, Homo sapiens
cttctgtccactcaaatgttgaatatccctgcattgtcaaattgtacccattactcggtacctgtctacctatagaagttcctttaaaaaaagagctgtctttttactacttcctggcatgtagttttatacattgatcggattcatattattttgtcttacaacttgatgtctaaatatgtaagcaggtgggagtagattgttttcttttgtatttctgctctctttttctctgtaaagtttttaaatggaaataaagtacataaggctcgtattatgtgatctcttgttggcagtataaaaggttttataataattgttttctttctttattgttatacaggtgctccattaggtgaagaggtggagaagggtgaaggatttgaggacttgatttgtttttaagttaaatgttaggttgctggatatctctagatatctagctagtaacttagcttttgaaattcagtgaaatccatgtttcaagggtgggatgttattccaggaattctgctgaaataaacagtatacagaggcatatctctgaatatttagtcattgccagtggcaaagttggtaatgctgctttgtggtatgtttaatagaggaatagtgtatagcctttgtagataatgatttaagtctgtatttatttttacagaaaggtaaccacatacacacatatatgcatacgtcttttaattttgaaacaatttcagacttaaaaatggttacaaaaattacacaaagatttctatataccttttacccagatatcttacatgttaatattttgccgtttgttataccacttatacccttctttctgtatttgcacatgtatcacctagataaactttttttttctgaaacatttataattaaggcagacataatacttcttttacctttaaatatttcagtgtatttttttttttaaaccaaggacattctcttctggaagtaaaatgatgaaaattgggaataccacattcattcaatgctgttatctaatttacagactttattcagatcttgccaggtgc

SEQ ID NO: 114450 - DNA, 1040 bp, Homo sapiens
atgttctctatttcgtgcagtatccattccaggagcacacgttgcatttaattgcagccctctttagtcttttttagtctggaagagctattcagtctgtcaatcaggaccttcacagttttgaagaatacaatctagttaattctagcaagtttgctgaacgacccttgatttggatttgtgtggtatttccttgtgatgtgggtgggaatactactgaagggtggtattgtgctctctgtgcattttgtcaggcaaggtgttgatatgcctgtcctatgggtgatgacataaactttggtcacatagttaagatggtgtccgccaactccattgtcaaattgataacttttttctttgtaatgaagtgtcttgagattctctgtgaaagtatgtaaatatcttattcctcatcacacttttacccattaattttgtactcattcatgatttttgcctgaaccagttgctagtgtggtgttcgtcaaatggtaatttttaaattcttccgcttattccacttttgtagtttaagtcctactgtaaggaagagctttcccttctcattgacttaattgttcagaacaggctcatgggtccttatttgattctgctgattgtgatctgttattatcatgattgactggattgctccgattgttccaggctggccagcggggacagttcaggctgtgcctggtcctgtctttttccaagcccttgcttattttttttgtctgttctctttcagtgtgggggtggggagaggcgcagttgtggattgttttactagattttatccagctttttctccatatctgtatttgtataaattttaaaaactgagcattatttaaatgtttatgatggttgcctttgggttgtgggattactggttattctaatttgtttttctggaaaaaaatcagccatctagcacatgtattatttatatcaaggaagaaaggctttttaaaaacattgcaaagatttgttgtgaggctaggcatggtggctcatgtctgtaattccagaacttt

SEQ ID NO: 114451 - DNA, 2244 bp, Homo sapiens
taatcccagctactcgggaggctgaggcaggagaatcgcttgaatccaggaggtggagattgcagtgagctgagatcacaccactgcactccagcctgggcaacagagccagactccgtctcaaaaaaaaaaaaaaaaaaaggatttgctgtgagtggtggaaatcacgtacctctaagactgactgagactatcttgtgttttgcacctgtcatttgagagcattcatgttttccagcacacatcatatgtgaaatggagcactgtcactaaatactgatcccatgacttgaaatcattattctaccttcagaagctgggaagtcattacattataacctgtgctctccccgtttcttaagacagatgaggcacctggtgcctgcgaagttaggttacttgcccaaagtcacagagttaattgagcagatagatgttctggctctgagtccagtgttcttagaaaattcttaataatgttttgtttgttaactgccttctaatgaccagatactgaatgaagttttaaagatcctttagcttaaatttgcatatgccattcgatgagtcatgttccaaaattttatatccgaaaattatcaaaggccatttggccatgctggatgattaacaacttcaggtgagtctaaattgatttcttggtagaccatagctgtggagtgctgtgattactgcctggtgttcaatgcgtaattacactgttattctatacttgtaaaaaacatcgttggattggaagaatggaggcctgataaatttgtgctgtttaaacttgtgaactttctctggaatcaagacatgcctgccagaagaaaaaaatctacttgggcacgactaagtgctatctgtagattgccaaggaagctttccccgcccctgtgacttgctgtgagtcccctgggctgtcctcccctctgagcaccagatactgatttgttgtgcctgctgtggtggtaattacataaagtgtgtatcgaggtgcttcctgtctgtcttatccccagctccgtcctcagccccagtcgcagagcctttctcacagcaggagtgcaggaaaaatgagaatgctctttaccctgtccaggctatcttgtggagatgggtcttctcttgatctgtatccctctcttttcttgtcttcttcttatttttaaatactctgatttttaaagcagtcatatcattagtcagggcttttggttgcaagcagtcagaactgtctctagccaattataagcatctcatatggcaacagtagtagttatttgccaagaactatgaagggtctgagcttctttactctatttgcaagctaggttaacctgccttagtttgctagcaaaagacatgagactcctgggtcagacagaggactttattattcacagtggtaacagtagtcatgatatcagcatttgttttttgcaccagttcttcaagccctgattctcacagagcgacttgcagaaggccagttgtgcacacacagtgggttgcattgcaggaaaggaaccctgaatataaggtacccgaatctcttatactggactgcaagcatgcctgctttttgttcttaagggagatgctgtctctgtcttccaagtctgtaagcatacctgccctttgctctggaggaagacactattctctaagtctattcactataaaaatatccttgtaatgatagtccagaacaaagatagtcattgcctctgcttaaatcatgtacagaattgcaagagacccacggagaattatctaccaacaatatgcatcatagaaatttagaaaacagaagaaaagtcactacagtcctaccactcttactgttaaggtttttgaaatatatagagttttagccataaatataaatgatttcatatagcatgtattttataaaaattggtttatactgtacattctatcttgtgatgtgatgtttttcacctgccactgtatcatgcccatttccctctctctgctgtctgtattcttcttgatgtggtgaagcatctttgcccaatcttctgttcccttgtgccctgctctctgcctaacatttaattgtactaagtatacaatcagagttttagaggttgaagagcagagatttcagatcatctggtccaaccttttcatttaacatgtgtgttaactttctcatttaacataattacatttcactgagaccttctggaaccaacaagaaaaccttaatatgga

SEQ ID NO: 114452 - DNA, 1084 bp, Homo sapiens
ctcaggtgatctgcctgcctcagtctcctaaagcgttgggattacaggtatgagccactgtgcccggccaaatatttttcattttaaaatgtactttttatttatttttatttttgagatggtttctcactctgtcacccagactggagtgcagtggcgcaatctcagctcactgcaacctcttcctcccggcacaagtgatccttccacctcagcctcctgtgtatctgggaccatggcatcgcaccaccatacatggctaattttttgtatttgtggtagagatgggtctcactgtgttgccctggctggtcttgaactactggtctcaagcagtccacttgcctaggcctcccaaaatgttgggattataggcatgagccactgcacctggtctaaaatgtacttttttagaaaaagaaacgtctttttaaaaaactaagcatactgcttaattcctctagattcttgctcttgtcttgaggactttgcatcctctgaactcaacttgtggtcagattctccggatgtttcttatcctcgaaagtttaactcaacctctttctcccagtaagcctctgaggtcccagcagcctctttctcaggtcccgctgcccttctgttctggcatgtgcctaacctgacagttgctgccttgctcctgaaatttgtcattccatttcgatggtgcctgtgtgttacctgtgtatgactgaagtacatattcgttatctgcgtgagacagtacagattggtgtatagtattttacagccacttcattatatgctatttccgtgtactggcaaaaaagagaataaaacttcctaggatataagtacctactgctgttttggtgcatgtccagttaggcttttctctttttatttgtttgtgtacctgtaactccatataagcatatataatcatgttacatatgtttaaaaggcgtcattttgcaatgcagttttatcactagttttttctctgtcaagggatgtataaaaatggatcacaaatctaaatttaaaactataaaacttaggagagaatctttgtgatcttggattaaacaaagatttgtta

SEQ ID NO: 114453 - DNA, 1959 bp, Homo sapiens
tcggggaactccagccaacttctgtgaaccttgtttccaccccaactctccctccagactcacatacctgctcaaacgtgcagatgctgctttcattgaacctcagatgtctcaggcatgtagggtgttttaaatttcagacacctaaaataaagtgtctgaagtttaaatgttaacctgtgccagtaaaaatagcagaagtgcctgaggaaggcctgtggtgggtgggtaagaattgttggcattattgaagaaaaaggaaagagctatgtccccccaatccccaaaatggagaacaaagcaaattaccctatcctgaccagtgtacatcaggtctactgattgattatagccaggaagttagggtttggcactttattgcttaattttttaatttacacattgaatttgctttgcatcaacttttgagaaagtggttctcatgacttatatttgtatagtactcatacttgttcatttattttctagcaatcaggagaccaaatagggtagcctgtactttcttcatgtttgcctgatgaaaacactgtacggttagttaagactcatggccggatctgatttgtaatttcttgtttctgaccaagaagagttcagttgctgttgaacaacacggacaaagtacactaggggaattcagagcaggtgtgaggttcttcctgctcctagaggtttgtgtgctctttacaaacaaccttgcaaacactgaggttgggagggaaacaagtctgctttgcacttagagcgcagaaggatttctttggttggaatgaaggagaaggaaagtacaatttttttcctgcttctcctccctcctcttttcttttcactcttcttcccctcttctctctcaaaagttatttctaaattatcaggttaatatatgtaaactaatattggtatatataaatgacactatactatattaatacataaatatataaaattatttataatatatgcactatatatatatattaacttgataattaactctagctgctagcagaggcgagcaggctactttcacatgcctgactcaccagttagatactaagctgatgcacaagttagctgtgcttgtttctaacccatttatgccaaggacacctttactatcaacatgtaatttaattaaatattttctgagtattttcagatatgagtgggaaaagtatttctataaaggctaaattgatttgggatgacttgttaaagatggtatgtttaaaataagctgtcacattaagcacaggagagaactgtaaagtcagggaaaattttgtaaacatctatgagcattctgaccttagtttctttcagagtgtgtctgtattctaactccagtttaataaggatgaatgccagaattggagtattagggtttattcaagtaagacaatgaagagcttctgtccagggattcatccttcattcacaaaaagaccatggtactggcccagggcaggagactgacagtgagggacggggctgttcaagtggcactcagcaatgtgcctgtattgagcgggaggatgaaagaaaaccatatttaatgtgtgctttctaatgactctctgctttaactgacttagttaaaaattatcttacctgactacaagtgatccccttgagaaagagagcttcatgcagtcaggcaagccgcagtcagggctgtcactgcttgagtttactgtcatgtgctcctgctggaaatcaatcagattccttattctttaaattacacacaggtggaaacctagagaagggctgggttgactggccatcttgaaggctgaaattggtggcatcagttgctctctgctaccctgacagatccataagccgtggtgttcatggttagagacagagcccttcaggccccaaggaagggtatgccatgggtcacctagggagggctgctggagaattcctctc

SEQ ID NO: 114454 - DNA, 1151 bp, Homo sapiens
tttctgacaaaggtgaaataaacaccttaggtaatgaaacatcctaccttaagtcatttgaactcattgatttcaaatcagtagttatgatgttattttttccttttacagtttaaaaaaattgtgttgaatgaagtgcctttaaaaacttgacttggaggaagaaagtaaaatgatgagaaatttattttgtatgaaaagtaaatcttttctgtatttggtgtttaccatgtgtaatttaaaaaggaggctagactgtctagttcaataataagaatggagaaatgaatttagaccaaaaaaagcagcctagatttcctctacttctgtactgataaagatgatttggagcttatcttcttcacaactgttttaggtgaaagaaaaagaaaaccataacaaacctaactaaaagcatgcatcgttttttatatgatgctaattaagagatggttgaattgtggcagttgcttctactacatttctttcacaaacgttcttttgtagtgactttgttattcgtgtctgccaatgcacactgttagtgtttattggtgtataatgacaaaccttgattgtgatctggaaacctatcacagttttattatgattttacatcttattagtgaatatgctagtgataaaaacttgatttttttccttcagctttctttattcagaccaaccttcttttatatatggccttgagaacttctgcaaactttggtttttcatccataaaatggctttagactaaatgattccttaagtttctttagttccaagatttgatgattccacaaagtttgagatcttttagcgccaagatctaatgattccacgaaatgtgagatcttttagctccaagatccagtgattccatgaagtgtgagatcttgcttgtatgtacaaatctatttgcaatttctccaatggcgtgggttaagttctactactccaaagtgcctaaaaatcgagaaaccataaaactagtttttgttcttctaaatagacaactgaattttgacaatagaagctagttttgagagtcggtgacttatttatgttgatttggttattttaaaaattttctttagcgattaagaactcgtgttctggaatcaaatttgaattccatcccctccacttaa

SEQ ID NO: 114455 - DNA, 1050 bp, Homo sapiens
tgaaacatggcagatgacaatttccaaaggctgtgaactttccaatagcagtaaactcctctgaagaggactgggatgtggaagtgggatccctgtgccgctggcagtgccggcagcaacccttctccggctcttactgagctagggaagctgttgctctgcgccttcttgtttagtttacaagatttaggacaagtgcctcggtttctgatgctgtcagagacttggtcaaggtgaaatctggtagctcagtttatagaactatgacaaggctagtgtggtggtgtgacattggtgaatgtttgtgagatggaaaagtactactagactttagcagagccagtggcataagaaacttaagtttaaggccaagtgctttgtgtgtgtatgtgaagtggagagggaggaggatgatttgctttctttttctataattttttttttttgtttactctgcaaaagcctgaccagatcattgttttccttaccccccgcccacagtggagtaggagaactccatttagatccttgccctgtacttctgcctctgcaaaccttgctttccttgttgaaaatactcagagagtctttgtgtcctatttcagtgctgaaaaaagatctgctgctttctaaagtgtgcctgtcttaccaacccgtgtgggaatgctgcccgcgtgtttggatggctctatcaaagccttaggctgtttctggccggagtcataggggacccttcaggtttgtggattcccagttttagtacagtgtctttaccaccaatcccgtattaataggacagtactgcgggtggcaacctgggccgggtcttctgctgtgatgaggaatcacctgcattagtgtcacctggaatacctgtgaaaacgcagaatcctcagcaccagctgaggcatcagaatctttgggatagggttcagggttcacttttactccaggatctttacctgaggactaacattaaagaaccatttctggaggaggtaaaatagatcagtatttttcaagcagcatgtggcgtccagcagttttttt

SEQ ID NO: 114456 - DNA, 1614 bp, Homo sapiens
ggttaaggtcacaaaagtttgaaacccagtaggttagatgatgtcttagttccctttcatcgcaacctcattttgtattgttttgaatccttagctcagacccccagccagtaaatcatctgctctgagacaaacactaagaataaaagaagctgggaagcttttaacctgacctaagcattgtcttggaaacagtaaaatgcagccccttccagacctcttttctcagtatctttggggcggggctttggaacctgcattttgagtaactgttccacaggattctgatgcaggtgtttatgggaccaccttttaagaaatacatgtgaagttttaaaccttgtaacaattctctgaggggcacctcctctccctcccacttttccctgtttccaggtaagaatcctgaagccccagttgatcagacttggtgacttctaacatcgcagagatgttaaggcgcgggcttggtagggcagcacgaggctgccgttcctcttgcccttcctacttggagagaatcagatggcgtgcagtgtggacatgtaagttcctgattgagggcgtctcccggatcaaaaataaataggattgttgaaaatgatagtgttggaatcctgggcatgaagccttttgtctctgggatagcctttgagacctcctccttccatgagtgcagctgacacagaggcaggtaagaggacaggtagccgtgtctgctgcttatgagttgtcccagctctgccccagctttggaatcttgggcagtggcagagagttatgtgacagcgtctatccctgagagttcttccagattttaaattctatgattctatcttttggaaaaatagtatttcctgtttcttaccttgacagagatactgaatgggtcgacaaaaatgtatgcacgtcttttgagttcccccagaaaaacgatgtaaacagaatcattcgttggcaccctgcagttcagttcagattttgtgtgggacacagcagatctcagcgtgcactttgagagctcctccaggagcaggctctccttccccataggaggctggtgtaagttgcatcacagccatgtcctctgtgtcctattcaccaaggcaagcattgggaacagggcggtggagcaactagcctaggtgaccctgcttggcttcaagttaatcttattacgtaaagaaacagagaaggatttactttcaaaaccccttctgatggtgtgtaggtgggaagccacatccagtgagatttgcgagaacaagaggaaatggccaagtttccgggaagcagggctgcggtgtgcagctgtgcattctgtggccctaaacaggcactttgtttttcatttgaaggtcatcatctccctttggcacatgtgcttcctctctttgtaaatgtgtaatattttaggctcaaattcctatcgaattttagtcttaatctaagtcggattatagaggtacatattgtcttactgttacattttactgatattcagtgtttgatatccccaaagtcttgacttggattcacaagtgattacatttgttatgcttgtcttgatatccaggaagtacatagttagagacagaacccacatttggcctg

SEQ ID NO: 114457 - DNA, 1119 bp, Homo sapiens
caaggaggtgggctgagcatacacagtgcagatgagatgggctcctcctgatgggtgggtcttcatgggaccagcatggaagattccagtcctcccacttaggttatttgatgatgatgatgatgttgatgttcccaactgcctgtctgattggtgtcaccaggttagaaggagggaacttcaagtccttttttctgtagaaccccacagccttgcaagccctgctagcgcagctgtgtttttagaagaccttgtggaggttgaaaaccagggtgttgccagtttcatgcagctttctggttgtgaacaagacttaccctgagagtggagtggagcgtggacgacaaacagaataattttacttacggagcctcaagttttagtaaaccaggaatctgaacattctttttgaaactaagggtagctagatagaagggtttttataaaagtagttttcttttgcacaatattgttttattccaaattatgcatttataagaggctgtaagacatggaatttctaataatcacaacgttatagtttaacattgtccctgaagcttggtgaagcattacgtcttcacttatgtgactaacctgtttagtcaattgccttgctaacccagcaccctgaaaggctccaccctgaagtggaggtgctgggtagagtgtttccatatcttcccagggttcggagacgtggagggcacaagtggccgatggccgggaagtcagaagaaggggaggaaagtggtttctgcagctctcctcctccctggtttctgcagctctcctccctggcttttgcattgccctgtgcttaaagtaggagtccaggagggaggaacacaatctgaagacaagcgtcctccaaacagggaaaaacatcataggaaagcttttcataaactcacaactgctgggacatggagagttgaggcacatgagacagctttggggaaaacatgcggaaataggaaacgctgtgttatcttaacaactcagtttgtcagccaggtttgtcttgttccgcacccgcagtccttgaggtatttcaagcatttggtcattctacccttgatggccttcaggaagtgcacagatgccagccgttgtatc

SEQ ID NO: 114458 - DNA, 1066 bp, Homo sapiens
aaagtctcttatgagtaaaattagaatctagttttgctaatatcatacttgttgtatatttgatattcacagtgaggacagctcatcattaatgcttagccaagtattccattaatagatgcctatgagcatttgtatctgagcttttggggggattcagagggagggtgtgggggcctgtgtggagaggaggccagggagctgggcctgttcagggtttctcatgtccgatttcctagtagaggaaactgtacctccatctccaataaaggaaaaaagaaaaacaggtttgtttttattactgcctggttaggcttgggggaaatgatatttgtgtattttaatgcagtgttccacacctggagctccaattctgatgtgttttatggggcacagaatggacagaaatcaattcctggtacctgtgacaaagaaaaaaccatccagaattggagactgttccctgccgggggaacagccgcaaacatgtgagcctgtggttgacaaaagtacgtcatgcatttcagagtgcgtattaggaatcagaggacaaatggcttgagaatgtcacacagaaagtgcatagcataactgcagcagcacatgactgaatttcctgggcgcaaaagctgttgaggactgaaagtcactcagtagcccatctcgtgttttggatgcaattctttgaacttttagagtagcagattccatcagggaggccacatgtggatttaagcagataatttgtataggcacaaatcatatcattttgactaagttttttggaatgaaattgatatctgctttatcaccacttgtacttattggactattttggctttttagaaccttacttgttagaaaaaaaggctttctgttattaaggttgtttgaataggctgaagcaggagaatcgcttgaacccgagaggcggaggttgcagtgagccgagatcatgccactgcactccagcctgggtgacagagtgagactccatctcaaaaaaaaagaaaagaaaaaagaatataccaaattataattcatagagtcaagccatcctgatctc

SEQ ID NO: 114459 - DNA, 1045 bp, Homo sapiens
tatgacagcccatggagggtaggtctcattatcttcatttttaatgctggagactgaagatgagagacctgtggttgcctaaggtcatatagctggtaggggcagagtttgtgtttttgccactgttcttgatagcatatttctgccatatgggggcttctcccggttccgtgagtgaggcatgccctcctgccatagcctccgttccttctgccttcaatgaatacaccttccataccactccccccaacccctcccattaaattctaatcatcatttaagtttcatctttggtggtcttaggtgtcactgttgcagacaggcatttttctggcccctgcaccagcttacagcacccccactccttgacctctataacgctcagctttatacttggttacgtttatggtgtttgttgctctgtttgtctggtgtcctggactctaagctccgcaagggcaggaattgtctggcatcattgctgcacatgacacctggtggatgtacatatttattaaatgaataaatgaatggatgttcatacttttgtccaccatgttttatgctaaatacacacagagtagataatgagagaggctctaatagcgaggtgtgtatcctttgagctatggatgacaaacttaaaaaattgcccattaagttagaaaagaattgagtatatctttttaatatatgtgtttacttaatgtacacgcatattgtaaaaatacatgatattggcattttaaaaaggatgaaaatatttaaaacaaggagtttctaatatgtttttctgtatgttagaggaccagctggtatccaggacccactaaacttggagctgggggtgccagggcaggccctgtgggaatacatgtaactaaacaagctccatggccacagtggaaccagactgcagttgatcaaagcatggttgagggtgggaagtgctgggctcatgcgagggtgtgtgagtgattgtgcatcaacatgaaggatcactgggggagtggtggggtgtaaggttcattggaagtctgggact

SEQ ID NO: 114460 - DNA, 1048 bp, Homo sapiens
ctacattgatcagcatggtgtttaaaatgccttaacgcccaggctcagccactttctctacctctaagtagatcttttgattgatagattcttagttcgccaataatattgatcaggctttgatagctaggttttgaaaagagaaacggttaccagctgagcccaaaactgcttgcttggttttaatttggaggttgctactatttgaggtagaattcatgactcatcaaattttcttctttcctctaacatttagcattattactctttgttggacaaatttaccttaagaatgttattctgagcagcttgtagtcactgcccatatcctgcctgttatccaccagaacatgtaggaattttcctttttactttttgtgaatttaagtgattataatatttagatgaagttagagatagtgaactttatacatgagaaagtaaagtttatgtcagttctctcgaaacagtgtacgtgtagttgattttagtaggaataaaagttagaaaaatgcacagagattttgttcttggagggatagggtcctggaggtgaactgactactgcatgctgggagggacttcctgcagctaagtgaagagaagcattccattgttttctttgatgctgatttgaatgtggtcattaatttgctcattattttaaaacatttatactgtcagtgctagggttttttccctcctgcatggtatggtgttaagtaaactcgaagccaagtatctgctgtcccatctttgtgccagagcattcgcagcctccagggctccaccagcccatgtgggccctcctgggtccctgtgggccccgtgcaccacctgtcatggattcctgccgctggtgcatgggacacccgaggagataaggggtatgaatctttcttctttatgttccatgcacatttaatagcagacgatattaaagagaattcagtgttaatgtaacttttcatatttcatctttttttctttaaataattcataaagtgctactttaagttaaaatcttacaatgtaggatcctattgga

SEQ ID NO: 114461 - DNA, 1784 bp, Homo sapiens
cattgcaagcttagaacatttttttttgtagcagttcaatacacttgagtgctatgatttttgaagttaaaagtaaattgtattattccaacgacactgtaaatattaattacactgatcatagtcactaatggtgtttgccatgtgccgggcactggtcaaaactcttgcctgtatcaactctcatccttactacagtgctagtagatgtgcatattattttacagatgtggagacagagatatggaaaagttaaataacttatccaaggccacatacctgccaagtggcagagacaggcctggaatccaagcagggaggccttgcttctgtgctcttagcctctggactactgcagtctacttcatgttttccgttgactaacagaaagctcttttctccatttctttactgtggcctcagatatgaatgtatgtattatatgtatataataaagacatgctaaatcatcttaacctacaaatctgagtgcagaataaagatcatttctgtgaaacacaaaagataccaatcttatacaaatcagggctcttgtcaattcttatgattaaaatattattaaaattgatagacttttttctttggggatcctcacaagaagaaaatagtgttgcctaccaggcataaaggagttctggttttgtatccatactggttcacaaatgactatcaggaggaaaagatggtaacatgctccccactgcccccttttgagacaaggtctcactgtgtcacccaggctggagtacggtggcaggatcatgggtcatcgtagcctccgcctgctgtgctcaagcagtcctcccacctcagcctcccgagtagctgggactgcaggcgtgccaccatgcctgcctaatcttttaaaacattttttttacagagatgaggtctcactgtgttgttcaggctattcgggctttttgatctattatttgattgctccaagtcagccagcccttatattcccactctactctgcattgttggaggataaaccagaaatgggaaacacaggccctgccttctctaaatccctctctactccggaaggtaaattgcaggtgagctttgggataccttgctcgggcagagggaacagacacatgcagtggttggcggcccagccagggggtctcttctctcacagccacatctgcaaagacagcagggcttggttggagactttatcaggcccctcagtgtgaagagctcaggaggagctcagtcttgtgttgaagccagtgaagaattccgggcactcccattactgctatggctctttcctgctgcttctgtgtcccctctccggctcctgggattttgggtgtgtccatgtcctggtccctgcctctgctgttactcccccctccctctccattcgtgtgtaccctgccttttctctcaatgttttgctcgcaacttagacatgaaatgttttttttttttaagttagatttaaatttgattaaagattatattccttaatgcaagtaaaattccacccctcctcccaattcagttgtttctagcttagagtccttggctgatctttatgtctatggtacttaaattaagtttccatgtatctgttataatggtaacttttattatgagagtctcttcaaataattagaaaatgatttttggaaaggtgtatgtcaaatagaggtcataatgacaaaacataatatcttataatgaatgtaatattctggactaaaaaaaaattattccataggagggtataagccaaactagtt

SEQ ID NO: 114462 - DNA, 1011 bp, Homo sapiens
atatcatggaagaggctatctttgaagctatagagaatgtagaaatcagatgctttcttttgagactattaaagatactgggttttcatagtagtatgtagaatacttaaaagcaccttatggccagtttttccaaattggttatttacattctagaatatgatttttctgtagaattgttatctgtatggctgggctctcaggccagccctagaaattgtcttgtcctataatgttgctgaactgcagtactaagaatgtcagagaaaataagcattaatcattaaaataaatttgaaattctgctgagcttatgggaccatgtttgactcctcaccgtagcccacagcggcaagaagcagcacctgggaactccacgttccactccttgccgtcagcctggattgcagcgggtccttggtgtattcaggtggcatctgtgaggattgggtcaggctcatacagggaggctgcagttgctggagcagggagcacagggtaaatgaggtttggggtctgtgagaggcataggcagagggggtgggctgcaagggcagctaggggaggtatagccccaggaaaagagagtctgagacaggcccagggggatgcagctccgagttaagtacttgaacatcgggagctatgcatcccacagttctctacagcaaacagtaaaatattactgacagacttgggaaaagccagcgagtcttttgagtcaatgaaaagatagcatttgctgtgatcagcttctctaatattgttcctctgtaagggtttcactgttctcaactttgaacatccactcgccgttctgtggtatatccatttgtccctagtatttaaattaggttattgtaaaagctcctttgcacctgttgaaaatgctggcacagtttctccattagtaaaccctagaaatctgagctctctttcactgaagtttcttatttcaactggaacattcttcttgaatgtgtgtgataggatcagtgtacggttttcaaa

SEQ ID NO: 114463 - DNA, 1758 bp, Homo sapiens
ccctcggctggagcctgggccaagtcaagacatggaaatgtcctgtcactgtcacaactgggtattggatgctgtaatccattgttgtgatgtgtggatgtaaacttcagaattaggggaagattagcctgaactatgaaacatgttaatatgcatttcagttatttccaaatgtagaaatatacttttaaatgagggtttcagctttaaatgaagtcttactaattcgtatatcctattatggtaagatataaaagtcttttaaggaatatgttcttttagattaactcaagacttgaagtgatgttgaagaaactcttgatcatttgaaccctgtttgggaaactttactgaattttatggtagattccttgtaggacacatacatatttgattggtatatgtcatataagattttgcattatattgcacttaaaataggtgttaattttgttttaggatgttatagtctgtgctaagaagagcatgctattttgacaataaagttgataagttggaatacatgggcttagatatataaattaaatatagagagggaagcagaagaaatatagaccactaggcagggcacggtggctcacagctgtaatcccagcactttgagaggccgagacaggcagatcacgaggtcaggagttcaagaccagcctggccaatatggtgaaaccccatctctactaaacatacaaaaattagctgggcacagtggcttgtgcctgtagtcccagctacttgggaggctgaggcagaagaatggcttgaacctgggaggtggaggttgcagtgagccgagattgcgccactgcactccaccctgggcaacagagcgagactccgtctcaaaaaaaaaaaaaaaagaaaatatagaccactgccccttctttgcagctggggttattagcttatgactgtgggatgtttcaatgggtcttgtacctcatggtatattaggaaatcatagagttagaacttggtaatgcaccaagttaaaataatcaaaattagattttgaaggaatcattctttaatgttattaccttcccacttaaaaaattacaaatggaatgtcaaaccttaggcattaggtaactgaaatcttatagcatacccttctgttcagacacttgctcttgcgaagtgtgttgaatgcattttagtaacatccactgccaatttaaagtgacattgagtagattaggaaagtaaaataaagtgatttgatccattcgttacttgaatggttaattttatgttgactgtgtggattaaatacacccggggccccaggcagtgtccctgcacctgctgccgtaggtgagggggacaaggcctgcctggaacagaaggcagctcagggcctgggagtcagtttcctgaggggagccccttgcaagcgccgtccacacagggcccccaagtgctgcccacctatcttgttcatcctccctcgctgtcaggaactgctaccctgggctgtgctttggaacaggtcatcagagctgacattggtggacactgttggtgtgtgctacagtggtgctcagtgctttacagacttctcctgtaatcctcagagcaagcccaccaataagaaattctgatccccatattatgggcaatggctccaaagctctaaggagtgtattaacttggacgtggtacttctggggtttgattccaagcctggctgacttcctgacggtggtgatctctctcaccagactgagagccctcaaa

SEQ ID NO: 114464 - DNA, 1023 bp, Homo sapiens
cttgggcttcaaaccctcagaaactgcttgctgcatggaggaccatgatcgccttgtctggttagtgcattccagcaatgtgccatgtgaggcgcctggaaaggaaggatacaggaagtggggagccctgtggatggccaggccatctttctaccgttggtcttggctctgttctcccgcgagaaaggcaggaaggtttttggtctccaccctcctcctcctgtttcttctccaaccacaccagtagcataagtgggttattgtatatgaaataggctttggtgggctcctctcggaccctcatagcaacctgtagcattatttctacgggaaaatatattttttaaattgagaaacagcagtcttcttaacaaagttttggaacccagaccacttggaggttggagactgagtttatgggcaggtctccccagcagttcctttttggcacttacttgtagggaatcttaaatgggaggaactattagaggaattcagttgagacataaatagaaagggaaacaatggggtatcctgttcttttagtctcacacttttaaagcaaaatatgaaaatctagtttattgttttattggttcagagagtttagaatccaaaattgatttcagattaatctcttgtccactaatatgcctgtttctgtattcttcaactcatttggtaaaaggtagcagcaaatggttgcatccttaaatacatagactggtctgacggacaatacaagctttaaagaggatgtggaatacaaccctttgggaaaacagtttgatattaattcataaacttgggaaagtgcgtaaacggtaagccagccatttaaccctgacatatctctaggcgtagagatccactggccttgggttctcgggtagtggatggggctgttcatggcagcattatttgtaatagcaaaaatgagagacaaaacaaatgttcacttacaagattgccaaaataagttcaagttgtagtcatcaaatggaacactatgcaacagtgaaa

SEQ ID NO: 114465 - DNA, 1022 bp, Homo sapiens
cccattgccttatagttccttaaattatttatagtccacctgggagaagttatggagaaattatttatagtcaggttaatttactatgattgtgtggatttttaaaaatatgtctatttgttagtggctttttaacaataattacatgtctcagtctgttcttttagttttaagtaaagatgtctgtcttaacagaatacaataattttaggtaaatgggcaaaaattcccaaaattcagttatttaaagcacttaccaaacttgtacagctaagtttcagatattaatactttaatactgttacaactgctactgttagcatttgttagtgagttctgtgagctgtgattctcaggctgtccatttcacagacgaggaagcgaagctttggagagactaggtaactgcccacagtcaccccccctgggaggtggcaagcccaggctcctaactagacacctaagtaactgttgacacaaaatttcgttttgagttgtggcaccattgtggtttgcagccgatgtacttaacacttgtaatgctagtgaagtgcagctttgcctgtccccacagcgagcgtgctcctgaatcctctccacacctcatccccatgtgtgtagctcccttttaaggtggctgcttgtaaccctgtgtcatttcctctgctggatcccagctcctggggcagcaggcaccctgaggtctccctgcagggtactggaatgatgctgtaggtgcagagagttggccggtgagggagtgccacacaccttatttaaatgtccttactgcactgccgtttttattactatactaagtttaatttggaaaacgatgttccctgtgctttttagtagataagatactgagatgtcctgtcaggagtgtagcaattaggagactggaaaaaggaaaacagattccccagcctacaagacgttcagctttgcagagtcttttaggatcttaccccactcagattgggcactgcagggcaggtgtctaaagatatgaaactgcg

SEQ ID NO: 114466 - DNA, 1053 bp, Homo sapiens
acacataacagtgtgttttggaagacatatttgtcagctcttactgtttacacagttaaggctacggttagtgtaatgtgtgttttattttgttttagagtataagcttcttaaaatcaggaacatgccatttaggggaaaaatctctggggtttaagagagtaccatgcataaatatgtattttatgaatgccaagcgattaaacacaattctaagctttatcaagggactgactggcagaaagttttgccaaattctttgatgttattaaagatttatttttgtactgagtttcatgttagaatcaaatccatgcttactgaagtggaaataacttttcaaaccttcagttaaaaattctgatgtttgtttgtggcatttactttatattctatattaataggagtaaatgaattaatgggatttttgcagtgggcatggacctaaagtatcttaacgttgtggagtacattagggaaactttggtattttaaatgtgtaatttagtaactctgaatactgtattttaaattcaacataattacaggtcactcagattaattgatagcttgttcagacactcagctttggtgtatgttttccccagggctggaaaatgaatcaacacagaatactggagtagaggggattggtaggcatttgttggtgagcaaggcccctggatgaggattgcggcttcagtgactagtacctgcacctaccccctccttaaacccttttttgtttatctgtggaggaaacattcattcagaatcagaacctttgagttttagggccggcaggaggtaaggctggggtagaggctactcatgtggagataagctagaataagccaaattttaaacccaaatcgtggttcagtgctgggaattcagttcctttttcttctggaaatgtatagactgtctggaacgctttggcttggcctacctgttgtatagtgtttgttgtgtacccttcgtactcacagtgagtcccaggcaggatttcgtgggtaaagtagtacagatgttctgaggagttacagtttg

SEQ ID NO: 114467 - DNA, 1044 bp, Homo sapiens
ggaaaactcatttgactagtttaatttgaagattaggtaaaatttcagattactagtatctgccagtgtcctgggagaaatacaggattaaaaaaataataaaacctatgttttacttaaaaaattttaaaatttgattcatttgattcatctttctgccagttatgtaaaaataccatttttaacataatatgctatataaaagcttttgctcattgtgaaaatatttctagggtgctttttattataaataaatcggagaggggcttgttgttcctggactatttgttattgttgtcttaaatttaatgccacagaagtgaccaagtgagcgagcattctggtcatcagtgactagcttagaaaggtatttgtctcagtgcagcatctctttgcagggtttcaggatgacagatgagtaattgatttggtcagtggggtattagatagttgaagttccagactgttgattcagtggaaagatatttcactgttgaatgataacttgcagaatattccttgttagggcagagagattaattttccatcttatgaatataaatcatactatgattgaaggctaaactacctaacatttcacaaaacaaaaatagaaagtactaaggaattttggggttcttgggtaggggttcagggtcaagatgctgtggaaatatatttatttgttggttgagttcattgattgattgattcattcattcatccatccatctttcttttccttttctttttttttggagacagagtctcgctctgccgtccaggtaagcagtggcatgatctcggctcactgcacccttcgcctcctgggtccaagtgattcttctttctcagcctcccgagtagctgggactacaggtgtgcaccactgctcctggctaatattttttcgtattttagtagagatggggtttcaccattctgcccaggctggcctcaaactcctgagttcaggcaatctgcctgcctcggcctcccccttcatccatctttctacccagccaacccacatctgatgaatgc

SEQ ID NO: 114468 - DNA, 1051 bp, Homo sapiens
gtattttataacaaatcccaaagatcacatcatgtcattcaaaaatacttgagtgtgtaggatgaccctccggccactgaacagtctcttcatgtcagtacctaggtttgcgtttgcattaactgcagtcccaagtgacaagaaatgccattttgcttgtcctcgattaatgagcaaataagagaggtggattaacatgtaaatgacgcatttgccgagtgataatggagaaagatttcagagtagtccaaattgaaagaagtggccacaaagtgagtcctctctgggccctctcccccagggtcctgcaggtgctacccctagtgagtgtatagcagcaggagcgctgtttggttttaaccaaacaaattatgtgatacagatttcaccaatctgtaaaaatcatcagcaaattactggtgtgtgaatttctttggacttgtgattttgcttatgtgtagtttgtaagtctgatggtttgttgtagtagagtggtatgaacacaaggcgtttctacccagctgtacatttgtgtgtatgtcttggggcctgtgagaccttttgctgtgtccagtgcttcctcgtgcttcccagatttgaaggcagcccttcggccattcctcagttagacagtcacagggctggtgtcatatgtgaagggagaacatgggcctcagaatcagactgactgtgacctgggacacatgacttcactttcattgctttcctgatctgaaaatgtgataatgacctgtacattttgggatcattgtgagtatcgagtaagattattcctgtaatcttgcatggtgcttgacatgcagtagcttgctgagatatagtgcaataattttctgatttcatattcacccttctattttccttcaattactttccttttgacatgatttctagaggcagatcacattgttttcttctgcatgctttctagattgtctgggtccggcacagttcaacaggaacgtgacctgagcagctgtgagtgatttgagtattattgctggggtcgcccctccctgccctttttttt

SEQ ID NO: 114469 - DNA, 1095 bp, Homo sapiens
aatagttaatccttctgtaaactgtgcaagctcagcgtagcttttggttttgttgttctcccgcttattcctgttgttaagcctggagtcattcaggattccttttaagcttctttcaagtagaggggctttgtagttcgtgtgcatactgtgtaaggccatgttaggagaaagacaggcttcaagggaatttatcttgatatggtgaagactgatggttacagtgcggtctaccaaacagcaactagtaaaacaaataaaacatattgccaccgttttacaatctcctgtctttggtgtacggcagcagaatatgtgaatctggagtagaatgccttactgggcagcaggcttcctttgcagagctcttggcctccgggcacctgcctcttcctgcttaggctgccctcaccccagtgcctccagggccctggagtttctgtggaatggaatctcgagggattgcaaaccccattagagcccaaggaagtctagaatgcttaatttccatgacaggagactttaggagatgtttctgggagtcccatttgcctctaggtttcatgaaggaggtcagaaaacaggtgatgtttctgcccgtgatgttacccggattgtaacccacgacctaattgggatgtggaggagaagtgatggcatgaggagtatttgaaatcatttcaatttacatccctatgagatagttattagaagttcatcacatcgttcctaatcagttttcagcatttgggtgataaactaagctgctggatctgttttctcctcctggctttagacactgtgctcctctgactgtgagccgccttctgattgggtcctactgctgggctctaaccatacaggcatttttttggggtgttgatgtgatacaccctcttactgatgtagatgtcatatgtactttgcatttgtaaaacgtgggaagctagttagtctgatagtctgaatcaagatatagaagggaatggggtgtgtgagtgtgagttagttgggagggggaaggagggcagggttaggggagtgagcctatgtaagagcatgaaattggttttaattttgaattaattttatttg

SEQ ID NO: 114470 - DNA, 1050 bp, Homo sapiens
acagtggaatcttttagtcattgatatttctgtcagtaacctgtgggcacagcagaacccatccagagacccataagttcctaatttcaccctaacgggtctttaattgaacctcactgtggcaaattaagtagttcagcgtggcagggagactgggctgagagtcagaggatcagagtttttaatcagcctgggggattagagtaactctctttacttatctgcttcttaattccttctctgtaagaggaacacatcagataagattttctggtaggtcctgcaagttcagaactgctgacttgttcttcgaagtaaagactcttctgagagaatcagacagcgcttgaagttgtccagggaaggaagttgccctttcttggtactgccccatctgtgggcttgtgtcagtaatttctctttctggagtgattgcgggttgtctttttccttccggtagatgtttgactggatcacacacaacaaaggcctgtttctaaacagctacacagagattgggaccagccaccctcatgccatggagcttcagacgcagcacaatcactttgccatgaactgtatggtaagacactcggaacagctggaccctggcatgtgacagtgttttagcaaatgggaggcatttggcaaattgtatgctagggctttcaaggggccttcggagtggctgttgattgtagcagctgaccttcacatggagggtgttccctagggttccattgtctcactatcccacattttaagttttaaacaaaaatgaaaacaagcaaacagacgaaccagtgaaacttgaaccaatgacttggctagttcagcacagacacttgggatgctggctcctgtgctgcacttcataggagcccacgggggccccagcaaagctgctgggaggcacagtgagtcccccagacggagcgctgtcagtttgctggctgctgttcatgacagcgaaaggagcaagcctgctgctgacctcagggcactagctagttctcctgaggcatgagatttccttccaagctgagctgg

SEQ ID NO: 114471 - DNA, 1036 bp, Homo sapiens
gtagaaaggagagcttgctttcacacaaatagcctttggttgctaggtacgtgtttttgggtttctgggttctggttaaaaaccagagcgctgggtccctcagttctctgtgactgcctggcagcaggcttgccatctggaccctgttcagtatttgaagccaagaagtgagtaatagtatatttgtgtgcacccacttgtgtatttgattgctttgtgctgaacaattatgcctttcagctagttgatttgtaattttacagttttaaaaatagaaatggaaaccaatacttcaagtttatggaaatctagagagcaaatatgtataatattatatatatcaggtgatgctcctgggagagatgtgatcactgttagaagcctgtgtttcagcaggtggcatctgggcttcttagaagggagcctcctatttgctctcccctaaggagccctcttttcctgcccactttccagaacgtgtatgtaaatataaaccgcatcatgtcggtggccaatcgtctggtggagtctggccactatgcctcgcagcagatcaggcagatcgcgagtcagctggagcaggagtggaaggcgtttgcggcagccctggatgagcggagcaccttgctggacatgtcctccattttccaccagaaggccgaaaaggtcagtgccttgaacccccagcccacgaggtggtaaccagaatagttcttcctccatgaatattggtgtgtgtgcaaacactcttgtgtagcacatactgtgagctccgcatgtgagctctgaagtcacttggccctgagtttaaattccagctcttttagtccttgctgcgtaaccttaggcaagtgacttagcctctctgttttgttttttcatttgtaaagtagaaataaaagtacctgtttgagtggactgttgatgtaaatgtgatgctaggtgccctacacagtgcccggcacagtaagcactaagaagtggcagctgctcttctcttcccctcctctcctggctccttctttgctcttattcc

SEQ ID NO: 114472 - DNA, 1050 bp, Homo sapiens
ctgaaggatcatgtgaagaggccctacctacttaagacacctgcatcccacacctggttaccttatgcatctcacacacactttgtgttgtctgattgtcactttttttccccccaataacatctggcgtaattaattactcataagtcttatgaatcacttttaagtaggaaaaatacataatgtttttctttctaaattgcaccctcaccttttcttatttctttgattaacccgaatactttcatttaattgtagtttgagaataaattgccataatatagcacttgatggcattttaattaaaactaccttttaaagttaatgaaccaaatagaatggcattttaaattttcttttgtgaagttaaattgctctccagctatgtcagaaagtttaagtacatattctatgcctagtgctagattgatttttttgttttaactgaggctttaaggaacaattttgttccattgtgatgatctgctgtattctctttaacatgtctcgagataaaattattacttttaaattttaatttgcagatatcccaggaatgcagtttctgttagttgatttatggcatttaaggcaaatagtatgcctattcattgagtggtatctactacagtgttttgtagtaattaatgttcttttattttcacctagtgttttgcatcatttggctttgtgatgtcattggatagctgatggattgttttaaattttatcctatataaaactgcctctgagtaaaactgtggtgtgtgaatgaatgtctgggcatgtgtgtaatgtgtgtacatgtacgtgtgtgcctgtatgtgcacacacatgtatccaaggacagcatctgtggcacagcctaggccaaacctcagatcgtgaagaatcactcatttcttttgtgggcaggtcagccaagatgggaagtcgctccttgacaagctccagcggcccttgactcccggcagctccgattccctgacagcctctgccaactactccaaggccgtgcaccatgtcctggatgtcatccacgaggtgctg

SEQ ID NO: 114473 - DNA, 1003 bp, Homo sapiens
aagataattgccagagaaagaatacagtgcaggaaagaagaggctggagccagtggtgaagagggattgagaggacagacattgtgggaatgaaatcatgaataatcgtgtttttgaattgtccaaaaacttctacaaaccatgaaatgttggagtttaaatctaattgttgaaaaattccccacattccttgtatcccttaggttgagcataattccacatccgtggactgatgcacttcccaagagggggcctcattaactcttccgaggcagcagcagcaagggcaccccctcctttccccccacaccccatttctcatggctcttctttctctcatctcatgcttaggttagaaaagggcacaaggtaaggaagcccttgggaataggctgaatctggctatctaatttggtgccaaatacttaatgtgcttgaatttaaaaacagcaaacatgtagaaaggtaattataattatgaggccagttctttaagctagctttttttcccctctcaaacagcatattggcttggatgtcagcaggagaaagtgttttttgcaatacacataatgcatatatggtcctgttagcaatctatagaaaatagatattgctcattaaggtaaatatttttgttgatgaatgatctggaatggtctggacttgttgtgtgaacaggaaattgctctgtaggctttgacttgtgaggtaaagagtgaggctggtaagattaattaaagtaaatactgtgacaataggatgtcaaaaccaaaaacgtgtttctgaaactcaaggaattaatgacacatagggaagtttttgccatattaagcatagagtaggagaggcaagtcaagaataaatgaaagaaaaatagtagtactttagaaggacgttaccagcagaagataaatttgtaaagacagtagtaaccgaaatccataaaaacatagtaagccggttagagacacgacagtggttttcatttgattgttttgag

SEQ ID NO: 114474 - DNA, 1021 bp, Homo sapiens
tctgttgtttataaattactcagtctaaggtgttttgttagagcaggctgaatggacaaagagagcaccagagttacaacatgcaaagtatgagtgaaccttcaatactatagctgtgcattaacaaatatgtttaaatatttaaaatcttttaaagtttttagtttttagctaaagacatcactgacttagttttttgctggttatctcctatccatcaaagaggacaaagtgggcatttgatgtagtgtaaatgcagttgtccctcagtgtctgcatgatcgcccacatataccaaaacctatgggtgcctaagtcctgcatttggtcctctgtatatgtgggcttcacgttctgcaaatactgtagtttcagtccacatttggttgtggatgcggaacccttctgtacggagagccgactgtacttattttttaaaaccacataaaagtggacctgtgtatttcaaacccatattgttcgcaggtcaactctagtttgttagatattgtcagcgttttgtgatttaagtatgagacccaatgaactactcagttccaactacgaagtttaaaacataagattatactgctttgtttttactttttctttagtgtggtggatttcacctagcaagaacttttaagtaattaaattcatgaaatgcttagcttttgcagcatcttagtttaaagaataaattatccaagctcaagactgaggcatgtaagtgttaggttttacttcatgtgtttgagtcttctaaagaagagatggaaaaaaaatgactctgtagttaaacttgaattgccttagtagtgtagctttaagccttataaaattgctaagttaaattggccctgtgtgacttcctaatcactgtcttatacaatacccagtcagtttggtggcccagtggtgcatagataagttgagatttaatttaatcattattgcatgcaatgtttatacatagaaaggtttccacttttaatgtaagagatgattaaagtcctgctgg

SEQ ID NO: 114475 - DNA, 1056 bp, Homo sapiens
aggggcaaatattttaaatggttaaaatgtagccttgctccttctgcctcatttagtttggtccttttttaatgtcatgatcccaggatcagttccttcacggtctcctcagtacccgcgctggtttcaccagccagcgggaggatgagcacatccagtgtgcggtaaaatatccaggatgttgcggggaatacgctagtttttgggtttttttttttttaactaccaggtggaagggaaaacgtttgacccctaaagattcatggcgcttcccctagaattgagaggaagtgatttctatagactctaacagactaattctagcacgttttcctcatactgtactatttttaggagtaaaaagatttaaatgtgggatgatgttaagtttactagaccaagtgacatattttgaacaattggtaggaacccgaatgtgttttgaaaaatatctagagaaggaagattttaaaactgtgatctttcttattattagaagagtttttcttagaacaaaaacagtaacagtggctagcatttacttatttcttcactctgcattgtcttctcattgaaacttctaagcaactttttttttttttttttttttgagactgagtcgcccaggctggagtgcagtggcatgatctcagttcactgcaccctctgcctcccaattcaagcgattctcctgcctcagcctcccaagtagctgggactacatgtgtgtgccaccacgcccagctatttttttgtatttttagtagagacagggtttcactatattggccaggctggtctcaaactcctgacctcaggtgatctgcccgcctcgacctctgagtgctgggaaatacaggcgtgaaccaccacacccagccccaagcaactttttgaggcaggcattattaccatgcccattttatagatgagaaaacagagctggatccaggtaacttgtcaaagttacaccctaggaagtgttaagtcagtgcttgaacgcaagcagtctggctttgcaacctacactcttagtcattattgtctattacctcc

SEQ ID NO: 114476 - DNA, 1056 bp, Homo sapiens
cccagccgatttactgtctacttctagtggagaccaaatactttttcttttctttctttttgacttttagcttctcttactatttttgaacaccattaggaatattactggatttttgtatatacggtatattttacacagttttggtaatttttctctttggatacacaaagagaaaaattatttatcttctctttcggtatctgtggccattgggaaccccttcatctggcttctgtgtccatttatttatttatgtttaatttgtttaaacagctttattgaggtgtgatttgtataccaccaaactcatgcatcttaagtgtttgacgtctctgtcctttggcagagagacatctcttccttccttacttggtacagagtgagaggtggctgcatgtatattttttttgtcttgatcttaaataccttctttcagattatctcagacctcgagtcttggaatgatgagctttctcagcaaatgaatgacttcgacacagaagatctcacgattgcagagcagcgcctccagcaccatgcagacaaagccttgaccatgaacaacttgacttttgacgtcatccaccaagggcaagatcttctgcagtatgtcaatgaggtccaggcctctggtaagagggctcactccatctgtgtccgttgtgatttcttcatgtcgtcatggcaattcggcttatttcagtgggatgactgcaaattttgttagttcctatgataaaggtattatagatacctgttctttaaaagaacgtttgcatttttatgtaatacagtcacatttaacatggttagagtactcacccatgatattctcacatactattttaagtatcatgaactttaattctacacaatgatatgttgtatctctgtaaatgaactataaatcccaggaaaacattttcacattctttatttttttagtttatgttttaccagcagatgtcactataggttcagaaatgtattagaaacttagcaacaacctgcatactgcattattcattttacacaaattaaatgcttaccaaa

SEQ ID NO: 114477 - DNA, 1055 bp, Homo sapiens
taagtaaacgagagggcaataggtattatataggttacttgaggtcactgccacaccttactatccagaagacctcccacaatctgtggtttccactgttagaatttacttcctctgagtgtgtgtgcagttgagaagctcatggtttgaacctgatcattgtagcacaatgttattcataccttggttattatgccattcaacactgcagttaagttggaaaaagagttcgtgaaataaattagttcccccttttcaagcatttgccaatttttcagtcctaaaaatgctggaaaggaatgaaaaatatttttcttgattatcagggaattcctggtgtcagtaggttttctaaaatatggcccataatctgttttgacttgtggactaattatcaacaatccactggaccctccaccttttcatttcccatttgctactaaaaataacagaactaattaaaaagatgcagcacttgcagtcaggtaccatggaagaacatcaggctgttgcctggattttaggatgatgaaggcatcagtgcctcgtacctgccaggagcaactggactatcttgcacgcttgtatctcacccctggtggtccacaggattctctgggaagtccactgcttggagttatcctgtgtaatgtttcaggtgctgggttggatccgcaacggagagtccatgttaaatgccggacttatcacagccagctcgttacaagaggcagagcagctccagcgagagcacgagcagttccagcatgccattgaggtaagggcgctgggcctgcctgtgtgttggctctttcattcctcaggacaaacatcctgaatcccccaacatggcactgaccatgggaaccacatggggctggcttggtaaagacgactcagaggacccaaattggcaacgcttctaagtctgcagctgattacaggaaagggaaacagtgtggtgccacggtgaggtgaggatctgcatcccagccaggcagcctcactgcaaggatcccaaaggtctcggaggccagggggttcctgttgttctc

SEQ ID NO: 114478 - DNA, 1091 bp, Homo sapiens
caatagttcttgaaaacttttcactggagtccagagtttaagttgcaagtgaaaataaaaagcattcactctggccaccttttctctgcttgttcatttgcttccagcagctattatgagaaggatcaacaggaataataaacttggaacatttcaaccacttctttggctgttaagggtctttcctgctatttctcagactaagaaccctacaaccgagacccattctgggaggtcctgatcaatttcatccttcattagctaatttaaacatagatctagttgtttctcggcataaaaccttttttgctaaactgtctgctgtgcttttagaagcatcctagtgagtattaactgaaggtatttccacaaaatcatgaagaacagagtaactgtagccatcctggttcctttctagtcagtggggacactgacaaataagccttcccttttgttctctgtctctagaaaacacatcagagcgcgctgcaggtgcagcagaaggcagaagccatgctacaggccaaccactacgacatggacatgatccgggactgcgccgagaaggtggcgtctcactggcaacagctcatgctcaagatggaagatcgcctcaagctcgtcaacgcctctgtcgctttctacaaaacctcagagcaggtcaggggagaggttcccttccttgaactccactgatactttattttgagcttaatttattggacagctcaatcattgttaacatgttcatcgttattgaaacaatcagttgccagtcaagcagggaaaaggcattctggagttaaaattattcctgtgtaccttagatgtcaaaggtaataagctagaaagtagctgagaagacacctctcttcttgtcatttaaacataggacctgaagcacattagagagagacaggatatttgctttggttttgttctcgctctgaaaagtctgcctgcttttgaccctgtagttgttctccagccaggtggagcccatggctccttcttatggtcttgatcctcctgacagcatcttcatccccagagcccgactgaaagggctttccagggataccagtcggcag

SEQ ID NO: 114479 - DNA, 1025 bp, Homo sapiens
gtagagctgggagtctccaggggtggcccagtgcatgcctggcaagagacaaaaggagcctgcacgttgtgttctgaactctcaacttcagtttcattttaaatgtccgtttcatgttaatgaagtccttactaatgatcttagtttaataataaaaagattaaacaaatttataggttgatattatattgaataggttgataatttattgaataagttgaagaatataaacagggagaaaatgcaaattcaggatgatatttactgacattggctattttgttaaagtaagtaaaaaataaatagggggaaagggaaaaccagagttatctataggcaaaggatttttaaaagctcaaatagagaaaatacatcccaattttatcactataaagtattattaattttgtatacctaaggcatagttaataaaaacaaattgaaaaataataatatataggttatatcatttgagtgtaaaaacctgtaaaaccgtgtttgtgtgtgtgtgtgtaagtgtttagaaaaaggtctgggaaaacgtatactaaattgtaataggattgatgtggaaggaaaatggataaagaaactaaggcacaaagcaagtaactttgaccagggatacacagcctaagtttagttttataggaaaaaaaattgtgataatcagttagcaaatgattcatctcacacttttcaaaacaatatgattggcaaaaactttgtacattacattctactgtctgctcatctgattcatctgttagttgtcacaaaataattttgttacaccactataattctctaagttctttcagtaaaacatatttattgatgggctttttcttctggaaaaatgtgcaactcacaaaagcaaccgtttttctgcatgaataagtcttctgggccagcaagttatttgcattgataattggtttatttggctcatttcctgtagaaataagttcacccatctctcaatattgctttcatttgttggttgtgtcctgtcttttctgatt

SEQ ID NO: 114480 - DNA, 2105 bp, Homo sapiens
aataaaattatgaaatcgaattatctttatggcatatgccatatgtgtgagtaaatatggctttttgaggaaaaatataagaatctgcatattgacctgaatgttgtcccaattaaggcttatacctgcagaggctgagtccttccaagaactcacaacagttttgaggctcttttcaagtcaccattacaacctgtggggttgttgtttttcagagtctgagtatacgtcctttgtagtattttctgaagtgcctctattgttgatgacagatttcgagtttttggaaaaatctgacaattatttcaaatgtataagagtgggaaataaatgataagtgggataatatttttggttaaaaagaagtgtttctataaagtagcaagattggttatctcctgtggcccctaccctggctttgaaaacataacaggaatttttcaatcatgtagagagaggacagctactttgtattatatttatttgtccatgtttatgttttctgttactgttactgactcctcctgctcttctttgccactctctgctcctggtccccaaagctctcctttccctcggccctgaggtgctgggctctctccttttccacggctcctatcctggaggctcacacaggcaagcagggctgcagagagaccaggcatggggggcgcagcaagaagacccggcccagggtgggggtgtggtgagcactgggggagggcagggcgcaggaccaggggacagtagctgcccccagaggcacaatgagctctaaggagggccgccccaccctcccctgcagggagggatcatggcttttcctcctccacatacacacctggctggacagttttcactttttgttaatatttagatattacataatagttatgcacattatatgatccgtatttaggggcgtgtgtgtgtctgtgtgtgtgttagacatgggatcttgctctgttacccaggctggaatacataatagttatgcacattatatgatctgtatttaggggcgtgtgtgtgtctgtgtgtgtgtgagacatgggatcttgctctgttacccaggctggaatacataatagttatgcacattatatgatccgtatttaggggtgtgtgtgtgtctgtgtgtgtgttagacatgggaacttgctctgttacccaggctggaatgcagtggcaccataatggctcagtgcatcctcaaacttctgagctcaagggatcgtcttcaaactcctgagctcaagggaggctgaggtgggaggatcgcttgaggccaggagtttgagaccagcttgggcaagatgacaagatcctgtctctacaaaaagaattttttttaattagttgggcatggtggtgtgtgcgcctaaagtcccaagctatgtctgcttatttgaatattgtttgattataaaggtattaagaaaatgcctaacatcacataccacactcaaagctagatttaagatttgccatctttcacctctgctccactctgcaggccattgtgtatggccagacagcctgctcactgcccagctccaggggccatgcatgggggatgtgatgtacacatgactatttggaattgagtaacatggtggcctgctccactaataaagtgtatatgaaagaatttttccattcctgaatactccttttcctcaagtttgatgtgtggttattgaaagattgggcaatgacaggcttatttttattcttgtattttataagaaatgtctaaaattgtgagtgatatatgacctttctgatcctcagatatgtagaactgtttcttttgttgggtttattgaattggttataccaggaggaactggtagattttgaaaagaacacccctcacctttccttttcttagcaatctttttctttggtttctgactgcctttcccttaatcagaaaacacctgctttggtgtttggagatgtcctttgatttttcatcatgagctgaggctccctcacttgccttctgtcacccgatcttagaatcttctaagaaaccattttgcttttactgtatagagaattcttagctctgaaaggaaagtctttcagtgcacttgtta

SEQ ID NO: 114481 - DNA, 1034 bp, Homo sapiens
tgtatggttgtctgtgtatctctgtgaaaaataataaactatgcttaacttaatgaaagatcttttctgtgtacatacaaaatagaataattttagagagagctctcaaacagggaaacaaaatttacagtacctctatatagatgatttcctgactagtgaattttccttcacattttctgagagttaaagcaatcaacacgacacagaggagcttcatgaggaattttgttgagtgcctgctgtggggacagccgtggccacacatgcttcaggaaaaccaaaaagtcagatgactgcttgccccgaaagagctgtgggtccagttgggcacaaagagtaaacatgcatagagcgaggagctgtctttgctcagcggctttgaggagagtagcagcattgtgaagaccgcgttcttcgcatacattcctccatgcatccattctacacatttttactaagcacctcctagatgaagacgttgctgaaaaatagtctaagtttattctttgaggtcataaaaatgccattcgttgtagcagagctgaggagagatagctggtcaggaatccgggagatggagtgggtggacctggggctttggtctcagtttctaccatcagccggttttcctgttcagagctcagagttggagtcaagtcgccactgtgtttgaggtttctggcagtcggattcatttgcctcacaatactttcctgttgttttttgcagcaaaccaaagagagagtgaagctattgatacagctggctgatggcttttgtgaaaaagggcatgcccatgcggcagagataaaaaaatgtgttactgctgtggataagaggtacagagatttctctctgcggatggagaagtacaggacctctttggaaaaagccctggggatttcttcagattccaacaaatcggtaaatggccttgtgcaaactgaataaattatggtcttcttcctaacgccctctctgctgatttaattaactgagttcattggctctgttattccacagagtaaaag

SEQ ID NO: 114482 - DNA, 1032 bp, Homo sapiens
tcccctttgaattagcgggtggatactgttctatttgtgattcacctctccaaaatgatcaatctaagactaatacttttagacccactctgttatttcataaatccataaaagtagatagtgaagtaagctgcaccctgactgtactcctcactgtcttcctctctttaaggttcataatggctgagctcattcaaactgaaaaggcttatgtaagagacctccgggaatgtatggatgtaagtaagttttttttttttttttttgcttgtttatttagattgagcataagcttgctattttattcttacctgttggtagtccttagaataatcacaatttttttctgtcatttttttaaatgtaaagtatgcttcagcagccggtttcatgtttctgcacttctgtagagttctaggtttgtttttcactcattacagagatgatacagcattaatcctctcattctgtttatcacatgatggcctggctaacactctctttgtatagaattgtacagcagcttcagagaaatgtgcctactaattatgactggcaactaatactcagtggtatcaggaatattggttatacttgtggagtaggttaattccaaaatttgaagctgggaataattttagagttgaaaagtataggaactcctctcaagtattaacagcaactgagggccttttttagaagggttttttatgttttgtaaaagggtccagtccttagttatactttcacttatacattaactctgtgtgtttacagatgtcagaaacagctgtttcttgaaaatatggtgattatttttgtctaatccctgtttccctctcggctagacgtacctgtgggaaatgaccagtggcgtggaagagattccacctggcattgtaaacaaagaactcatcatcttcggaaacatgcaagaaatctacgaatttcataataagtgagtggctttttctttgggagcagttacgcttgaaatccatgtgctgaagtttcatcacaagaaatgaacca

SEQ ID NO: 114483 - DNA, 1030 bp, Homo sapiens
attgtaatatatagatgtatgtttgtgtgtgtgtatatgttattatttatattcagtcatttataatatcattactatttatattcaatacattttttcacctgtaatactgtatacagaaggcataaactattaagcttcttttccccctcagtaaaacaaaaataaatgtgaatctttttatttttcctattttaatttcatgatgttacgaattttcaaaaacaacctaccagtaaagttttacaaatagtgccataacaactaggataattagaaggttaactaattgtgttctcattggagtaaacgtagatacaggtcatctgtgttttgaaagctgttgcagcggcttattcagcacaaaagagatggagctttagaacgtgatacacagagtgctttctgggtttccagaacttggtcaaatatgtgccaatacattttgattgaaggataaggtgctattgaatagtgtgcatagtttggtgcataaggttgtgaggatgttggacttgttttctgtctttacacttgtgcatggactggtgggatcatcagctcttatgtgaaagtctggggaagtagaataaacttttcagtttctatctttgagatgaagccctacctgtagatgaccctgttttaattgtcattctcctgaccattacattacacattacacatcactgcctttgttaataggaagccttctcccaggccaaagtggccttttcttgttaatatttcacatgattctaggtctttgccatcagacaaaattcagcacctgtatatggagttagaaatattttagtattaagtatttcacttaaacagtgagggcacatagcacatttaatgtttggaatcaaagccattttagaaacccttatgccccagcaaaataaactatcatcagagtgaacaggcaaccaacagaatgggaggaaatttttgcagtctagccatctgacaaagggctaacatccagaatctacaatgaacttaaacaaatttacaagaaaaa

SEQ ID NO: 114484 - DNA, 1136 bp, Homo sapiens
gttaacctcccaacaatgctagtctgcaggcatggaaactagcctcagactgtaaggagtgtgcccagaatcaccactcaaacacgttaacaggctcagctcagaacacagatctggctgatgcccagggcttccactgaagccacggagaacccatgcccaggaggcttcctctgtcttgttgcttgtccctgatgtcacacccctcgcggcacaccttgtccatacagaccgcaagtattggagtcaggctgacctctgctttttattagttgtgagtgactatagttaaaatcacatttaagaaaacaatagtgattagtcttgacaatagaaaggtaaacaaaacttagaatttgtgctaagagttgtcacaaaatgtattttatttttatattatatatcatcaatacacattttcttgactacctaaaaattgacagattttgtctggtaatgttcagcataccattttctcagctggtgaatgttattaagcattaaaatgtagaaacatgcattcatcccagtgatggtattctatgaatcctgccatgttccagggactgccctaggctcgacaacgggaagttattatgtaatttgtctagatataaaagaaatttagaagatggagttacaaatgctggaactcttctttaccctttttgttagcaagaaaaatctacagacagtaataagtagctacatcgttttgtgaaagtgatactattatgggatttttcaattggaaaagctctcctgtacttttatatcaaaatgccgttaagtgattatgtgaccattcccgcagaaatatatagttactatgaatgcaaaataagtcaggaggctaatttgttcatattcaaatttgtcctttgctttctaattctacaaaggcagtttacctttcagtgtcctcaagatgtaaggattttgttttcagcatgtagttctgctaaactggtgcttaaatttgtaaacctcgccttactctgccagaggttcttcaggagaacagtgataagctctcttgagctccccaacaaggaaggttttctgccagttgtcagttagtaggctcagtacactgcatttgtgagcagtgtttgccatgctgcttagaatcacag

SEQ ID NO: 114485 - DNA, 1156 bp, Homo sapiens
ggagaatgcatcagggggaccttgactgtgggggaggggctgaagctattgacctttctctgcatgcttccatgttctgcatatattacagagggattttgcctcttagccgttaaaattattgatgaaatactaaaagctaatgctattgataaagaaattggagaataagctgttaaaacatcatttgccctctgggaagctgtgtcattaatactgaagagaacatggtggcagcccttttgcaaccaggaaagactcattttgcagtttgttgcttgtaagattgcaaatagtcgaatcttgattgtcagatagtaggattttcacatgttggtttccttcccctgaattttttgctcgttgacctgcactggggtctccagtaagagacgctcacaggaagcgaaggatgaaaccagtcacctgtagcctaagaacacaatgtcctcattataactcacatgacagctgagatcactagtgacgttcttataacctaacatggccacaagtaaccaaaacctgtttccttggtctctgttctgcatccttctagaattttactgtcacctaattatataattgtctttttatccagacctcagagttgggtgtcacagaacatgttgaaggagacccttgcaaatttgcactgtgggtggggagaacaccaacttcagataataaaattgtccttaaggtacgttcatttgaagctgggaatgtgctgtttgaaacatttactgtggccatccatgcttgcttttccgttgttttcatattattattatttgttgttgttgtttgtgtgtgtgtgttctattcagattggtgactaccacaaaaagaatagtggaataaattcagtttggtgttctggtgatgaaacaatttgagttaaactttcacttgactcctgaaagggcaaatgaagcaaggtctttttatatttttcccattcttccagtctttgaattcattgactctataagagatgcaggaagtcagggtacaggaggaatgagatactgaccaaaaactctgattgcgcacttgacctgtttcgaaaggaaaaagtcacctggtgcgtgtttgaggacctgcgacaggaagtcgaggccaaccgtacccacagtccttacagagtcctcag

SEQ ID NO: 114486 - DNA, 1728 bp, Homo sapiens
caggcagcttgaccagaatctctgtctaggagacagaggccatcatcaaaaagtcgggcaacaagggatgaggatttagacgtggagtccaacaaaagacataggaactgcaggagcaggaggcctctgtcccctgggaagcagagacccaggcttgcctctgctcagccccacagtcctcccccttctcctgccctgtgtgtgaagaggggtgctgcccccacgactggaaagacattggcatgtgccggcctgcccatgccagccatccacatgcctctgcccgtccactctctccttttgagcctcttttcagtataagagctgttcaggcttgaaggatatgcagcgagcgagttaaacatggcccctctttgcacaccatggcatgcatcattctggcagctgggtaagaccccctccagtatcagatgttcaggctgccttgcctcaccctcgcttcagaactcagggacggtatggaactggctttacagatttgcctcttgttgcttgctattaaagttagtttcttatatgtctctgactcttactgctctgaccttctaggcaggaggaaggagcaccttcattcagttctagtgtctctacattttcacaacctcagtgcctcagtaattttttcataacaccctgatccaactttcacatttttatgtcaaatgtaaaaaacatgcctattaaggtcaaatgactatttatttgcttgcgaataataagctgttttaaggattgcaatgagtctaattactcagatcagccaagaagggtccaggatcatgatgagccgtgctcaggttcacgtggtggttttgaagctgggctagacttggaagtctgtcggacactgagaatccatggaatttatgaagaccagatttcttttatcggctatatatccttaaaatgatttgggagaggataaaaatacagcttattttaaatgaacaagaaattcaattacacaatttgtttttcaaggagataattttgtgtctgaaacaagactctgctgtgaacatcattccattgagaaatgctatcttgtggccaggtgcggtggcacacacctgtcatcacagctgctcaagaggctgaggtgggaggatcgcttgaggccagcattttaaaaccagcctgggtatcatagcaagacccagtctctttaaaaaatgccatctgttttgtggacgaagtttgctttggaagcttgcatgtcccggtgtcctttgggccggccagccttcgtgtctgatggcgccttctgctcttgctctggctgtccttcctccgtctcagcatcttggtcatgaattaaacagacgccgggcatagcaggattgaataagggttcagcaaacccttgtgctccagcagtcttatttgtgtttgtcgtttatgctgtctgccgttacctcagaggctctggggctggggcctaggcctggaggctgtgtctgtgcccccagcgagtctcttctgcattctgggctgaggcccactcacctcccttcactctcttccactcgagtgtgtagtacgtgggctcactgttgaaatcggtgtcacgtcaccattgttgatggctcagtaaatccaagttctctttccttcccattgtctcaacttgtaaaacttgtcacttttatgtatttattgacagtcttggtcacaggaagtaaacagaaatgtcaagaatgtgtatat

SEQ ID NO: 114487 - DNA, 1184 bp, Homo sapiens
aatgttgacttttctgtgggtccaccctgcttttctccaagctctccttgcttctctccaagctctctcccaagggttttcttgtccacccgaatagtttacttttccacttgactgtcttagcaactttttcaaatctgaagtattcagattccctctcccaccatctccccacttgttcacccaagaacatggctaacgcacgtgagggtctctccactgcccaccacagtttttaaaaactggtaaactccacataacaaaatgtatcatcttaaccattcttaagtctacagatcagtggcattaagtaccttcacattgttatgcagccgtcattaccattcacatctagaattcttttttccgtcttacagaactgaacctctgtgcccatggaacaaaaccctccgctctctcctcccagcccctggcactgcccctttcctttctgtctccatgagtttgactgttgtaggtgcctcatgtgagtagaaagtcatgtagtcttgtccttttgggactgtttatttcttgtagaagattccgtgttctgacttttgtcagaatttcctttctttttaaggctgaatagcatccccttgtatgcagatgccacattgagttcaacattcatctgctgatgggcacttgggttgcttctgccttttgactcttgtgaataatgctgctatgaacatggatgtacaagtaatctcttcaagtccctcctttcagtccttctgggtgtatacccagaaatgcaattgatggatcatatggtactgttgtctgaatgtttgcgtccttccaaaatccgtatgttgaaatctaaccgccaatgtgatggtattaagaggtggactgttgggtggtaattagatcatgagggcagagcccttgagaatgggattactacccttacaaaagaggcccagggagcccttttgtccttccgccatgtgagggcacagaaggcaccgtctttgaggagcaggccctctttaaatactaactctgccagcgcctggatctcagacttcccagcctcgaaaactgtcagcaataaatttctgtgctttataagttatccagtttaaggtattttattatagcagcaggaatggactaagacatatggtagttctacttttaattttttgaggctgcccactcagttttgt

SEQ ID NO: 114488 - DNA, 1026 bp, Homo sapiens
aaagatgtttccatgctagcattctgaatctggtataaattttttaaaataataataaatgtatacatgaatgaagagaaatcattcacctcctgaaataaatcagtcatatagtttaaaccactaattgcacaatttttaaaaccgttttgcctgggagagtctttttgtgccacctgcttcatttaaagacatgtttcaactttttaaaaaatctgcgtatagccccctgcccccaacgtctttggtatcctctttaacaaagcagccaaagtgatttcattttttttcaacaaatcataggaagacattagccaaaaataaatattcattatgaagaatacacttccatatgccttcttcatgtaagattagatctttcatttctaacactctgtgtttaatgtcaagaactattatgcccatgggttcaacattcatgtttcttaactgggtgagcacctctggaaggcagactcagatggacagaagggtgtgtgagcaccgtgggactgcttatttcccccagaattaactttctgtttccttacatgatggttgtctattcaggacaataataagtactttattgccttgggaataacttcccatatagagaaattaagaatcaagaacccattattttataacagggagaacttcggtatccctcagtcagcagtacacaaaataatagtctcatacgcatgctgaatttgttttgttttgttttgtttttaataatctttctttgtatgagtaatacgaatcttgggtaattttgtgaaaagaacagccatttgactttttgggaacacagaggatcagaaacatctgaaaaagccacacaactagaggagcattcagaagttcttgctttctgagcatttaaacagaccagagcccagagtgccgcagcaggctgtcgctccttgcctgcctggggcgggggctgggggaatatggggtcacatgctgcatcctcgccctcagcctccatcagagcgtgggttgtctcacagcagg

SEQ ID NO: 114489 - DNA, 1124 bp, Homo sapiens
ccttgccagcacttgcgaaagttacggttagaacgttcccttgcctagtcacctctttgaaaaaaacactgtgatgttacatgactgcgattcaaatcagacactgtctgcttcccacatgtatctcagacaggttttatttaatgtttcttgtcagaatattgtaaattcaaaaggatgactttaaataaatgtaaacaaagacaaacttgtggtctttttgtctggaattactttcacaagagatggagcttgcaggggaatttactgtctgaccagttactaatgtgagcccttgccccaccccctccttttcttaatttcttctgtaggcctcttctcggttattagtccgccccaccagctccgaaacaccgagtgcagccgagctcgtcagtgcaattgaggaactcgtgaaaagcaagatggtgaggcctcccagagaaagtctgacttttggaagctgctctgtgttgctacttgcagatggatttgcccttgtctttgtattgctctgggctgcagaatgtggctgtggcttatggcacatctcaggagtccccatgaccaccctcgggttcactgatttgaaggactcagagaactcaggaaagccattattcccacatttgcagtgtattcccatgaaaggacacagatcaaaataggcaagggaagaactgcatagggcaggtctcagggagtgcctggttcaagctgccagccatgctctcccagtggagtcaggcagacagaggattgccaaccacagcagctcacccgagccttggtgttgagtgtctgtttgggctcagacgcatatggctgactgctctgtgtggctgaccttaggtagtctcctgcccctccagagatcaagacactgtcacattgctagcatagactatttgccttggtcccaggcccccaggtaaacagacattctcatcaagcagaacattccaaggacttacaagttccctcctagaagctgggggcaaacctcactgcacataccctgcctgcagtcactgcaaatgtggtcagctccagtctgtctgaagatgtgccagggtcagtggtacccacagttagactctccgttttgttttgcaacccctgag

SEQ ID NO: 114490 - DNA, 1050 bp, Homo sapiens
aatagaaattttaagccacattttagcagcatattcaatcaactgttgtttaaaaatcagtttataaaaagaatattgttaaacccttatttaaccgattacacaaataatccaaaaagaaaagaaaatctttctgtttctaagagataaatgctgaaaacaggagatatgattctgaccaaatatttaatatttacaaactgtttaatgaaaccatttacatttatttaaacttctttaattccttagaagatttttgatctgtgaatgctgaacagtccagggaaataaaattacagcaatgaatgtaataggtatattccaagtatcagttaaggatacttttcatatcggttttttttgtttgtttttagacaaagaactggttacaagacagtgcatgtgtccattttgccctctgtgactattaatcaataagccactagttgattcagacatattccatgaaatacacttatcataactgtttaattgtagggctacatggcacttatgaaagaagatggtgttcctgatgacatgaaaggaaaagacaaaattgtgttcggcaacatccatcagatttacgactggcacagagagtacgtaaacatgcattgtgcccgatggtgtgcaaagcagccacacttgctaaaccaaggcaggccaggccaaagggaatttattctgttcatcgtattacctgtgtagcctcctggagggagctggtgcaaaggagatattgatgtacccaggagttctgcagtagcatttggtggcacggagagagtcttgtctcttcttcgtgctggtccatgtcgagagtctgtggaagggagtagctggaagcaccagcgtggagccagctgccggagctgctggcctggtcctgaccccgagccctcggcctccctgctgtacacttccattcttcatctgcacacccacattataatgtgggttttttgtgaagagtgactgagttaatacttttacctcgtgggttttttgtgaagagtgactgagttaatacttttacagagtacttag

SEQ ID NO: 114491 - DNA, 2123 bp, Homo sapiens
gcagcttgaaatctacgtaggaatgcctttttgttgtgttactgagagaataatatgataaagtagaactaaggcaccagacaggtgtggtggtacacacctgtagacccggctacttgggaggctgaggcaggaggatagcttgaggccaggagttggaggctgcagtgagcttatgattgctcctttgaatagccactacactccagcctggacaacatagtgagagcttgtctatttaaaaaaaaaaattctttcagaactaaagtgctgaaccccaatgtctggccagtgtgagtggccaaaaaggttagcttgtgtgcattgtctcattcctgtagtcccagctactcaggaggccaaagcaagaggatcacttgaggccaggagttcaagaccagcttgagtaacatagtgagaccctgtctcttaaaaaaaaaaataaaaggtcagctgctgttgtctttgtcaccattatcatgtcctctccatttcccttgcaggacttcctcaagtattccaaaaaggccagcctggatacatcagaattagaggtacatgcatcagcggctgtgggcacccaaatccccaccagcctcttttcctaatccccaagtgtctcctaacagtggtctggccctgggagggggtcaaagcagtggatgacagagtctctccagtgcatctccataagccctgcacactagagggtggggaggaagaacagaacttcatcaggtcagagggtgagcacgtcagattttccctagaggaacttgagctttcactcttctctctcccctcccacagagagctgtggaagtcatgtgcatagtacccaggcggtgcaacgacatgatgaacgtggggcggctgcaaggattcgacgtaatgcggctcttgttttttaagagagctcctctgccttcatctctttcttttgtcttggattatttctctccacatagagaaagctgatccttttcacttggttttctggcttctctcactttacctcaatctgattgatattttatttcctttttttttttttttttttttttggtgcgtttggtttgcttttttgggacttgcctgtgctcaaagcccagtgtctcatggcagaaacaagcaggaccgggctttgtctcttgggcccagtactgtaagagctgagtttcctttcctcagcacttaagaccatggttagctatggatgtagtaggacctcggaggtccccactctctcatctctgggacttgatacttcctcattagtttaagatatgtttgcatgagttgctagactattcatattacatattagctattacatatcctcaagatgaattcagaaccagaatcttcttttaaaaatttgactacggagttaaggaggcaggagaagtttttattttcttgcctactgttttgctagagaattagcattgaaagttctggtgctatggttctctctgacgcacacacagaggccgttggagggcttctgaaaactcctgtgcatgcctgatgagttcctgctggcgacccagggaccacactttgagaaccactgttctagtataaaccagacatttaaaactccacttttaatctgtgactgtaattgaggcgccagaggtctatacaaatgttggcaagaattttatttagataattattctgtttagagccaagaacagtaaaagaaaaaaaaaattaaactccataaattaataaaagaaaaatacattattccataggaggaaatctaaagaaaacagcttcagataacttagaaggcaatgttttcttctccccttccttttccccctttatttcttgttttaggggaaaatcgttgcccagggtaaactgctcttgcaggacacattcttggtcacagaccaagatgcaggacttctgcctcgctgcagagagaggcgcatcttcctctttgagcagatcgtcatattcagcgaaccacttgataaaaagaagggcttctccatgccgggattcctgtttaagaacagtatcaaggtaacgtgtgtctctgtgtgatttctctgtgccagcgcatgtacccgtcacaccgatacactgtttccttttaatgatga

SEQ ID NO: 114492 - DNA, 1037 bp, Homo sapiens
aaaatcactccagcactgtaggaatttcgtatatattttttacatatttttataaaattatttgacatattttaatcatgatatcacatacaattttataacataggttttagtgatatttgagatttgtttaatggtgtcatttactccctgggaagtaagtaaggataaatactgaggcatcatagaggggtttgggaaacaggtaatcccagacgcatatttctagttaattgttcaggctgttagttcaaactattagtttaacagccttgtattccccatgtacctgagttaagaggcattaaaaagcttcagatgttttctgaggcagtaaaaatggcagttcaactgaaaagtgcttgtttcaggattgagttaggatgaacttcactttgcacttggccagtggggatcaatgtgctttaattttttgttgtggtaaaatacacataacataaatgttccatctttaattacctagctccatgggattaagaacattcatgttttgcagccatcaccatcatctgtcttcacaactcttcatcttgcagagctaaagccctgtacccattaaacagtaactccccacttccccacccccaagcccctggcaacctccactctacttcctatccccacatttgactactctaaggacttcctgtaagtggaatcataacaatagttgtattttgagactggcatatttcacttaacataacgtcttcaaggttcatccatgtcgtattgtgtgtcggaatttctttcctcattaaggctgaaaaactgtccacatagcccacattttctttgtccattcatcggtcagtggacacatggtttgcttcctttccacctgttagctattatgaataatgtttttttttttttaaggtgagttgcctttgcctggaggaaaatgtggaaaatgatccctgtaaatttgctctgacatcgaggacgggtgacgtggtagagaccttcattttgcattcatctagtccaagtgtccggcaaacttggatccatga

SEQ ID NO: 114493 - DNA, 1034 bp, Homo sapiens
cagactttttgtgttcccttaaggccttcggctcattggatgagggccattcaccttagaaagggcacatgcctttactggacccatcaaaatgttcatcttattcagaaacaccctcacaggaatacccagaataatgtttgaacaaatatctaggcgtcctgtgacccagtcaagttacacataaaatcagttatcacaggcacctttatattttcatcctcaaactttaagagattgttggttttatctcctggttcttaaaaaaaaggaacattttctctaacagaggtcacagttcgtagaggatttcccatccccctgcacacacatacgttgaatattcagcttttctttaacgcttccaggcagcacttggtgaatgttggaaaggcataatacccacagtgtgttcatttcccctaggaagtcaacatcttggcacacagcactccgtttaaggaaaaaatctgagaaaaaagataaagacggcaaaagggaaggcaagttagagaacggttatcggaagtcacgggaaggactcagcaacaaggtatctgtgaaggtgtgttcgggggtcttcaggagtccgtgtcatcccagcatgagagaaaggatcagggagggcagagactctgcagacctgaagctgggcttgcttatgacctccctcccacccaccagccccgtgccctgcgtgtcctgtagggtcttgttaggggcactatgctggccagcacagggatgggtgcgtcctacaaggaaccaggtagacccctgcacacttccgcaggtgcacatgtggcttctaaagaatatggttaggtttgcaaatgaagcacagagactaggttctcagaagcagcgaaggtgcagagaagctatggctcaggcttccttcagtgttcctgccttaaagccaaggggaagtggctagatgtgggggtgcatatgggctctctggctgtgacagatccccttggggacaacttcagtcagctttagtcctataatcggattgcctgacacctgcg

SEQ ID NO: 114494 - DNA, 1050 bp, Homo sapiens
agcctgtagcatgagaaaaacacacatctaagcagtgtttttgtgtttgtgggtaggaagaaaaagacccacccaaattagtgtgacatgaaacttttgagtgcagtgaaaatgtggtctgttttgattgatgcccaggcaagtcagtttctgcaaatctttcaacaataattgtagccctggaatgaaaggaatacaccttaaagtagctcatttcagttaatgcttgtttgctgtttccatttcagcttctcaatcccaactacatttatgacggtgagttctgttctttttcttctagtcctagagatgattctagacctgtggggcatgtttcagagcacttgagtgtggcctctggaaatgagttttccgtggcgctctaggcgtgcatagcaggttaggtcctatcaatctgtcggggacatgtgggtgggtgtggaggaggagccagggctgatgggcctttaccgactcctttcccatgcagttcccccagaattcgtcattccattgagtgaggtcacgtgtgagacaggggagaccgttgttcttagatgtcgagtctgtggccgccccaaagcctcaattacctggaagggccctgaacacaacaccttgaacaacgatggtcactacagcatctcctacaggtgagggaggcccactcctggtgggtttcgctggctgggagcaccatcttgtcacttggcaactggaaattcctccttcacggatggatttctttggctgccttcggcactccacttcttccgtgagagcccatttcacgcctgggtgtacagctcctcatcagcacttgagctcctgccttcccttgatcctgaaggaggaggccagcgctgatggccacgtgctcagcttttctgatgcgcagtgtgttcccatctgtgccgcagtgacctgggagaggccacgctgaagattgtgggcgtgaccacggaagatgacggcatctacacgtgcatcgctgtcaatgacatgggttcagcctcatcgtcggccagcctgagggtcctaggtaagcac

SEQ ID NO: 114495 - DNA, 1054 bp, Homo sapiens
atagcttcttcagtgggaaggataggattagcagggcgcccccatggggtcatgtaggggcagactcaagctcggggcccctcgccggcaggaactccctccaggccctgtacctgatgttgtagttattgtcatttttttcttaaagaaactataaatgcctccccatacccttcctagggcaaggctgccacagcgtcccacatggccccacatgcagccttaccagcttcctcgggccgcccatgtgccatgggtgacagtgggtgtctcaggaaggcctcccacccatggctgcacagctagaacctcccccagcacatggggacgtgcttccagcccgtctttcaagaatagaaaacacatctcatggcagaagggcagacggtggggcgcagtgaggctgagcagtgtgtatggagaggaggtccactggcctcgcctggcctcagtccccgccctccctctcatcggctcatttctcaccctggtgtccttaaaagtcacactggctttggagggttgtcgtggggccgagatggggcgatgtgtgtggaagagccgagccgacatccaagccgaggcctggcctgggagcctcaggacccgggaggtctcctttctggctccagacgctggtgaccaatggccactgctcaccttccctggggagttttaacaaaactgtggcttgagtgcttgtcacaaatctcctaaaggccttcgtttctggactgacatttcagtgctttcagctgtcatttctgggaaacaaaatggtttggcctcaccatcctgttaataggatccgttttcatgacagattactcctgttctcaccggcgactccccattgctagacaggcagctgatcttcctacagatttctgttttgcaaagagagcagcataggccggtgttgagagaggtgggggccagaccacctcagtccaatcctggcttctccactctggagctgtgggaccttgggaacgtttcatgctttctctgtcctgagtttcctcgtgtatcaaatgggtacactaaggcccac

SEQ ID NO: 114496 - DNA, 1686 bp, Homo sapiens
gcttccaggcgcctcgtctgtgtgcatctcacgcccgacgtggcttctgaaacgtgcattcaacctcaaacttttgcataaaatagaatgaatcgttttgctctgatgaaatgtaggccttacttgtatataagactgttcctgccttcggtctgtcattttcccacctgcctcccctacccaccccccacccaccacctggggcttcctctgggggtccgagggtcttcccatcacatgaagacatcaggttgggtcctgccccactgcccctccccctgttcctgccccaagccgtcaatcagattgtggagcagtacacagtcagatgaaaatactgtaaatgcactcattgggggttttttggttttacttcatatcatgtgcaatgttgtggctttaacattttatgcaactatttatgaagacctctgttgtacctgtaataaatatatagaaaaagcacatacttcgtatggtgagctttatggttttgtgtgtgtgttggggttggcgggtgggtgggtagggtcgtagccctgtgccatcggttcaaagagacttttcgtgaaatttgttggttttgaggactgtaaaagtgatttcatactctgaatataaaactggataatagggtaatgttttaaaatttattatgctattattcagaatgccaaagtattattttttttcccaaaatcagtctggacatttactactttttagactttttgacgttgaactttctgtataaaaattggctgggttttgagcttttggtaagaaataaaagccgattaagcactggccgccccgcggctggtacccaatgcccgagtcactgtggcagcattcgcactggtgtggggagtcctttcaactcaaggaggctgggtttctgggcaccctcgaagttttctggatgtctttttatctttctcgtgtgaactgcactacaaaagagaccagcccgcttcccaagccagccagacacctgggtcttgagccataaactggcgtagttaagctttgcagcttccagtgtattttatttattcttttgttgggtttttgtttgtttcttcttgtaaaattgtacagaaactttttaaaagaaattggattcgaaactggatgtgtattcgtaacctcataatttttatttgtgtattgtttcttttattatttcagttaaatttttacattattttgcatgtatatttctttgtacagagaccttacatgtttacacagtatgatgtgatgtaaatattttattttgccatcagttattttaaaaaattaaacatatttgcctgatttttgtgttaggctttttatttaaattggtcactgttgaatcagaaagacagatggctgagggagagactgatgcagagacttctcgtgggcgggaggtggcagaatgtactggattgagaaccctctgtacacactcagaaatgggagttgctcagcctcctgcagactggttcacagacaccacactcgagaccctggtatgtgccagaatgtcgactgaccgtgcacagcgaggctgtagcttgtcctggttagaatagctaaggcaccctgttgcctgatgaacacagaattaagcgagggaagagctcgttcatgctggcctcagaaaagcaaaggtaatgtccagatagattcaagaaa

SEQ ID NO: 114497 - DNA, 1017 bp, Homo sapiens
tggaaaacattctcaatctatgagtgagggttccaatttgtccacatcctctctaacacttgccattttctttattgttgttgttttttgtttttatagtagccattctaatgggtgtgaagtggtatctcattgtggttttaacttgcatttctttaatgattagaggtgttgaacatctttttatgtgctccttatcaatttacataatttctttagaaaaatgtcttaattttttattattatttttacttttagagacaaggtcttagtctattgcccagaccagagtgcagtggcatgatcatagctcactgcagcctcaaactcctgggctcaagtaatccttctgcctcagccttctgagtagctggtactacaggtccctgctaccatgcctatttaaggttttttagtttccatagagacagggtcttgctatgttgaccaggctgctggctagtttttaaattcttgtttagggataggacctggctgtattgcacaagctggtctcaaactcttggcttcaagtgatcctcctatctgagctttccaagtacctaggactacagatgcatgccaccatgcctggataattttaatttttttttttggagatagggtctgactgtaccacccaaggtgacctcgaactcctggactcaagtgatcctcctgtggcagacttctgagtagctgggattacaggtttgagccaccttgcccagctatgcagggtatttgaccatccattgtctttaaaacattacgccatcattgtcgatatccataaaagttagaatttgagaaatccttatctttccacttccttcttgcattgtatctaagcatacactgctgcttattcacacgaagcccctgaataactacaaaaacgttaataccaaaatcagtcagcgtcaacttttctaatagaggacagtatatagacgtcaataggtgccaatgacagcacttaactgagcacttaaaaagggccagcctctacatgtt

SEQ ID NO: 114498 - DNA, 1724 bp, Homo sapiens
aaacaactaattgttggtgttaacaaaatggattccactgagccaccctacagccagaagagatatgaggaaattgttaaggaagtcagcacttacattaagaaaattggctacaaccccgacacagtagcatttgtgccaatttctggttggaatggtaacaacatgctggagccaagtgctaacatgccttggttcaagggatggaaagtcacccgtaaggatggcaatgccagtggaaccatgctgcttgaggctctggactgcatcctaccaccaactcgtccaactgacaagcccttgcgcctgcctctccaggatgtctacaaaattggtggtattggtagtgttcctgttggccgagtggagactggtattctcaaacccggtatggtggtcacctttgctccagtcaacgttacaacagaagtaaaatctgtcgaaatgcaccatgaagctttgggtgaagctcttcctggggacagtgtgggcttccatgtcaagaatgtgtctgtcaaggatgttcgtcgtggcaacgttgctggtgacagcaaaaatgacccaccaatggaagcagctggcttcactgctcaggtgattatcctgaaccatccaggccaaataagcgctggctatgcccctgtattggattgccacacggctcatattgcatgcaagtttgctgagctgaaggaaaagattgatcgccgttctggtaaaaagctggaagatggccctaaattcttgaagtccggtgatgctgccattgttgatatggttcctggcaagcccatgtgtgctgagagcttctcagactatccacctttgggtcgctttgctgttcgtgatatgagacacacagttgcggtgggtgtcatcaaagcagtggacaagaaggctgctggagctggcaaggtcaccaactctgcccagaaagctcagatggctaaatgaatattatccctaatacctgccaccccactcttaatcagtggtggaagaacggtctcagaactgtttgtttcaattggccatttaagtttagtagtaaaagactggttaatgataacaatgcatcgtaaaaccttcagaaggaaaggagaatgttttgtggaccactttggttttcttttttgcatgtggcagttttaagttattagtttttaaaatcagtactttttaatggaaacaacttgaccaaaaatttgtcacagaattttgagacccattaaaaaagtttaatgagaaaaaaaaagaaaaaaggaatgatgtaaaattatagttttttatgaatgataatgaatttctagtgtgttagattctatcggaaataagtcatgattattttaaaatatctataatacaatggaaattatatcctttaaaactaagtttctcatagaaaattttattttattttatatataatgtacatattttgggggacatgtgataatacattcatatagtaaagatcaacttagtgtaattgggatgtccatcaccttaaatatttgttttttttaatgctagaaacattcaaattctcttttagctattttggactgtacaatatagattattgtaactactgatctatcaaacactatgtctcatttcttccatcaaactatatatttttacccattaatcaacatttcttcatccctcctcctccctactcttctcaacctctagtaatcaccagtctactctcatgagat

SEQ ID NO: 114499 - DNA, 1010 bp, Homo sapiens
aggctgcagtgagtcccatagcctgaaggtggttggtgtgaggacgtgctgtgggcatggcctgctgtggaatgtcctggccgtggttggagtcctgcaaggcagattgtgctttggctcaaccaaaagcaccatttcactccagcagccctcctcagggtggtactttctaagttcctgacttctagatttaggtcctccatcctaagcccacatcacagatttgcagaattaattctggaaacaaagttaggttttatagactttgtggtttcttacagcttggattgtgtggtggatttcttggaatgttaacacttctttatctctttgtttctcgatgttgtagttaccagaaaaactcataagcaaatacaactggatcaagcaatggaaacttggactgaaatttgatgggaagaatgaggacctggttgataaaattaaagagtcccttactctgctgaggaagaaggtttggaacctgtagtgtcctgtctgataagggtgaagctctcgttcttgcttgccccagaagaccagtttttagtcttcactcagtggattttcaaatgctcttggctgatttttaggcaaaatggttttaaatgaattcaaactcttcccacgagggctttagtaaaatgggaagtaccaacattatatattcttagagcagatgccatgtactagggtatcaaataatgaagtgtttgactttcttaaaaggaaaccttaacaaatatagtctttgttccaagtcatatttatgtttcaagaatataatttggttcctatttcttatatcattagtaatttattaaattctttccaattatgctcatgttttaagattctgcccatatttatcagacttattttctttctccgtgattttccagttagtagatttagtaacttgtctttagaaaactgtcctgagagtttttctgaaacagaattgtagggagaacttggtcttctgattcctattgatttggtctttgaaa

SEQ ID NO: 114500 - DNA, 1146 bp, Homo sapiens
gtcttgtgaaattgctatttctgctttattaggtttttctactataattagaccctcatttttgggaatgcttgagtggtgccaatttgcaataaggttaaaattactaataatctgagccagcattactaacacttctatgccaggctccacactaaaatttcatgtgttatttaattctcacaactatgaaggtggtgtcgctgtggtcatcactgttttttaggtgaggaaactaaggccaggagctcagttaaatgccctgcaaaaaccaccacagctgctctgtggtgaagccttgattccatcccgactgactttagagccatgtccatgattggcaacttggtctagtttggaaaatatgagatacagacaagcaagtaccagccttcagcccaaatattagagggaattgtatgcagtcattaccattgaattcactcttgtatttaaaatccataatggtgtttgagaggggcactagttattgttgattcataaggaatggtatttatgttggcgtctcttattctcattcactgtaacttaaaagcacatatatttataggttttcttttttaaagagtttgtctatattcactgaatacctaacacattactttattcttaatccggagtcaagagtttcctgaatggatttattcatttgaagttcatatatatttttgaggttagagggataagtttagtaaattattattcaggagcccctacgcccttccttgcctctcttccatttaggagggttggctttgtgtttctgggtgctaaccctcctgtaagccccttataattgtagctgcccttcacagcttcacacacaggcttcacacacatgtgttagctcttccataagtgtctctgattggctggttcaatctcattgcctgggaagttaagggagtcaaaatttccacagcctcggtgcttcttattgcattgtatttttctttcaaattaatgggagaaaaagctgaataaggagtttgtgtgctttaaagtgtaccatttgttaatctggaaacctgaatgttgtgagcattggtaagtgacccatggtcacttttaaaaaataattttgtgctcatagtatggtactataccagggatttttagaacaaa

SEQ ID NO: 114501 - DNA, 2173 bp, Homo sapiens
tttgtcttctttctaaccctaggcagccactaatctactttctgtctcaatggatttgcctgtgctggacatttcatatgaatggaatcatataatatgtggtcttttgtttatggcttatttgatttagcataatgtttttaagatttcatccatattgcaccatgtattagtacttcattcctttttattgataagtaatatcccattgtatggatggatcacattttattcatctgttcaatagtttgatgggtatttggattgtttccactttttagttctgtgaataaccctgctatgaacattcatgtataattttttttatgtgaacatatgtttgtagttctcttgggtatacaccgaggagtggaattgctttaacattttgaggaactgccagactgtttgcaaagcagctgcaccattttacattctcaccagcaatgtatcagtgtcctgtttcaccatatcttcaccaacacttctgactttttgtattggggtgaagttcatataatttaaaattgaccattttaaagtgtacatctcattgacatttagtacactgctggtgaccaccacctatatgaagttctaaaacatgtcacccccaaagaaaatcctgtgctcattaagcagccattccccattatcatctttttggttatagtcattctagtgggtgtgaagtactatctcattgtagttggatttggattttgatttccctaatgactcacaacgttgagcatcttttcatgtgctttcttggtcacttgtatatcttctttggagagaggtgtctgttcagatcctttgcctaatttttaagctggttatttggttttttgttttgttaattgttgtaaaagttctttattctggatacaggatccttatcagacatatgatccattcttgattatctgctttttttttttttttatttaaatcgaaaaggattggggctgggcccaaagcaggaggaaaaaacgttgtggcttcaccattgctgtgcactgtgggataatggatggaacatggtgttaagccacgtttttcagtgtgatcttcctcagaatacccgtttgctcttcttcccaggttgaaatgttccttcttgcctatgctgtgcgccacaccatccaggtgtaccggctctccaagtacaacacggaagaattcatcacagtctaccccaccgacccacccaaggactggccagtggtaacgctcattgctgaggacgatcggcactataacatccccgtcagagtgtgtgaggagaccagtctatgagagacgcatgctcctgacagcctggcgacgtggcgaagatgcacaggtggctcctgggcttgggctgcaggtttgggggtctctaagaacaatctctgagaagaacccttgggcccctgggagccaagttggacaggatgtcctgaagactagcttttgataagagaaattaaccaagtctttcccctcatctatgatgcaatatatttcagtgggggccttcagagcacacctgttggacggtgcaaaccatatcttctccagaaggcaaatacttttgtatcagaggaaactcagttttggagaggaatatgttctttatgtctcaaatcaaaactctctctaatggtaaactggcttctaatttttttaagtacagtatttttttttcccctttagtagtaacgggtttctatagatcttcctatacagtctgctttaactcaggaccttgagattatgagactgacgtgctgcccactgcactgagggggcttctaacagtctgctttaagtggtataattctgggatagatctgttactggcatagtcatgacaacctctggtaatcttaccttctcctttttatgaagggaagagcaatggtttggacttacatcttaattaaggctattttaagcagattgttttgcaacagattaagaattgggtcccaaagtgggttatttcaaggcatttttgaagactggaggagcgtaggagggagtggtgagggaacctagaacttcttgctccttgtgactatgacagatgtctgatgcccccagcgcactggagtctggggcttggtgcaggtggtgccccatcagtgtggacagacactacttgcctttgtggtttagtgttgga

SEQ ID NO: 114502 - DNA, 1454 bp, Homo sapiens
aggcagagataccagggggcagggcttggtgggactccactggcggtggggggttgaggaggaggtttccaggtgggaggtaaatgtgcctcctctagatggagatgtcaggggaaagcatgggttggggacgtagatttgccccttgtggtattaagagtaccactccccacagggacagtgaatgatgctggggccagcgcagctctgtattgtctttaaggcaaccaggaactgaacatacttgacccgatagctaggcctgaccctatgccatggacatggcatagcccatgcactgtggccgggagcacagctctgaagccttcaaaaacatggttggtgttagaggtagtaagagagaagcacagtggaggtaggactgagatctgggattttaacaaaaggagcagtaaggaaggaaataggcaatcccaagcgagtctgtaggatgcctagaatcttactgactacaggtatgtaatgaaacactttctacaatgtcttatgaggagctaaaaaaaattagagccatctttctttgaggttaaaacatgatgctttaagaaaagagtgatgctggccgggcgtggtggctcacgcctgtaatcccagcactttgggaggcagaggttggcagatcacaaggtcaggagatcaagaccatcctagccaacatggtgaaaccccgtctctactaaacatacaaaaattagctgggcgtggtgacgtgtgcctatagtcccagctactcgggaggctgagggaggagaatcgctcgaacccgggaggcagaggttgcaatgagccgagattgcgccactgcactccagcctgggcaatagagggagactccgtctcaaaaaaaaaaaaaaaaaaaaaaaaaagtgataaaagagtaatgcttttcccataaagactaagaagagtaagaatctcttagatgtgggcaggaggattgtcgggctctgtccttctcaggctcaccaaacacttgcttcattttggcattcccatttgagaaggtgtatagagaagttggagagggttcagagaagcattttcattactgaagttttgggaagtaaaagtaattttaatgcagaataaaatctgaagaaataggttatatttaagtaagacagggagtttagagaaatttcccagtggttagaagttttagcaaccaagggaaagggcaaaatgttaatctctcaggtaaatttgattaaaagggaaactgtaatcaggattaggaaaccaagtaactttgcggtgagtaaacagatgcatggttagaataaaaaaaaatcaagaaactaaaagcaatctcagttgtatgccaagtgtttaagctttacttaaagtaaaattagagtatgaaacctatttgacaatatatgaatacaaatccataaaccctgaaacaaagcatatataaatgctcttaccaa

SEQ ID NO: 114503 - DNA, 1074 bp, Homo sapiens
tttatttgtattttagagacggggttttgctctgttgctcaggctggattccaactcctgtgcttaagcgatcctcctgcctcagcctcccaagtagctgggactacagatgcacaccactgtgcccagctaaatattttaatgtgattggtttcaacagtttatacccacagttttgatgtgaaactgacaaacctatgggctgacagccacagcccatgtagaggaatgactctaagcacacttaattttgtttaaaaaaaaaaaaatctagatcactgctaatgttcagatctgaaatgaagaatgaggtgattttattcttccattgtaggatctcatacgacgttctaaatcctagatcataaacagaatgttagatcaggaaggggccttagcaataatggctcaagcctcccattggacagatgagcaaggtgaggccaagaagcgtgagtgatatggaagcctccagcttgaatacacttcttaaatgaatgagtgtcggcatggaacagaatcacgtgtgtggctcttgtccactttcccgaagccctttgattaactccttggccctactagctttagacagttccctgatcagtacatcattaagcaaccaaaatatctcattaaatccaaggagcagcgtatttgccactgcaaggcttgtggatgtggcagccctggggtaagggacctgctgcacggtgacatgaccatcgctgtggggtgctgggtgattggtgttgatgtgtaccctgtactcctttgttacgcaagggtggtttgaacttagctttcagtagctgtttcattcaaaccgtgggtccctgcatgttcatggccccacacttcagggaaccagcatctacccggttgtaatgttcccctaatgttccccaactccagaggcgccatttcttgccctggcttatagctagggaacattgcctctaaatcttatagtgagaatttccatgaggttgtacagtgagtggtacaaccatttttagctggtctgtccccttctttaacctaaggaaaccacttaaactcttggagagagaaagg

SEQ ID NO: 114504 - DNA, 2038 bp, Homo sapiens
cagtcagtcaggatgacacttcggcatcatctcttccctctcccatcgtattttgttcccttttttttgttttgttttggtaatgaaagaggccttgatttaaaggtttcgtgtcaattctctagcatactgggtatgctcacactgacggggggacctagtgaatggtctttactgttgctatgtaaaaacaaacgaaacaactgacttcatacccctgcctcacgaaaacccaaaagacacagctgcctcacggttgacgttgtgtcctcctcccctggacaatctcctcttggaaccaaaggactgcagctgtgccatcgcgcctcggtcaccctgcacagcaggccacagactctcctgtcccccttcatcgctcttaagaatcaacaggttaaaactcggcttcctttgatttgcttcccagtcacatggccgtacaaagagatggagccccggtggcctcttaaatttcccttccgccacggagttcgaaaccatctactccacacatgcaggaggcgggtggcacgctgcagcccggagtccccgttcacactgaggaacggagacctgtgaccacagcaggctgacagatggacagaatctcccgtagaaaggtttggtttgaaatgccccgggggcagcaaactgacatggttgaatgatagcatttcactctgcgttctcctagatctgagcaagctgtcagttctcacccccaccgtgtatatacatgagctaacttttttaaattgtcacaaaagcgcatctccagattccagaccctgccgcatgacttttcctgaaggcttgcttttccctcgcctttcctgaaggtcgcattagagcgagtcacatggagcatcctaactttgcattttagtttttacagtgaactgaagctttaagtctcatccagcattctaatgccaggttgctgtagggtaacttttgaagtagatatattacctggttctgctatccttagtcataactctgcggtacaggtaattgagaatgtactacggtacttccctcccacaccatacgataaagcaagacattttataacgataccagagtcactatgtggtcctccctgaaataacgcattcgaaatccatgcagtgcagtatatttttctaagttttggaaagcaggttttttcctttaaaaaaattatagacacggttcactaaattgatttagtcagaattcctagactgaaagaacctaaaaaaaaaaatattttaaagatataaatatatgctgtatatgttatgtaatttattttaggctataatacatttcctattttcgcattttcaataaaatgtctctaatacaatacggtgattgcttgtgtgctcaacatacctgcagttgaaacgtattgtatcaatgaacattgtaccttattggcagcagttttataaagtccgtcatttgcatttgaatgtaaggctcagtaaatgacagaactatttttcattatgggtaactggggaataaatgggtcactggagtaggaatagaagtgcaagctggaaaggcaaaaatgagaaagaaaaaggcaggccctttgtgtctaccgttttcagtgctgtgtgatcatattgttcctcacagcaaaaaagaatgcaagggcataatgttagctgtgaacatgccagggttgcattcacattcctgggtacccagtgctgatggggtgtgcccacgtggggacatgtccttggcgtgcttcctcagagtggcttttcctccattaatacatatatgagtactgaaaaattaagttgcatagctgctttgcagtggtttcagaggcagatctgagaagattaaaaaaaaatctcaatgtatcagctttttttaaaggacattactagaaaattaaacagtattttttaacatgtgtgactttcatgcttctggggttggagcttaaagatccaaactgagaaagcaggccgggcatggtggctcatgcctgtaatcccaacactttgggaggccaaggagggtggatcac

SEQ ID NO: 114505 - DNA, 1050 bp, Homo sapiens
ctgcgtggttctgtacacatccaagtactttcaggtctttttttattgcttgttaaagctgtaaaaattatatgaataaacatgtccacgtggaactggctgagctgtttggcactctccttaacccttgccccaaagcacactggttctgaacgggtctgctcacccactcagaaataaatgacccactcttggaggagccacatctgctctgccgtgggggtcccctgggtacagacatggctaatggaccagggcctctgtggtcagaagagagtcaagcaagcaggtggcagatctgggaccagcatgcccaccacccagtcaggccggttgtccctctttcgtaactctccaaggattgtgccacacctgatctgctcatttcacctgcttacactttttcctcacaaccctgtttgatgtctttctccccagctctgtttcgtgatgttttggacacccaacgtgtctgagaaaatcttgatagacatcatcggagtggactttgcctttgcagaactctgtgttgttcctttgcggatcttctccttcttcccagttccaggtaaagaaaaacagaatgaaggaagcattcctgtttatcctcatgcctaattaaatctttctttggaaatgtttgcaattatgtcaccaacacaaatgtaaaatttcactgtggcttagaaagatgcaaaaacattagccagtaggttaaaagttcaagaaatgaatcaaacagtataactttttattttatttatttatttatttatttattggagacagagtttcattccgtcacccaggctggaatgcagtagcacaatgtcggctcactgcaacctctgcctcccgggttcaagcacttctcctgttcagcctcccaagtagctgggactacaggcacccaccaccatacccaactaatttttgtatttttagtagagacggggtttcaccatgttgtccaggctggtcttgaactcctggcctcaagtgctcctcctcggcaaagtgctgggattacaggcgtgagccactgcacct

SEQ ID NO: 114506 - DNA, 1048 bp, Homo sapiens
cttacttcctgtaggttctaaggcacagagccagcccagactgtaaggcagtcatcccttagctcaattctttacagttttactgctatgggacatattgggggcccaatataaagcaaagctggaagcagggatgatccatgtatttgtggggatgggatatggacagggaaatagtgttccaactccatgctgagtgttgttttgaattgtaatgtgaagttgccaccataccagggctatgactgtgtacgatgtctcacccttgtaggctagtagctttgcagtgggaaaagatgacagggccacttgtccagggcattcaggtaataaagtccctgagctccaagttgctagatctaaggaagtattttttccttcatgtcaaagatggggtgtgagtactgtcatcaagcagtaggattaaatgagatagtacctctgccatttttgaaaaccagtggaatatactttgccagatgcagaaaatacgtaggggaatggctctattgcacttacaaagcaaaacatatttataatagatctccagtgtattttttttttaatatttcaacatgacatagtaaatagagcttggctaattccatgaaacttagtgtactcagagcctaaaagaatgttatattctaaaattttagtgttctgttcttaattcattttagaatgtattcagttttattgtagagaagaatcacttgcattttaagaaaaggagataaatatttgatgaaactgtcaagtttttaacaggatcttccaaagttatgttgttggattttaaaattcaggtttttaaagttagcaccaagttttccaagtcagctctgtaaggattgtaactcacagtagccatgtccccagcccacctcttcagtgctgctcacttccaccctgtccctttcctactccgagaggcacccccaactcttgatggattgtgactacgataaactctgacgctgagccctgattcccttcctttctcaaacaactttaatttttcctggacttaataattgtcaattat

SEQ ID NO: 114507 - DNA, 1017 bp, Homo sapiens
ggaaagtgagtctgtgtcagattgcacaaggccttgaatgcccagtggaatttatagtccatttggtagagaggagaggagccctggaggacactgagcagggccatggcatttagggagatgccgatggtggccaggcacagggtctgctgggaccaggagcggggtgcatggggcaggagcaggcttcagagccaaagccccaggactgggcaagatgggctgcccaggcagaggggaggtgactgagttggaagagctgcagggcattgagtcgagaattcactcaggttaatgatcctgtacagggacctgacagctgcccgagagacactcaacatgacagccgcctggcaaactgtcacttgaaacctctaattcagacacatcagataaaacaaaagcaagatgctcttcaagatcccccggtgggttcagccaaggataagccgggcccattcatgactgtggttttctttccccagaataaccccagcaacaaactggtgagcacgagcaacacagtcacggcagcccacatcaagaagttcaccttcgtctgcatggctctgtcactcacggtaaggacagaggctctctctgcctcttctctctgtttggtttttgtaaaggggcaagttgctattttaaagggggaaatcttattttccacaatgtaatgtgatgctggattaattagcaatctcttcaatacactttcttcttcaaatgtgaacgattgttattcaaggaggcccttgagtctaggaataaaggacccacttcaggcatttcttgggacttctcaaatgctgcagaaaggaagaggttgcctttaattggaatagtacacttgtcttgctgaaaaatttctagcccactttttaaacatcgaaagtcaactttacaaccacccctgtctcttttccaaatttaatccgcgttacttcagtgttccccagtaaaatttcctttccagttatgtttgtgctgacatagcttacttacgtggccatc

SEQ ID NO: 114508 - DNA, 1007 bp, Homo sapiens
tctgccacctcttcctgttgcaggcagtggcgattttgacagccacataccctgtgggtcacatgccatacggctggttgacggaaatccgtgctgtgtatcctgctttcgacaaggtgagaacccgtgcggtgtcgtgtctgaaacatgcttttgaaatgacttcttgatagacagggctctctgatgagggacactttgttgcttctcagtcctgcttccctttgtaaggttaatgtgacgttgggggcattgaaggaatattttcctcagaaaataacaggggcaagttgaagcttacctttgacgctgatcccaggatgcttttccaaagtgatcagcctgtggttactttcaggttattcccattgagaaatgatttgtttgcgaaagggaaaataaacttcccccaaaatcaatttatgggattttatttctgtggtttgtttctttaaacgaatgctttgctgaccccataccagatggctaaggtgtaggcaggaagccgtgcgtggctgtctttctgtgggctggcctacctacatgctcaggttggccacaggcaagacctgggtccagtgttttgatattgcagacgtattccagtggaaagcctgttgacagctgctctgtctccccagccatgggagtcacataacccttctgccctgtaacttgtgacccagtcagcactgtcctgctgtcattcaattaaagtctattttatagcgttatcatttaaacctatagactttttttaatactctaaaacaaatggctggtgaaacatactccaaaaatagtctacagtgttttaaaatgatacacaggaaggaagcaaacagactgctacttcttaccgtgaagggcacctgttgtgccttgaatgtctgcagaactagcagccactgccagcatcacactgtcttatcccagccagagcctgtgaagtgaggagaggaagcctcctggccaggggtgtccacagcgctcagctctggcagaat

SEQ ID NO: 114509 - DNA, 1009 bp, Homo sapiens
tatgaagaaatcattctcccaaatccctgactgtaggaacttagtctaatttataaatcataagaattcaatctatttttccactaaaattgttcatgcgctatccttggtagaagaagaaaggacagaaagccagggctgagtgccagggctcagagaattggacccaacagaaagtgggatgtaggccttcttctcagaccgcgtggaaaggtagctgaatccacttcctggttccttctaaatgtggggaagtgacctgtgaatggcagccctgcatggtaacaacagaggattataagaacattgaagaataattcctaagagccttccctctaggacagagtgacagacttcatagtgataggccacgcagagggcacccaggcaagtaaacagtgaccctaagacatgccgaaaggtactaggtatgactttatgctcatctcatgtgcatgctctttaaaaataaaggtcaaaacccctttatttaaatttaaattcttacaacccatattctagcaagattatacatactgttattacagggcattcccttttctcattcatttagcaaatatttattgaggtctctatgtgatgtaacggtgctggcaaaaccaggtcgaatgcagagtgtactgcacagtgaatgaatataaatcacacatcagttacacacgccagaaggggactctgaggagctctgattgacacacagaccatatttacctgagctatgacatctgagattgaggcacatcccaccaggaaactgtatttgtgttttaagagaatgccagcatgggtccatgcctgccagaaagaaaagaatttggcatgagatacaccttcaggattatgctgtttctggttgttgagatttactgggcattcctgaaatacactttataccccctcaaagccttagcagcccaggtctgataaatctttggttggtaaaattactgtaacttgatctggtggctggctccatgttagagtttac

SEQ ID NO: 114510 - DNA, 1099 bp, Homo sapiens
tgatataaactgttagactcgttttcagaatgtctcttgccattatgtcaattcagcctgcaaacaaaatttaacatttttgtttttttaaaaaaatcaacttttaaccaaaacttcttagaattatttttcaatattagcataaaatatttgttggtgttttgctattattttaactgcagtggtcaggtatctccttcacaaaaagaaactcaaactgaagctgatgtagatgaaaatgaaaaccaatcacctttatccaattacatgagatgcaccctataagctacttagtgtttctatagaaacgtgatctgctgaatttcatcttagaggtatgattccccagagaagagatgacatttctaatgcttgtgggtttttttcccccttcccaggccttgaaccggggcattgctgctgtcaaggaggatgcagtcgagatgctggccagctacgggctggcgtactccctcatgaagttcttcacgggtcccatgagtgacttcaaaaatgtgggcctggtgtttgtgaacagcaagagagacaggaccaaagccgtcctgtgtatggtggtggcaggggccatcgctgccgtctttcacacactgataggtgaggccgccgaccgccactgacgaatctagctttggcaatttcttattccttttcattgatttaaatgtatttattgagataagtggtttcttcactaattatcaaatgtttcttatgaaattttcaggggatagaaggaaagcgcttgtgctcctagcttaagacaataatgtgttttttctggggagctgtagttttgtgtctctgattcccaaagtgaaaagcagtgatttcattagtaggcgattacatctaggaataacatttggtaaggccaataaaatagcaggtgctttcgttagagatatgtgtgcgtcattgtactgggtcattaaatcttaagaataaaaatagaatgacttatttagaattaatgcttattagcagtgagaacaaatgacagattgttctatttattaatttgttctaggatcttattctattttattcaaagacaagactaaatgctcttgtgatagca

SEQ ID NO: 114511 - DNA, 1057 bp, Homo sapiens
ataaaatcatgggccagacatggtggctcacgtctgtaatcccagcactttgggaggccgagctgggtggattacctgaggtcaggagttcaagaccggcctggccaacgtggcaaaacctcatctctactaaaaatacaaaaattagctgggcgtggtggcacatgcctgtagtcccagctacttggcaggctgaggcgggagaatcacttgaacccaggaggcggaggttgcagtgagctgagattgtgccactgcactccagcctagccaacagagttagactgtctcaaaaaaaacagaacaaaacaaaatcatgtttctcatatggaaacagcttttcaaattcttccacaaaaaagggtgtccagttgaaagctgatactgttccctaaaatagcaagagattattatgtgaaatgctgaaagttgcatttttgactttcagtaagatgaatacttcctttacttgcctcatcctagactagaaaaaacaatgatacctaagagccaggtaattattttgtctcgttcagaaccagcctgggctgccatctatctaatccttttgataaaagacaactcctccgtctacagcttcaatgatctcattatacttacgatgacatcaaggaaactgaccattgtagtagacgaaatctagttttaaaatgtgccttacaccctaagtcgtcagaaaatgtacatgtgtggacccgtggaaaagtcagacgtacatgtgcaggcacagttacctgtgggaagagcttcttccaaagacatggagaatcagcaatttcggattttggtcctctcaaggagcctgggttcctgtaattttccactgttattgttctgttggtctgagttttgaaaagtggcttgggttaaattggatcatttgtcttcccggtagttttccagccatgctttattttcccagggatctatacagctctaaatgagactccctcactctgtttagctagagcttcagccaagaacttcacgcccacacatgaggttgtggttcagggggagcagcagtcaaacggaa

SEQ ID NO: 114512 - DNA, 1053 bp, Homo sapiens
gggtcatcaagaaaaaaatctactaccaagcagggagatagtaggtagggagagttggttaaaagactcccaggatcccagacgtaaacctgtattccagattgttgtttctggagttggtggtgctgtttcaaaatctggacagaatcttgagatgttaactaagcagtatcatttgagaaccatctctctttgtaagtataaaaaattaggaaatgtagtaaagctgtgagattgaggtggggaataagcattcttaaatggcacaggaagctttggggtttaaatacactacaactttcatggtagcaatcctttcttgtcaggccttctaccatcttgaattgaggttaaatttagctgggtgaataagcttcatgtttcatgagagatcaggagaattcaaagagggtcttatgacactaagtctaccctttcatgatggagcatattttcatattaagaggtcatacaggaaaatgctttttgttttctcctgacatattgaagacaccaacaggagaaaggtgagttagccaaacatcgttgtaccgtgcttggttgtttgtccctattcttaatggaagctcctctccaggtgtgggaggtgactgaaaacaccactgttgtattttggacttgcccaatgttgtcttggggttttcaggaagcactaaatatggacagcaccacacagagcagtcactttgactcctgaagggaccaggttccgtttgactgctgctccccctgaaccacaacctcatgtgtgggcgtgaagttcttggctgaagctctagctaaacagagtgagggagtctcatttagagctgtatagatccctgggaaaataaagcatggctggaaaactaccgggaagacaaatgatccaatttaacccaagccacttttcaaaactcagaccaacagaacaataacagtggaaaattacaggaacccaggctccttgagaggaccaaaatccgaaattgctgattctccatgtctttggaagaagctcttcccacaggtaactgtgcctgcacatgtacg

SEQ ID NO: 114513 - DNA, 1379 bp, Homo sapiens
gaaatcaagatcaaccatgaaggaaaagtaaacagggcccgttatatgccccagaacccttgtatcatcacaacaaagactccttccagtgatattcttgtctttgactatacaaaacatccttctaaaccagatccttctggagaatgcaacccagacttgcgtctccgtggacatcagaaggaaggctatgggctttcttggaacctaaatctcagtgggcacttacttagtgcttcagatgaccacaccatctgcctgtgggacatcagtgccgttccaaaggagggaaaagtggtagatgcgaagaccatctttacagggcatacggcaatagtagaagatgtttcctggcatctactctgtgagtctctgtttgggtcagttgctgatgatcagaaactgatgatttgggatactcgttcaaacaatacttccaaaccaagccactcagttgacactcacactgctgaagtgaactgcctttctttcagtccttatagtgagttcattcttgccacaggatcagctgacaagactgttgccttgtgggatctgagaaatctgaaacttaagttgcattcctttgagtcacataaggatgaaatattccaggttcagtggtcacctcacaatgagactattttagcttccagtggtactgatcacagaccgaatgtctaggatttaagtaaaattggagaggaacaatccccagaagatgcagaagacaggccaccagagttgttgtttattcatggtggtcacactgccaagatacctgatttctcctggaatcccagtgaaccttgagtgatgtgttctgtatcggaagacaatatcatgcaagtgtggcaaatggcagagaacatttataatgatgaagaccctgaaggaagcatggatccagaaggacaagggtcctaaatatgtctttacttcttgtgattttagactccccttttttcttctcaaccccgagagtgatttaacactggttctgagacagattttattcagctatccctctatataataggtaccaccgataatgctattagcccaaacagtgggtgttttctaaatattaatggggggcttgattcaacaaagctacagagttatgttgaaattttcttcaggaattttctagtaacccaggtctaaagtagctacagaaaggggaatattatgtgtgattatttttcttcttatgctatatccccaagttttttggactcatttaagtaaaggctagagtgagtaaggagaatagagccaaatgaggtaggtgtctgagccatgaagtataaatactgaaagatgtcacttttattcaggaaataggggagattcaagtcatatagattcctactcga

SEQ ID NO: 114514 - DNA, 1048 bp, Homo sapiens
attagattgtgcccaccagattaagggtgggtctgccttccccagcccactgactcaaatgttcatctctttcagcaacaccctcgcagacacatcaaaaatcagtactttgtatccttcaatccaattaagttgacactcagtattaaccgtcacagcaagaaaaggtagagtcaaaccttggtcatctctagctacctcaagctgccatacaaatacattgagaatcacgtcgttggaggaccttagaggccatcagactcacacaagacgtcccagtgattactctaatatcccaaagccagatgtgccagagaaagaaccaaatcctatgcctggggattccccatccagtctcaccctgtttgaaatgccagtgagcgctgatagagtctttatttctctgttcaaaaaacatagaaagtatccatttcctcaactctaggtgtaaacctagcaagagtataccttaattagagaagtcagcaggggtttcacaacattttattctattttcagcccctgtgagactccaacaacagttttcagtccatcactgacaatcacattatttttacagaagaaacaaagtaagcgtaaagtagacacagactctcccagcctattacctgccaatcagtcatggactttgacacagtcattcattcattctgccgttcaacactacttatttggggcctagaattgttctgggtgcagggagcacaaaggaaagaggatgcctgcatacctggaactttcagttgtcaactgagggacacaagtgacccattatggtgtggtgggagggctgctccgaagacggaggcgcagagctggggacatacattgcagaccaggtttcagatgggcactcactgtgtgacctggggtgagtaatgaaattctctctgcctccgttccttcgtctctgtagaaaaggagaactagctgggcatggtggctcacatctataatcccagcactttgggaggctgaagcgggtggatcacctgaggtcagaagttcgagaccagcctggccaaca

SEQ ID NO: 114515 - DNA, 1041 bp, Homo sapiens
cagtgctttctttagttagcaggctacttttcagccaaaggctgtttttactgtatcaagctttttcccctgaaaatgtggaagttgtgcttagtgaatgtttatgttttggtttagtatgggcagtgaagatggtacattaatgccatttcaaatgcttcaaagcccttacagcaagtataaaccataattaccaaaaacggtcagtgttaattcataaccggaacatgtcacagagtctttgtctgatcggattttcctccctccgatctggaatacgaactattttatgtcattccattttcagagtaaaagagctgttactgtaattctaagtgagatgataacatactatgtcttcctggccaatttaaacggttgttgtcaaccagatggccctcattttgaagaagctatgacctttgggtttattagtgttgattggagagggaagttttgctagattattaccctcaagggattggtaatagaggcatgttctcagaattaacttggaatgtatctacaaactcacacatgtatcatttatatgatgtcgggctttaataaggtcttggcatgttttgaagtttaataactgaaatttttttttttttttaagacagggtctcattctgtcacccaggctggagtacagtggtatgatcaggtctcactgcaacctccatctcccaagctcaagcaatcctcccacctgagcccctgtgaggtgctgggactacagtgtcaccaccacccccagctaatttgtttgtatttctggtagagacaggttttatcatgtcgcccaggctggtctcgaattcctgggcttaagagatccgcctgccttggcctcccagagtgctgggattacaggcataagccactgcacctggctgtaataacttaaatttttcttatggtagaaactgacaaaaattctctcctttaccaaactttagttaagctcccctgagccttcttcttaaccttctgtgcctctccctcctggtctgcctttagcaagaattcttccaa

SEQ ID NO: 114516 - DNA, 1036 bp, Homo sapiens
ttttgtttcagttttataaaaacatagggaacaattagaccatccgtctgtctgttgctaacaggtgataatctcttgccttttacctctagatctcaaagcattttccactgtgcaaagttagaatattctttatcacatttgttcttcaaagttattttcactgagttgagaaagtgatattgctcaccttttggggcgtgtaaccagagctgttggaggtgggaggctactgatatgccccctgacaggccaagcagaagtcaggggccaggcagaaaatagaagtatcagggctaactccttgggctgttacagtggtaatttaatagggactttgggcttgggacctcagcaccaccttgggaaccaggagtgttggcagtcgctcctgtcagctgatgaaatgatctcacaaactgcagaactgttcattttatttattactggtactgtttggaaattacttcttattttgtattatgattaacatacagctattcgcattctatgaaccaatattgagggtaccctttgattctatgggacattgagctgttgtgttttagaattcgtgaccatgaacattccttcctaatttaaatgcaacttaattttaacattaaaaaagaaaccgcttttttatatctctattattggaaaaaatcacccagccgttgttgccctttatgcttctagtccagttttggtttttattttcaaacgagaatacatcgtatgcagcagacatgtcatttctaggctagatctgcttgattaacttgactaattttttttccaaaaaaatctgaaaaataaatcacttttaattttttcctatttacatttcatcagagactattttttttccttctttcaaggaaggatggccctgctgggaacagattgtttcagcctctatggctgtggagataaaatgtcatggagatgggtttttgtctgcagtcacagctatctgagggctctgcagactcttggttggggtaaggtattcttacataccacagtgggtttc

SEQ ID NO: 114517 - DNA, 1917 bp, Homo sapiens
tctacttaaaaacaaaaacaaacaaacaacaaaaacaactataaaaatcagccaggcatggtggtgggtgcctggcgcctgtaatcccagctactcaggaggctgaggcaggagaattacttgaactcaggaggtggaggttgcagtgagctgagattgcaccactgcactcccacctgggcaacagagactccgtctcaaaaacaaacaaaaaaacaaacaaacaacaacaaaaagtttcctcttcttttcttttctttcttcttcttttttttaataccataatgcagttctttacgcctataccatggaatgaaaccatcagcaatatgtcttctaataagaatctcaccacatggaaaatttacttgtgaaaatatatttaatggcctggactctagacatacaattggaaaatatcagcttattaaaataaagctcatccccttgcactatatccaaatcagagggagaagaacaagctagaaaacaactttgcccaagtcataggtacatatctttaaggtctgaattactcaagagaatttcttacatggtaacattcagaagaagcaatttctggctggctgcagtggctcacgcctgtaatcccaacactttgggaggccaaggcaggcagatcacgaggtcagcagatcaagaacagcctggccaacatggtgaaactcgtctctattaaaaatacaaaaattagccaggcgtggtggtgggcacctgtaatcccagctactcgggaggctgaggcagtagaatcgcttgaacctgggaggtagagcttgcagtgagcccaagactgcgcctttgcactccagcctgggcgacagagagagactctgtctcaaaaaaaaaaaaaaaaaaaaaaaaagcaatttcaaagcatggacctctactgcagtttttgttaatctatgactcttactgtccattgtaatgaagagtacaagagaatccagaaaggcttacccagaaatacttattttgctgtacagatgcctgaagtccccctgttctccttcttcaagcttgatggtcaaatttctagaataattcatcaaacaatcaaaagctgaatgtgctacacagttaagattcagcttctactgaaaaatgtcaaagttctacaaataatacaggttctgagatatgaaagaaaaaagtgtcaaatctttactttataaataaactaccaaatgcttaggaagaatgcatttgggcgagttgcctgttctcgtgcagcaaaccaacagaaatgcctgacatatgatctagaattcacttctgccaggctagggctgcccaaccacaacacatcttgagtgtcttaagaatcagtctttgagaaaacctcctcacaaaatcattacataaaaagatttgttgcacatttcctgcgttttatttagacaggtacctgagaccaatataatctgtcctccccatcctcaggataaatagaagacataaaacatgaataccttctgtgttttcatcagtttataatctcataactgaataataatttcagcaagcaaaacatccacctagcctctaaaatgaccattctcaatattagcaaattaaccatttcatataaacccagggaattatcaatattctatttctgattctggttttgcaatttctggattgggcaagaggaagagtcacttatcttttgtctgtatgagagatggaggcatgaattgatgtgaagaaagtccagtgttttaccttggaaagcacctcactagaggatatactaaaatcagcacaacagactgaacacatacctatggacgactacgaagcaagaatttttatgtgaaggtagtaagcaaaattgttacatagacgtccttctgtgtatttgaggctgcctttcaaaatcatcctctt

SEQ ID NO: 114518 - DNA, 1024 bp, Homo sapiens
ggtaattaaaatttaatttatccgttcttggaaacttacttcctccaactccttcttcagcacttttaaataaatctattagaatttgttttaaattctcatactgtgttttctaggtgacttgaatggttctataactccgttacttactgaatgtaatctgtttattttgacttcccctctacccttaggaccatgaactagcaatttaataattgacttcggttattgagttttttgaaaaggatgctgcttgtttataatccagaaatgttttttaaccctcactgcagctattttgggagcttataaaaaatcgcagtggtggaaagcatatttatttgcacatggagaactgtcagaattcccagagacaataaaatttttgtctgtggcagcaactttttaatagcttttaagtatttttgttatgtttttagtttttaaattatgtcctactttgtaaagataactgcttaaggaatgatttcttagtatgacttttcagaccagaaaatatatatatataaaccacctgtatttggaggttattgattaaaaattgcttttcttagaagggggctgccaggaaatttcactgtaattttgagtagagctgtgtgcactgctggtattatgagctgttgagaaataccatcaagaattgaatattttgctgggccagaacattttcccaaaaaattttagggtaaaagcaaagtatgtcttgtaatttattagtctttgttcctgaaagttcattcatcttccttatctttcttaataatttaatttggtgatgaaaaagattcatatatgggaaatactccatggtttggtaactgcttttccttaattagcacggtgaatatgtaggttgaggaaaacactgttttcaattctgtgccttagttgagcaagtgtttcaaaatttgctgcaggataataagttttgggtgaaaattggaccctgtgatcaagtaaatctgaacagtgctaagctgactacattgaagatggtttc

SEQ ID NO: 114519 - DNA, 1047 bp, Homo sapiens
ttcttatactgaagacgaaagaaaggaatctctgtgggtttttttttttttttaactgataagactttgagttgaggctagaagcatctagcctcagcttggcagaatatattatgataccatttctttgaagagatcaagtaagacattgagccaaaactctgtctgtgcgtgtgtgtctgtatgtattcaagttatgaagttttaacttatcgatgttagcatttttacttgtcttcgctactcttgatattaaagattataatgaaagaacataatctttccagaaataaaaaattagtttacatattctgaatttggcacttaggtttaaatccaaggattcaagtcaggatgtgaagattgtgagtgctgtggtcgctatggctgcatacatacatcactacctcgtatgtcccatgttttactttgaagactctccccgccattaagctaacatggcacaaggctcagcttgctaaaagtgaggtaagggtctattggataactgggtcaaaatcactttaaggatctttgctgagatttttacgaatagtttttcacttgggttgttgttcgaagggagtgtaatgtcatttaacattaacaaataatcaagtcttcaggtctttgccttcacgtggatagcgagtcggttccttggccaacatacgcacaccttaggggctgggagggacttggctgggttttttcctgggcacacctgcagtttgtatacactggcagaaaaattcacaccacggagtgttttgttatgctcattaagtgatttattgaaaaaaataaaccatttctaaaccctcctttatcagaaagtgtgcagagtcgtctgccaaacaaaataatccagctggaattaagcaaagctcccctcaggactgggtatttgtgttacagcttgtcccatcctctgcctcctctctggcgcccccaagcaggcgtggggtcccccaggggctgccactcacgtgtgccccagcagggttttgccgcttcaggcccacactgagaaggacatacataccc

SEQ ID NO: 114520 - DNA, 1262 bp, Homo sapiens
gaggtcgcaccattgcactttagcctgggtgacagagcgagacttcatctaaaaaaaaaaacaaaataaatgttatattttatgttatgtctattttatcatgatttaaaaaataagtataaaatattatcacatattttatgcattaattatttttccttggagctcttaagaggcctaagttttttcttttgttttttaaataaaactttgtcagctcttcattcctctacccatttttttgctcagttctacctaatgattgtaaaatctgtcctctcagtagtgacaattagtatcctcatacatattagtcatatatatccccgctcaaaactttcagacatgtgttgtaggctgaaggagaaaagaccatgattaaggtgttagcctgtcaagttataaaaaaccaaatggcatagtatagtaaagcagctgtgatttttttgtctgaggcgccactcagaaatatcctgttttcccgttcattttccctttccatagatgcccttgcagtcaccttccaggatgccccttggctgtctttaggtgtcagaaccttccactttcctactgactgtgaagggcatgtaaatgcctgggcatcattagaaagccagggagagctcatttaacctgatgtgtcagtagaattttgaagcagataatttgaaaatgtgtaataatactcgctaaatcagatcatttgtcatttctagaaaccaccttatgaagcaaattcataagcatccacttttgcttgaaacaggcagctaagtaaaccattagaacaactgtcacaaatcaagaaaatgcacaactcaatatactttggatcccaaatctcatatggtaaaatccagattctaaacatcagaatttggtagagctctgaatccagaaaagaataatgtgtgtttttttatttttccatgttcaacagtcaccttcctcctagaaaaatgcagcacaaacaacttaatttggttttgtcctagggcaaaatggaaaatggtggacacttctaccctgctggaatactatagctttccttcttaaaaatctttaaactatatcttgaatacagaaagaggaaaaaataaactgttcttaaaaagtgctatggaaattccttgccctggccagacacttcacttgttgaggatagaagagcattggatctcttcatgagcaaacccagcatgttcagagaggcgtggtaaggatgagagcaaatgttatcttccatcctttataaggca

SEQ ID NO: 114521 - DNA, 1121 bp, Homo sapiens
accacacttggggagtactaagcatgaggcagagtgaaacaaatcactgccactcagagaatgaagttttttctctctgcaaccaagtgtcttatttgctctacggtgaatgggaacttgactccaggtcaaatcttgtggatgatgcaggaacacggtttttcccttttatccctctctccttcgaggaagagaaaaatgtggtgtccactaaaaaaatatgatatcctggtttctacagtagttcatgcttatatttacataccttatatgcaaaatgtgtgcccactgtgtatgaatggtactgtctgggctctgtcgttaaagtgagtcgagatttctttattgtaacccttaagttatccttactgcttcttttccatcctccctcacccagagaataactcaagagcgagcacacactgaggaggtaagtggaaggttgttagggcgaggtaataggagagaaacgcatgttaagcttgagtcttctcccttcttgctcaggttctatattctgaccagggtctgttagtctgccctggttttggcattgcctagttcactttttctgctactttcagataggctcttttttttttttttttttttcgctaatcccctgatagttgtttgggagaagggctcattagttggggtctggtgcattataaaaaatgagagctggccaggcgtggtggctcacacctgtaatcccagcgctttgggaggccgaggcaggcagattgcctgaggtcaagagttcaagatcagcctgaccaacatggcgaagtgccatctctactaaaaatgcaaaaattagccaggtgtggtggcatacgcctgtagtcccagctactcaggaggctgacacaggagacccacttgaatccatgaggcggaggttgcagtgagccaaaattgtgccattgcactctggcctgggcaacagaacgagtctcttctcaaaaaaaaaaaaaaaaaaagagaaccctggtggctctgcaaaggtctcgtttgttagggagctgagtggcccaggagatgggctgctgctgctgagttgtaggcaattagcaatgtctgaatgttctaattgcttaatcactcctgggcatcta

SEQ ID NO: 114522 - DNA, 1047 bp, Homo sapiens
gtgatgtcttcaaatctcagcatggtggtttcaggcacaggacagatggaagaaagacggttctggactcgttattcatccaagctagactcttaacatatatactcgttaaataaagagatcaaacaatatccatttttgttttttgccagaataacaaaatagaggcattattggaaagcgtgtttctgtcaacaccattaatctggatgtggaagggtcagataccttattaaagtcctctttgaaagttcagttgtaggaaaagggccttttttttttttttcttgcacgcttaggtaaacaggaataaaagagcaggaagaagttgataatatgatagcttggtaagtaatttctcccctgagggaaacatttttaagtagaaagttgataccaaccctatggctccaatcctcccgaaagatgctcccagaaacttgggagttctctgagaccaagacaatgagcttgttatgcacaaagaaaagaggagtggggagaaacaggaaaggcagaaataactctcaaactcaaaacaaacgtgaaaaattcttcaagtctgaggagtgtgctgccaagcaaatcccgaatctacagctccgcatgtaccactgcagagcagatagtcacagacagtgaaaggggctcgtctttaaatagccacctgtgaccaccttccagttgcaattacagatcaagaaaatagaaggttctccctgaccgctgttgtttctccagatctctgacttgtagctaaaacaccctaataaaaatctgaatagccaccatcagtacttagcaaagtgagagcaaggctgaagcctcagaaggctgcagtttagatagaaacagcattcatgtctttctttaggtgaaggacctcttctaagtgacagtttgcttcttttgagccagtagccaagaaatttggcaaaagcactaaaacactgcattttgctagaaacaccttaggccaaaagtagggtcagagaaacttggcaagtgaaacaattgtgcttttagaaaataagcatgcctattcac

SEQ ID NO: 114523 - DNA, 1027 bp, Homo sapiens
tcttagtcggcctaggaaatccagctagtcctgtctctcaacagaatctcggtccatcgccaggctggagtgtagtggcacagtctcagctcactgcaacctctgcctcctgggttcaggtgattctcctgcctcagcctcccgagtagctggaattacaggtgcaagccaccacacccggctaattttatttttagtagagctggggtttcaccacgttggccaggctggtctcaaactcctgacctcaagttatccgcccacctcagcttcccaaagtgttgggattacaggcgtgagccactgcacctggcccagagtataaaactttgaaaacaaatttaaaattctaatcttttcctgtcattttcctagtgtctcgtaagaagccatggttatttgaaagcatatggtcttcccatattgagtaggagaaaatctctttatcctaagattgtcagagagactgggtccatatctataggcacaaaataaatagatctttactgtgccaatccatatgctttgtgctttggcagcctgagcagtagattgtcattcagctgacgtggccccatgcagtttttactaatccagaggacagctagaaggaccaggcctgcccagaccaggctcacaggaatcctgatggaagcctgaatgtgccctccttctcgacggcgacactttgtctgctgggcagccctgggaccttgctccttgtctttgctgcaacatgcaggttccggcgatttccgagtggaacctttctcccacagtcaggactcaatatagtcaggatgcactagcacagctgtttctcagagccacatcctcagcctccacagcaaaggagactttatttccaaaccagtaacagcccctttttcccccttagtaatctctgtgtttttactggctacataagcattcactttgaggtgccaacttttctctctttcttttccccaatatggatgaaaataataaatgaaaaattttgctctcattaaccagccactgtgtc

SEQ ID NO: 114524 - DNA, 1024 bp, Homo sapiens
aaagagtggggctgtccccaggggatatgagatcccactgaccacttttcttttcctcctctgaggtgaacccatcttccttctgagccccgaatggcacttctgtgcagagcttctcttggagcacagaggaaggcggagtccagtcttggtgttacagagaactgcacacacaggcagtgagaggcagagccgcagatagcctgggatcaaaggccccagcctgcagccagccttccttttctctgggtgttggtgtcctaaacctcctgcttgtcccctttgagaatcatgcactgttggaacagagagtgaggcttcctggcagcattgtgtgggtcgtagcacagcctcagtaggattccatgtcataggcaggttccgcagtcctcctggaattctcttcttatatacactgctcttttcctccttaaaccttcataacatcaccacgcctttgcctgcccccactgccctctcctaaactaatgggagcacctcacagttccttatctgtactgcagagcaagactttcttctaatctaatcatcaggagaaaaaaaaaaactcgatgagggctctctgggctttaatcgtttgtgccttctggcagacgtcgcagtttctctgcctttcagcaccttttcacaaatcaggtctgtttcaaagatttttcctgcttccaagcattcattagtttcagattagattgctcagcttgcctttgtaaagggttcctttcctctccacagcagccagctccaggagagggagagagtgcatcacggcattcaccctgcctttccaggaggtgccatagtaggactgttggcactgccacactctgtccccatcttaccgtgaaccccggaggggggctgaggtgtgattccagcctactgtcctggcttctggcttccagactcagcacacagtagggacttcagagggcttgaaggaaatcagcggctgaatgcctgaaaatataagctttcaaatgcagtttgcttaaggttagtacag

SEQ ID NO: 114525 - DNA, 1071 bp, Homo sapiens
tgatgcacactcccgggggtaccttgacacggtttggcggacaggagggtgggtgtgaaacagatctgcttgggtggaattaatgggtgtgatgggaatgaattctcctgggtgaggctagatcttctgcaggatcccacaggatacctattctctgctggcatcatgaacccaggacagcttgagtgggccgggatggtaaggtaaaaggaagatactgtgcattcttccagttgcacgtgaaagacatttttgggggacgggcaatagaaagttgtgcctgtaacttgatataatttaaagtatagtagtggccagttgtctgctgctagggacacacgtaaggcagtttaaaatgtttttgaactaatttacactccaggtgacaaaataatctgtaccacaaacccccacaacacaagcttacctatataacaaaccagcacatgtacccctgaacttaaaagttaaatttttaaaaattaatgtttttgcatcaaaaataactcatttctgtatggttagagaaaggcttgttctgattgtcactatcagtagctgcttggactttaaaatttctgttctctgccctgtaatttgttgtgacctaatcatgtgctatgcaccaggctaatttccaggggccttgctgcttccatatcatgtttccttttccttaattagcccttaaggagcattccatttctttcttttttttgagagacaagatctcactgtcacccaggctggagtgcagtggcacaatcactgctcactgcagccttgaactcctgggctcaagtgatcctcctgccttggcctcccaggtagctgggactacaggcatgtgtcaccactcatggataatttttaaagtttttgtagagacagggtcctgctatgttgtccaggctagtttcaaactcctgggctcaagcagtcctcccaccttagcctctgaaagtgctggaattataggtgtgtgccactgcacccagccccaaattctatttttaagtgtgttatagctatgttttctagtgaggataaaattttaaaacacctaactgt

SEQ ID NO: 114526 - DNA, 1334 bp, Homo sapiens
ttaattgtattgtagttacagataccattcattttcatttttaaaagaaggaaaagtatcaaaaagaaaataagaatatcttatgcaagcccaccacctagaaatctgtatcttattttagtgcataatcttcttatctcttttctgtgcatatattttattttattttatttatttatttatttatttatttatttatttatttatttattgagatggattctcactctgttgcccaggctggagtgcagtggcccgatctcggctcactgcaacccccgcctcctgtgtttaagcgattttcctgcctcagcctcccgagtagctgggactacaggcattacccaccatgcctggctaatttttgtatttttagtagagacggggtttcgccatgctggccaggcttatctcaaactcctgaccttgtgatccgcacccccttggcctcccaaagtgttaggattacaggcgagagccaccacatctggcactatgcgtatattttaaaacaatattgtaacctttccctactttttatcgtaggcaatttttcttgattttaaatattcatctaaaatttgatgaattgggagctacgctgtaaggatataaagacataagaatgatacaaaggactttgggggctctgggggaagggtgggaggcgggtgagggataaaagactacacattgggtacagtgtacactgcttaggtgacaggtgcaccaaaccatgtaagcaaaaaccacctgtactccaaaaattattgaaataaaaattaaaattagaaaaaagtgaaataaaatgtgatgattaatgctcctagcttccatcacatggctattccatcatttatttaaccaattatctgtagttaatgttcaaactattttattcctattgtaaataatgctatgcaacatattgtacagaaatctttgtacacatctgattatttctttggattaatattaccggtcacaatgtgccccttttccaggcttctgcagagcggccccacacccctgtatagacagttgttccagctttccttagagatgctgggtctggatatgcctgtgttcctgatcctggcacatggtgggtgttccctcccttgaagctattttattgccctgtgactttgagaatctgcattttagttctctccagccacaccatgttgaactccttcacattatttgttttattaaaagtattgtttaatgctgagagatctattaagtttttttttctttttcttttttttgagatggagtctctgttgcccaggctggagtgcagtggcgcgatctccactcactgcaac

SEQ ID NO: 114527 - DNA, 1066 bp, Homo sapiens
cctgacctcaagtgatccacctgccttggcctcccaaagtgctgggattacaggtgtgagctaccatgctcagccccaaaagtactcttaaagtccatccagggaaggaaagtaacttggttatttgtcagggcaaaggttggggacaatatttattcctctagataaaatgttatcaaaagacagtctacatctggttcagggtccctagggacagactgaccagctttgtccctagttcgggggaggatgttttggtttaagttagtttgcaggtcctagctggtttttagatcagtaatgacatttttcagaggcactgaaaggtgggctgtcgataagaatctacagtctcctcaataagatgggctgacatcactgtccccagcctgggggacagaggaggggctgtacgtgtgtggctgtgtactctggagcatgaggaggtgacaggcactgccacacaccacacccactaggctatctcacccaggcagaaatatgccagtgaggacctctggctccaggctggggagaaatccaaaaacagagcagagtcctcagatagggagtttcaaagatggcttcaaaagtgaggttgaggcttcttaggacattttgtcatcctgattaaatggctggaaagcagaatgtctgctgacaggttaatgaggattttcctagtgagccagatgaaccaggaaccaggaggggcagaggtcagctttgtggttatcagcttctgaggacgtgagaaggaaaggtggcttattctgtgcatgtcccaaagaggaatattatgtgcttggagtcttggaggttcagtcatcctgtgcgagcatttatgttgtgagaactagttacttcaggttactgcctttcattcaaattatagtgagtccacattagtaagcttttcagaacccttgcttcacttaaaaaatatatgtaggccgggcacggtggctcatgcctgccagcactttgggaggcctaggtgggcagatcacttgagctcaggagttcaaggccagcctgaccaacatggtgaaactccatctccact

SEQ ID NO: 114528 - DNA, 1078 bp, Homo sapiens
ggtgtgcagcttgtcaagggtgacttttccagcaccccattccctccctccctcccctcaattattcagcagacttttccagccctctctggaaaatgttaaaaagactggatggtgtgaagcttcacctatggaagggtttttagtgcacggcagtattatgtaatttgcgattatgtaaacctcagctctaattaaaatgtagtttctagtagcttaagtgctgggtttttatttacccatggctggtggtaatggtgacggtggggagattctgttttataatgcgtccaagttgatttcccaggtacttccatttttaaacatttgtttcgtagtccaggtaaggattaggggtatcccgaatgtgtcctgataagccggtcttgaccatttatttctagtttgggatttcttttttttccttttccttttctttttttttctttctttctttctttcttttttttttttcatggaccactaaagaaggggagcacatttttgtttggggtcgccttctcgtccttgtttcttttcacgttttctccatgtggcgtcattgaaaatctagcgctgcaagctctccagcgatggggcattggcaccctgcactttgcatgtggggaccgttttggcagggccaccagcgggatgcagctgcgttctaaggccggggagaggatttggtgatggggaggcagtgacatgccaccctgatgggcaggtgtcccaagtggccagagcgtgtgacgagcggcactcctgtattgtggtactgtctttcttctttccttttaagtcaagagacttaaacggatatttatctagaatatgcacctattttgatgcagtactcattgtaaaagtaaaacagctttcaggaggcagttacaaatcggagatttgtgtgactccttcgtttgacgaatatctgtttggatttgtctttctgtgctcaaaacttttgaataattgcaactctgtaagctctctaatatgtagcccacattgtaagctactttttactttgaattttgttggtgataggtgttcacaatatggcatattctctaga

SEQ ID NO: 114529 - DNA, 1034 bp, Homo sapiens
aatgtggtgtgagagcaagagaagagtcagggaagtcatctaagtttttggctggagctcaaactaggggtaccatttcctaacatgagtgcccgagggaggagctggtctggaaatggaaatcaagcatttggagtggatgtactgcctttgtgctgctctgtagacatcaggtagagatgtcatagacagagctgagtgcctaaactagtctggagctcagaggggaggctcgagattgagatttaggagccatcagcagaaatgtggtccctgaggtcagaggcctggatgaccaacaaaggagggagaagatgtgaggtccaagaaccaacttctcagtactccaagcttcacacataggaaagggacagatgctgaggggagttgaaggagggaaggaaaccagaagagagtgcttattttgacagcaaatggagcaagtgcactaataaactcagtatcatgagtactgagaattgaccacagggtttagcaatgtggatttcattagtctcaaaaccttatgtggtagacattgttattttcctcatttttctttctttctttttctttctcttttttttttttttttttgagatggagtctctctctgttgcccaggctggagtatagtggcgtgatctcagctccctgcaacctccacctcctgggttcaaattctcctgcctcaggctcccaagtagctgggattacaagtgcctaccagcacgcctggctatttttttttttttgtatttttagtagagacggggtttcaccgtgttggctaggctggtttcgaactcctgacctcaagtgatctgcccgcctcgccctcccaaagtgctaggattacaggcatgagccaccgcacccggccattttcctcatttttcagagtagaaagccaagactcagagagacttaagtaacttgcctggatggaaaacagtatggaggcgcctcaaaaaattaaaaatagaactaccatatgatccagcatccccactaccgggtatctatccagagga

SEQ ID NO: 114530 - DNA, 1076 bp, Homo sapiens
ttttcccttgaaggaggcttggaaaactcatttatatcactaagctgttgggagatagctggtggctggaatgaaaatcatgtcacaaatggcttctgggacatatttaacaggctcaggtagctgagatggtgtgattggtagctgagatggtgtgatgggtgacaaggaaccatggagattttgattgttgccaaataaaaataggccaaaggatagacttctggaaggcgctgttgggaaggtgctattgaggcacccaaaacttaggcctgaaaagagccaaggagaactgcaggctgtgtcatcttcttttcttccacagatgcaaagatggggactctgagaactcgggtcatctcttgccaagctgctgaatagccagaggtagacccaggttctttgcaaacttccttatttacatagccatcaaactgctttaaacctttgtatttctaaaactgacttaacaagttaaaacaagttcagatctctttgtggcaacccaagttctcccaaactcttggctgaaaatgccttgctcattccgggactgcccaaaggtaatgagacctctgtcatctcatccctcacttgatcctgactccagtgtgagtcctgactccactgggccatgggcctgcccactcgccttatttctgacctcccctttggagcagctgaaacagttcaagacttgacttaaacagtagcatatgaacaaatgttgaaatctaaatctgggcttttggccatgcaaaacagggtgggagttattattttttgccaatttgaagtaaatgaaaatccactttttttggattgggcgaatgaggcaaaaaacctcctattaggaagatccttccttttgcccctcattgtttgtgttgtactcagccctgccacagaattgtcatgttacaacatgacaagggctttattagagaaatcactgcctgtgtaggcccctgttggtttgtgcccatgggtttgtgttctttacatgtcccttgctttctcagaacgtgtacttgacccggagcatctacgttgccatggaactcctttactttagc

SEQ ID NO: 114531 - DNA, 1083 bp, Homo sapiens
tctgctgtcatccatgaaagatgtgacttgctcctccttgccttctgccatgatcatgaggcctccccagccacgtggaactgtgagtctgttaaccctattcttcttcccagtctcgggtgtgtctttattagcagtgtgaaaacagactaatacagacatatacaaaactcaagtttctcatttgagaaaatggagataaaatgcttctcttgcaagttattgcaaggatttgaatataatacatgtaagggctactagattactgccagacacatggaaaatgctcaatgaacattattcttaataagttacaaatttaagtttgttgaagtactttaggtcagcaggtagaaggatctggaagctggggccgagggaacacagacaatgctgggttgctgagttctattgttcttgcttccttggccagctctgtgctgcttgttcttttcacccagctgtagactgtagaaaggtcttttccgtaattgaggcaggggcagttatcctaggatatttagaaaaaggcttatttttccttggattgcatttcacaatgtcttaaggaacctctgtgcatgtgcttgtctggagtggtaaagattgttgtattagtctatattcatttcctagcactgccataacaaagtataataccacacgttgggtagcttaagacaatagcaacttattgttttgtggcaatagagtctagaaatcagaaatcaaggtggcagcagccgtcttccctttgaggatctgtagggaagggtcctttcttgcgtttctcagcctcttttggttcccgacagtccttggcattctttggcttgcagctgcgtcactccagtccctgtgtccttcatcacatggcattctccctgcatgtctgtgtttctgcaactcttcttctcttttaaggacagcagttatagaattgagggtccactctgctgcaggataatctcatcttaactaatgacatctgcaatgaccctgtctccaaataaggtcacattctgaggtactgggggttagggctttgtttttttttgtttttttttttgagggagtcttgct

SEQ ID NO: 114532 - DNA, 1092 bp, Homo sapiens
tgacttatgtaaattgtagcctgtatagtagaatcaaatgcagttaggaaagttggctaaattgatacaataaaaatggaaatgagaaagatctcattcataataatattggaaaaaaagtcatgaaatacctaggaatgaatttgctgagaaagactctctgaagagaactataaaattatattgaaggacataaaacaaaacccaaatagatggagagacagaccacgttcctggataggaaaacttaatgttataaaaatgtcacttattttgaaattaacatataaatttaatgcagttccaatcagaatttaagtctttttttcttttggaatacatgaagtgattataaagtatatatggaagaataaacacatgaaaattgcccagaaaatgttgccctactttagtaggcaactttagtaggctgtttgccctactttagtaggctgtttgccctacttgatgttaaaatcttatataaaactactttaaacaagaaaacatagtaccggcctgcagtaaacaaataattctatagaacaaatcgagataatttagcatataattaatgaggccattataagtcagtgaataaattattcattattcagttaatgaaattgagagaactggctgtacttttggaagagattaaaattttatttccagcctggcacagtggctcactcctgtaatcccagcactttgggaggccaagacaggtggatcacctgagctcatgagttcgagaccagcctggccaacatggtgaaaccaacactgtctctactaaaaatacaaaaattatctggctgtggtggttggtgcctataatcccaggtgttggggaggctgaggcaggagaattgcttgaacccagaaggcgaagtttgtagtgagccgagatcacggcattgcactccagcttgggcgacaagagtgaaactttgtctaaattaaaaaaaaaaaaatgtaatggacatttaaaatatttgctgactagggagcaacttttgaatcccttcatatgcttggagaattctccactttataaattctgcctaaggtggaagccggaaatccact

SEQ ID NO: 114533 - DNA, 1077 bp, Homo sapiens
taagacaatatgaggggtggtttcctcccctaccttcactgggacttcttgccactgccatgtgaaggaaatgtttgcttccccgtccatcctgacttttaagtttcctgaggcttcccaagtcatgctgaagtgtgaatcagttaaacctctttcctttataaattacacagtctcggatatgtgtttattagcagtgggagaacggactgatacactgagttacccttataaaaagttaaatggcaaattattaactgggagaagataattataatccaaataacaaacagtgaaaacaactaaagaagaaaaaatatgcaaatgatctaaacaggcaatgcagtgaaggaaaaaaaaatgcaagtagaaagctacataacctcccagataattagaaaaacaataattaaaaaaaagttttaacaaagttgctgaaactaaaaatatcattagtttcagggcttgtgtgaaggtaggaaaataactggtcttacagtgtgttggtggacatgtacaggcttagggccctgtgacctgataatactctacaattaaaacgtgactattcattgatttattagtttcattcataaggacttatctaaaaaataaaaacaaaaacatggggatttaaagatacacaaatgcatccacacataaatacaaacaaggatatttatcacagccctctctggaatagaaaacatctggaaacaactcaagtgaccatcagaaggagaatgatggtgtaaggagtataatgcccacggttgaattctaaagcactgttaaaatagggctgtctgtatcagctttaaagtattttctagatatattattaaaggaaaacatccaatgacaatgtcgtcaccatataaaagattatatgtataatctaagcaaagttaatattatagaagatatacaccaaattgctaatagtgcttatattgtggaggagagattgaatgtgggagggagaaactataaactttatttcagatatttctttatcgtttacatttggcacttttacttttgtaaaccaaatgactatgaaaaatgcatgatagt

SEQ ID NO: 114534 - DNA, 1307 bp, Homo sapiens
agaacagccgagtaaggttttgatttacaggaacagctcagcaagggccttgtagagagcttcatgcctgctataaaaatgtgattagctataaaacagagagctttaacaagagcatttaagcataggcaacagacctgctcaaaaataaacaaaaacagatattgctgcctgagtgtctaacccaacttcataaagatcaggattaggagaatttttttaggcttgtgatataattaataactttttacttttagagtcaaaagaaaggaaaaggaaagatgaccttgaactttgcaaatgacttcagtctgcctctcctctaagcctctctcttcagcttgtgcagttctaaagcatgaataggaatcctcccccaaaacagctccctgtgtcagaccctccctggacaccaaggatggaaggaaatagaagccagcaggcgtccagggcctcaggaggggaaagtgtttaaagctccaagtctcccagccccctgccctgggcagtccctcactgcttgctctgtgacaagtctgcactaataaccctgcactgggaaggtctgtggccagagcctcacccagttcccatcgacagtccttttgaaaacaagtgccccttctaagttagtctgaagaggtccattggctggatatggaaaaaggaactaaaatgctgcacatctgttaatcactggggtaatttcttagtgattagtcacaacagccgtgatctatggatttctccctgtgtgtcagtcaccatgcagaggactttatacggattatctctgtatcttccaacaaactctctgaagtaggctttattatctccattttatagtggggagagagcatacccagaaagattatcatacaacacatgaaagttagagttgggattcaaccctggcctgtctgaatccagagatcaagcttttaacccctatgccaagaaagtggttgtactgaaaaaacactcaggttcgagagctgagttctcctgtttctagctgcagttgctttctctgttctgtgaaataccaggtgtacgttcctcctttgcttaggcctgatgcagttacagtgaagaattttcaaaaaattcgtatcttcgcaaaagaggcatgtccactgagtctgcaggccaaacatgaggttccctttgctactttttgttacttcttttcctttgtgtctttcttgcttatccttgtcctgctgaatacatctggccgaaagctcttcctttctgggagtgaaacagtgctttactggaatacgtatggcatggtgtggttaact

SEQ ID NO: 114535 - DNA, 1083 bp, Homo sapiens
ctaacttccctatcatcaaaacacatacaacaactttacccttacctttttgttggcattcatgataccctgtcttataggtttatattggtgaaggtcttgtctgctataaattagagagataaacatgtcagtagcatgattttttgttagtaaaacttttagatgattgtagatttaaatcttaataaaatctttggatttctgagtcaaagaatgtgtaatttcaaatacaagaaattaacatttcttaattgtcttctgagacagcagtgcacaataatgaaaacaggttaagattcagagggtagggttggagaaagaagaattaggaaatgtggagaaagtttggtggatgataaaaagtctctattatgttacacttagctgtacttgattttgttctttaaatacctacactgtccttgggaaacaaattatttaacatattgtgataggctgaataatgtgctgcccaaagtaactctgtcctaattcctagaatctgtgactatgttgttacatggcaaaaggggctttgcagatttgattatgttatggaccttgagatggggagaatattctggattgtttgggtggacccaatgtgatatggtttggaagtgtgtcctggcctaaatctcctgttgaattgtaatccccagtgttagaggaggggtttggtgggagttgagtggatcatgggggcaaattttcttcttgctgttctcctaatagtgagcgagctctcatgaaacctggttgtttaaaactgtgtggcaccttccccttctctctcttcctccttctctggccatgtaagatgtgcctgcttcccctttgccttcttccatgactgtgagattcctgaggcctccacaggcatgcttccagtacagcctgtagcactgtgatccaatgaaacctcttttctttataaattacccagtctcaggtagttctttatagcactatgagaacagactacacaaggtaatgtggagtgtacaatgtggaatacacaatgtacaatatggaatacacaaggtaatcacaagggtccttgtaagagagaggcagggc

SEQ ID NO: 114536 - DNA, 1081 bp, Homo sapiens
gatgctgtacgccgtctcttctctatgggacctcagtgaggcacatactgctcctctggggctggcgatcacaagtcatgggtttaatccctgctctaaatgttactagctgattagactttgggcaagacatttaatttctctgatctgtgccctcttctgaacaatgtggattattgtaagacatataggagtggttgttgtaagtatcaagtggggtaacaaatgggaaagattctcccaaggcctgtctcaggcaaaccatcagttatgtccattaacccttccctctctctttttctgcctccctcctcttccatccttccttcctttctctgtttcttgcttgcctttttctttaaaattctttaatctcctctttctcttttctgtgatataataatcacaaaagaaggacttatgatacatatgttcaggtagttcagaaaaggaaagagcgtttcacaattgaaagcatgagagaagtattcaaggagcactcatgtaggtcttgaagtgaaagtagaccttacatatatagaaaagagagaaagcatgtccagatgggtggatgtaaagttagcgccatcatggagggccttgcctcctttgtactctattagacaacatggaggctctgaagtttatttatttatttttttgagacagagttttgctcttgttgcccccgctggagtacaagggcatgatcttggctcactgcaacctccgtctcctgggttcaagcgattctcctgcctcagcctcacaattaggtgggattacaggcacgtgccaccatgcccggctaattttttgtatttttagtagaaacagagtttcaccatgttagccaggctggtcttgaactcctgacctcaggtgatccgcctgccttggcctcccaaagtgctgggagtataggcatgagccgctgtgaagtttattttttaaaatcatttctaggtattctataaaggattgcttctgaaaacagagttcatgattaatagactaggtagagaagagaagtggagagaccatttcagaggatgtgaatcaaagtaataacaaatgaaat

SEQ ID NO: 114537 - DNA, 1036 bp, Homo sapiens
aatctgtttctttgatttttttttcagcttccagaggctacctgtattcctttcctatgatccttttctcaccttgtcattcaaacttctactactgactgaccctcttcctcccctctaacaaatacttttgtgattacattgggtctaccgggataatccaaaataactttctcctctcaatactcttaacttgatctacacgttccattttaccaggggaagaagcatattcccaagtttcaggaattcagacatagacatctttggtggagggtgggggggctaccatatatattgatgtagatatggttttatgttttagattgtactgcctccctatgagtttctgttttcctggctatggccttggtcctcagaatctgttcccatctttgagaatcccacctttgagagtggcatattcccaccataatatggactccagatttctgtcctgtcctgataaattggtcagtccattgttttgctaagggtgtgccactttaatgaaaccatattaacctgattgaagaagaatcttgatataagcttaaaattaaaacaataatagtttaataatggcacaaactaatttcaaagtagttagagcgacagtttttccttgccttttctgattctcactcttgaatttggaggtgaaagtgggtgcatctttggttgttgtccgtggtcctgaactatcccagatactaaggttgtttctcttgacccctgagacaccaggaactgctgttcagtttctctgtcttgtttagaaattccaaagtaggtgagaaaagtagataagtctgtgaacagagcttagtgcctgagcattaaatggatacagactgttggaaaggcatagcccttgacagatcaccaggtagaaaacagaaaacatttctgacatgatttttaaataattgaaactgtaaaaacatttcacagtttaccatgttgtaaacatcaaacagctaagcagcataggaaatgtgtgcattgaacagtgcaaaggatgtgcaaccaaaac

SEQ ID NO: 114538 - DNA, 1068 bp, Homo sapiens
taatgaggtaaacttgcaaatttatgtcttatagcatgactaattggagagaaaaaagccttctttaaggactcagtcacagagttatctgccaactaatgatgtgtctgatcattaaaatcagcttatggattttgttcatgggtttttcaggaagcaagtatggatgccacattgttctttagatggggaggtgggacaaaataggggagaaggtaatatgtttatttcaatttggaaggaaataagcacacaccttacatatgtttgcctattcagagatccactatacctgagcatctcattgatttcagaggcacactcatccgattgccactataaatataacagatcaagagaaaagggagctacatcttaaaactgggaataatagtggtccaaaaactgtcaaatttcttattcttaaatgttttcctaataacccataatctattttgtcctatatatttcagtgctatatattctcccttgaattgattgcctgcagagtaaattgttaaattgtgaataaatcttgagatgtaataggattctcagaatcaactttgaaaatttcagaatggttttctgccatagaaaccaacaatgccttgttagctaaggaaaaataaaccagatctttttctatgaattataacgatgataagagcacaatttccaataaatagccaacaggaaagacccattggactcagcccaaagggcaggtgagtcctctaacattagagggtggaaaactgcagccctcgggccaaatctgtcctttccctacttttataaataaaatgttattggaacatagccatgccatttgtttatacatcatctatggctgcttctgcactatgatggcagagttgaatagttgcaacagagaccatttggcctgcaaagcctaaaatatttaccacccatcttgttacagaaaaaaaaaaaattgccaagccttgttcaacaattttatctctgtttagaattggcatcagttcctgatccaaacttccaaaatgaaagtaaaatcctgggtacagacacaggtaattgcag

SEQ ID NO: 114539 - DNA, 1045 bp, Homo sapiens
ggcaacattctaagcattttacctcgattttcccacttaattttcataaccaccttaggaggcacagatactgttattctcatctgagagatgagaaaacaaaggcacagatgaagcaatttccccaagatcaaacagatggtgagcaggacccaaaataagaacccagaccctgtcactccacagcctgtgtaatgagtaagatgacccacgtacttccatttattgtttggtaaaaacccctctttatatgctgagcttgaataacttgaagaacttacgaaatgttttctatataaacaataaagtgaagctatttaaatttctgtctcaaacacttaagacatggtatagggagtaaatacctttttaaataatagatgaactgattttagatcagaaatggagaaaacattttccttgaaagcccaaagtattcattcatttattctaaattaatagagtgcaaaagagtctaaaacaaaagggaacattattaaggggaatggaaaacacggaatacaccataccaaaagccatttctctcttcccatggttctgagtgaaacaatttcttaataagaattatctatgtaaagaatcacatcccaatcttgaattttcttactaggacatagaatagaatattaagaaaactactgtctgagcatttttatatttaggttaaaaatttcattaatagttttaattataagcatcttactgatgtcatgcagtgaaatagaagagttacaaattttaattatacttagatggtagtttctgtttggaatttttgccttcttcctgtaggatttaagagaagtgaaaaatgaagccaccaaaaatgaaatagcttattactagtcacaaagatagacaggttttaattagacatttcaatttagatctttaaaaatattattttcgctcccccaaaacagagcaacaaatacatgtatggtttactgtgaaaattattaaaatcgtttttttttgtgagtttgcagtagacagtttatccgttggagaaaaacagaaaatt

SEQ ID NO: 114540 - DNA, 1129 bp, Homo sapiens
tcacagttccacatggcaggggaggctgcataatcattggcagaaggcacagcaggagcaaaggcatatcatacttggcagcaggcaagagagcatgtgcagtggaactgccctttataaaatcatcagatgtcatgagacttattcactaccatgggaacagcatgggaaaatcctgcccttatgattgaattacctcccactgggtccctgccatgacacatggggatgatgggagctacagttcaagatgaaatttggttggggacacagccaaaccatatcagtataccgatttttcacccttggggagccaatctacgggcctttttcttctgagttttgaacataatgagggcttagttacataatagatgtgttagttttaatactgtaaccatattttatgttatttgttttattatttaatttttattacatggtctagatttgattttatattttttattgttatttagaaaggtcatgtaatgttgtaactcttttagattagataacttttgtaattaaagcttcacagatctatttagttcattatgtttctttagctgctacttatatcactttagacccatgaagaaataagcatttttgagcatatttccaccttccatcctttctttctgattttatttgattgtagtatatatatttttagctatcctgctatttacttttatatttttaataaacttaaattgcttttcctttaccagatttaaattttatgttttacattggctataaaagatgagtcaattaaggtacttcattctccacttctcttcctgtgtacctccaagttttgttagttaccccatttctacatttgtcatagcatagcccatttctattctataaccatagttctcacagttgcattacttttcattttttgtttgaatgcattctgtaatcactgctagtcattttgctattgtttctcatttgtctcctgactttctttgcctgtggacctgggatgccttctgtcatgtcctgatactgaatgttgctgcagagaagcccacagttgcttatgtgtttcccttcaagatagatttatctttctatcctgtctggatgccagaaagatctttctttgtca

SEQ ID NO: 114541 - DNA, 2764 bp, Homo sapiens
gaataattctttgttatggggggctgtcctgtgcatgtaaagatgtttaatagcatctctggcctctacccactaggtgccagtagtacccctctagctgtaacaaccaaaaatgtgttcagtcagtgcccaatgtcccttgctggataaaatccccattggagaatcactgcaatagagagtttaagcaaaggaaaggtggattgatttctattttagatcctgactgtggcttgtagtcccaaacatcagaactgctctctgtgcttaatcttcttcatatatatatatatatatatatatatatatatatatatatataatttttatttatttatatatataaaacgctaaaaatctcttatctcctaggcccctattatctgtattagtaggggtttctatgtgaatttttggggaggcatattgtatgcaagtaagtacacaatgctaagtttttcacttaacagtgacttgtcattttctttttaaaaaatctattgtttggttttctttttgttgcatgcttgctttctttcactttttatttttattttacatgctgcttcatctgtctttagtagatagaacaactgtttcttctggtacatcgattttccatctagatatactaaaagatctgatttggaaagcccttgctttatagctctgccttgaaaaaactatccaactcagtgtttcagtattgctcttttgaaaaacaggtgccagagtgggtcatcgctccttgatgagatactacaaacagcgatttggcttgtcaagagctgtggcagttgccaaaaatcggaaggccgtgggccgagtacttcagcagtacagagccctgggatggactggcagcacaggtacattgatctttacaactacagaccagtctgagaacttgtatttctagaaggggtctggggaaagttgtttccatttatgttgtccatgtggattctctctaggggaaacgtaacgtcttggctccagggacttccattaccacttgatatgtttaaggcaataagcccaaagtgctatgacttagaaatttcatattcctggcacagtgattttatataccattaactttttcagaagataatagttacaaaaagaattatttagtaatcaccaaaggttgaaattatcctggaggttatgcagaggaattagatagtatcctagtggttaatagcttgagctgtggagtcagacgtgacttatgtgatgtacttagaggttcttatatgatgaacatgagtaatttaattaatataagcttctgtttcctcatttataaaacagagatgatagtaataagacctacctcttagagttgagtgggttgaatgtcatgcatgtgtgatatagtgcatgcccatagtcgaggttagctatcagtccccttttttgtaattttcccatagaaaatttagcaaaagttagaagagtaaagcatgccactgcaattgttgagttttgaaacctcatcagtatggtactctttacatctattctgatgtgtctgctggatgaagctggttatatccttagatcttcagggaaagcatctatccaactgaggactgtggagaaaataagaggcgggctgccttctgatggcctgggaagctctaggcaactaaaatccatttgaaaaggcactgtgtttatatgtggtttccttcactgtggctgcttgtgagctgtgtggccacttgaatctggcagagacttgacttcatcttactcttatcaggaagtattgtctgactcgatatatagcttctgcctttctgattaatggggctttaccttttgggcttataaactcttccagatgatgaaaactaaagctactaatcccagataagtgtatatatacaaaagttctggtatgcaattctggagtccacagagacccctgaggcgcatggcttagagaccccaagttagcaactctgttttaaatacaagaacctagttaccccaaactaaccttttgaattctctgccaaggttggattttctctgatcacaaataacagaactttgcctaatttcttaactgccttccaatcataggagcggctcttatgcgagagcgagacatgcagtatgtccaaaggatgaaatcaaaatggatgctgaagacaggaatgaagaacaatgccaccaagcagatgcactttcgggtccaagtgagattctgagagtctgctgggattgagcaatcatctcctgcccaagtttcctccttgccctgaggaccagtgaaagacagatcataggagagacccttttgctgctacttcattcgttctgacctaataataaaagttagaaccatatgagttttcagatgtcgtttttgaatagtgttgaaaggttatgttttcacaaggtaagtcctgtgtctactggaccctgggacttgcactgctgcctgacagttgcttcatcgcctcagctttaaatgatttatgattgtcagagtaatgtgaggaatcaggaatgacttgtgtgccccaaacttagtttaactttgagagtaactcaccatgtcatggcactgggacctatgtaagggggcttgaaggcttatgtaggggcaaagttgaatgtcactcatggaatgtatcatggtacaggaggtactgaatatctctgggcgcttgcattaaatccaggctaagttaaaaagcacatcaatagcttgctgtaaaggttttatatttctaaacatgactgc

SEQ ID NO: 114542 - DNA, 1194 bp, Homo sapiens
taaaaatttaaacattcagttcttcagtcagactacctgcatttcaaagttctgtgctggaaagctcatgtgattgcagttactgtatcagacacaaagacatattgatagaacgttttctgtcatcacagagttctgttggacagcactgttctataatttgtttttatagtggttaaattgagtatagctgcatgtccagctgtacattctccttcttctctgttagacagcctttctagggaaaaacaaatagaattctgttatatgtcatttgctcatttctactacagacaaaatgctaacgagttgttttctcccaaaaccttttagctggtagttcctacagctgcttcctcccctctcccttttaggtagcttaggaagtttgccacatttgcaaatgagtttatgtcttttagttcaatttgagatattagtctatttattagtgcaatttctctgttataggagtagctatccagatcacaaggaaggggaggaccccaataaggctgaggagttgccctcagaaaagaacttggaatatgatgatgaaaccatggaattgattctgccttctggtaagtgcatttgtcaaaaataaatagcttaatgccagtgggattgagggagaagcatatctccatcaattactttccatactgagggaaatagaccataagcttaaagtatatgtttgggttctcatgtacggtgtaaaccctgaaggttgctgctcagctctaagttgcctgttttgtttaaatttgatcagtgtttctgttcatttctgggttatgattcagaatgtttgatcaggcatttcttttttttttttttttagatgtagaccttttctattctgttctttatttatttatcttttttggtcctgtctaggtttctcctgttaattgtaaccttactgttattctttgaactgattcctgtttccttttgttgctcagacttccaaatggtagtttggtgtgggtgtatctgactcatggtggaaatttagccaccatgaggtatgaaaagatgaagaataaccatgaatgtgagaagcatacatggttgtttattgtgtaggaagaaagaatcgtgattaactgataagaataggagaagctacagaagacatgtttgagaaatgaaaggggatggaaaggtagagatgataataagatc

SEQ ID NO: 114543 - DNA, 1019 bp, Homo sapiens
tagcaaatgtatgttaagtacttgtgaacaactagttgtcaaaattcctgtgagctagcacaggagataagcagatgtgtataattaccatgccaggcatgcatagaccaagtgataccatgttcagaaaagtctcagtcttttaagtcttccttttgcattttctccctgatttctcattttgcagctggagacttgcagttggtggacatgactgggtggaggtagaggggaggattagaggctgtggcagtagagaagacaatgaatgtctgctggtggtgggaagcatcctctttcagtatttatccctctcaagtttccttttagacagcagtgtttatgaccttttgactgatgttgtaatcagagtggtcaaagcaaataccatggatagttaagcagctgccatcagcagtaggcttggaatgcccagcactcagtctctcatcctgtggttatattcagaatcctacccagtctcatagatttcaatatcttctgtaggcccgtgacccccacatttatatctctagtatagccttcccctcagctgtaaactgaagatatccagctgcctccttgatatttctacttgtgtccaaaaggaatcattaacttaacctgtccaaaatcaactcctgctatgcatcctagtctgctctctgtaagtaaatggcatctctgtccttctagttacttaagccaaatgccatgcagtcttcctttattcttctattttctttcatgcttacattagaatcgatcaccaaattctgctttatctgcttttgcactatctatcttcagaggctgactgcttctcactacttctatggctactacccaggtccagggcaccatcatctttcgcctgacttcctacagtagcctcctgctgcctggtctccatatttacatccttactacccactatgttctattctcaaaactgtaactagggggatccttttaaaacattaagtgaggtcaaactctgctcagattctttcaaagac

SEQ ID NO: 114544 - DNA, 1008 bp, Homo sapiens
ccagctcgctgatgaagaatgtggctcacatgaccaaagaccacagtttctttattcctgatatagaatatctttcagatattaagggactgattaaatacttgggtaagtacaatagttttccttttaatgaggaaataatcacattattgggggactggtctcaagggaacattagttttgcatttttcatcaatctttgatataattgcttggttattttgtgaatgatttttgagttttggtgacaaatagtgagatttaatctggttgcaaaaagcttttttcatattttttccttaaattatttttctaggagagaaagttggtgttggcaagatttgcttgtggtgcaacgagaaagggaagtccttctactccacagaagctgtacaggcacatatgaatgacaaaagccactgtaagctcttcacagatggcgatgctgctttggaatttgcagacttctatgattttaggtaagcatagtttgtaatatgaagtaaagtgaggtcatatttgctttgaagtgattattaggtgtgccagtgctggatatgtttggcactgtacaacatatccttaataacacttataacacctctgtattaggtagttctttctttgtagttgagaaactcagtttaacagagtttaacacatctagtgaagagaagaccttagacccagactgaagtttgacttgtttttgtttttgttctggttaaaacatcaagagttcagttttgccagttaccccttgaacagaggtacagaaattaggtttcacatattgggttcctggagagtccttgcatcaccagctgtctcctgaaggagttgagacagttgctaaaccaggcccaaaccaggcatctgatggtgagattaccccattggtggttcacccctaactagaatctttttttttctctgagaaagatttttgctgtcacccaggctggaggacagtggcacaatcatggcctactgcagcctcagcttccc

SEQ ID NO: 114545 - DNA, 1022 bp, Homo sapiens
ccgaccattcattaatcgggggcttcccagggcccaggagcagcctcgggcgccccactcccccattctcgcgtagccgtccccttgaccgcgtcacaccgagcggcacaaccaccagggaaggtaactgggagggcgcgacctccctcaatcaacagccacctcgggctgactgagcggacccaggtccctttcagccacagcgttccctcggcttcctgggcctcacggcggcggaggcgtggccacagcctgagaggcgggtttcctgtccagttgtgaataacttccgacgtgtgccggaagtttcctcagtgacaatcaggaagtcggcgtgtcgagtggctcttcctggctgctgaggcgggttaaggtctgagggtcttgtggggccacggcgctgatcaccaggtgtttggcttggtcggttcttatttctcgcctggcaatggcgacgtacacctgcataacttgccgggtggcgttccgcgacgcggacatgcagcgggcccactataagacggactggcaccgctacaacctgcggcggaaggtggccagcatggccccagtgaccgccgagggcttccaggagcgagtgcgggcgcagcgggccgtcgcggaggaggagagcaagggctcggccacctactgcaccgtttgcagtaagaagtttgcctctttcaacgcctacgagaaccacctcaagtcccggcgtcacgttgagctggagaagaaggccgtgcaggcagtgaatcggaaagtggagatgatgaatgaaaagaacttggagaaaggactgggcgtggacagtgtggacaaggatgccatgaacgcggccatccagcaggccatcaaggcccagccgtccatgtctcccaagaaggcgcccccagcgcctgcaaaggaggccaggaatgtcgtggccgtgggtactggtggccgtgggacccacgaccgagacccgagtgagaaaccaccccggctccagtggtttgaacagcaggcgaagaagttggcaa

SEQ ID NO: 114546 - DNA, 1265 bp, Homo sapiens
cagcaataaagatataataactctgttttcttagcctgtatagaggagaggaacttgcttggctttaaaatatatttatttgccatttaagtataaatatggaatctgtttcttattgggaagatagaatatatatattttcctttaaactttttaaggtcacttttaaataaccaaatttgatttatggtttttaacaaaggactaaagagctgaaaccaacctagttttgtttttgtgatataaactttaagtgtcgagggaccatgccagcaactaccaaaaatctcttaaatcttcaggtacagctggcattttggcagatgcatagagacatctgagaccctcagaaaggaaggataatccaagaatataggaaatctgtgttctcttcctttcattttatcccttatatttctaaagactaattataagtaatctgacattttaatgtagctactcttatttattttttctttctgaggtattaaaatatctggactgagttttgccaaatgttaaagggagaagagttactgaagactttgaacacttgctttttgtgattgcttatgtcattagtgcctcatgactgtgtttgatgtcctttattgatacaaagtgagcctgtgccttcattatcttgcccattttaatacaaatggaaacctggtgtttgaaaatctctgaactgtgtgggttttggaggaatatacctgaattttattcaataacagtttctggacaggaagaaaaatacagttacatatttataaaatagtcgttatcagtatttttttatgtgtatgtttctttctttaaaacaatattcttggatataaagtagaaaagtttaaaggtcatttccatttcttcactaaggagaaaaaaagttaaataatccaagtaattaaagaatataagtcactagatgaccttacaggaagacgaactcaagggctgataatctgtggtggtatgaacaataaatctagaataaaatgttaataactacaaattaaaaggggtgtgaggatgggaggaagttggtagggtagaaaaatgtgctattaccactattgaggagacatgccagctctctagggacagcagcattataactatgtatgaattttaatattatttgtatatgactgtatgactacaaatttacacaatacaataatgggactttctcacaactattaattcaaacaaacacaaggatgttgaaagttcttgtttgtgtatatgtgtgttttggt

SEQ ID NO: 114547 - DNA, 1053 bp, Homo sapiens
cacaataacagttttgttttccttgaggagtgtttcttgactatctgatattatctgtccttcagggataaagtagaaatattttctgccctcagggacagtgattgaagcaaatcttggcattcacaaatgaaagggtgttgaatctcctgcaggtctcaagtaggtgcttgtcctatgctagtaatggaatttgcattactcatgccctgggcttatgaaagtctagttattaaaatgttaaaattaaaaacgctgaaaaatgacttatacttggcatcttgttcatagaaacttgaaactgtaataaatactatgatgggtagttgagtgtcagcctcccaaatgatctaggtggattggataattgatgatcacctggagaagtagcagtgctcagtttgagataggaggtggaaagggtcaatcgcaaaagtaagtagctgatctctgagtcgttttaaacttgatataaaaaaagggagagccccaaatagaacactaagttgctctgaggaagatggggctctccgggcagaaagcttctccaggcagaaaaagccagcactcactggcgccttctggtccctggccttgggaggagtcgctcacgtggctaattggcctgagaaagtgaacgcttcaagttgagtgcgatgtaatttcttaatcttgtgtttactctttttaatcctctagttgacaaatcttatttgcgttgtcatggttctaattcagtgagtgctcatgcagagaaatatatctgtttttattttgtttctctgcctacatacagtcatatgcaagcacctacacacagaggaacataataagtatccacaggattaaaaaaaattctaacacattacactaagaaatgttaaaatctgtaaccagatactgactgacctttctaagaaaaattcgacaggaattagcatcaacagatgtccactaccagtagagagcatgagacccttagtcactagctgagaatgaaaggtctccaagccaaagcatatttataggtgtgatggttgcagcagctgtttg

SEQ ID NO: 114548 - DNA, 1047 bp, Homo sapiens
gctgtggctccttcatttatatattcctaaggtataatagacattcaataaaagtttgtggaaggaattatttagttttcttttctttctttctttcttttttttttttttttgagatggagtcttgctctgtcgcccaggctggagtgcagtgatcttgactcactgcaaactctgcctcccgggttcaagcagttctctgcctcagcctcctgagtagctgtgattacaggcgcctgccaccacgcccagctaattttttggtatttttagtagagatggggtttcaccatcttggtcaggctggtcttgaactcctgacctcgtgatccacccgcctcgggctcccaaagtgttgggattacaggtgtgagccactgcgcttggtctatggaattatttatttttcttctactcttctaccatagtcatggaaaatgtctcttagatatggaaaatgtttaccacttttgaaatcctattttgtcccagctgggctaatatttaaaattgattaagaacatgtagaacaatgcaatctttttgatgcaagagagtttgttgagtttgttttgcgtgagatatctgaatcaccagttaataagtggtatgcttcctaaaccttttcagtgccccagtgagcttcctgtaatcacgcccctgtgaaagctgatttctgttttataaacacagagtgactaattctttgctgctgtttgtaaaatgtgatgaaggtgtctctggtttaccatgcccaaggagggctgcagctgctatggttggccatggggagggtctgtccttggtgactgacaggacaaaagcctaattgtgtgggcttacccttattcccagcctcttctctctttatggcaaatctgtgtctaaatccattagagcgtcttgctgcttctccacagtgggctaatctgggtcctgcagaaactatgtgggcatgaagtcttgcctgagggcaagtctggtacactactattcatatattttaaaaacaacgtctctttaaagaattttcccactaaaggatgt

SEQ ID NO: 114549 - DNA, 1325 bp, Homo sapiens
tttgttttttccctatctgtgcagaaagaaggggcatcccagacagggagaaagtttagagctaggctagaaataaaagattacaactggcctggtgccgtggctcacacctgtaatcccagcactttggaaggccaaggcaggaggatcccttgggtccaagggtttgagaccagccaggggtgctgaggtggatcacctgagcccgggaggtggagattgcagtgagctgtgatcagcccactgtactccaacctgggtgacagagtaagaccctgtctcaaaaaaaaaaaaaacaaaaaaacaaaaagattgcaatggaacaggaatttgactcttgctaccttcgagatgaaatgccattggacaagtctttgggtgccttgtctgaaagagaaataactgttggaagttgtttatctacttacaaagtacattcttagagcttgattgcagcaggttctagttgagtctcacactgaggctttttcatgtgacttcagttccattttggcacttggtgtcctagattgctctggaaccatcagtgagctaaatctcagttttgtttttaaaaaaatcagtggaagccaaatgctccgcagcttcataagtgtatccaggtgtagggcccaggcatccagggcagactgccatgcgtgccctggtctgatggccccgaggcaccatttgatattcaccaaatggacttggtgaaccaacggcctgagagggggcaggtccaggagagacccccctccttgtggtttatcttatgtcagccatacgtggtattagtaggagcctctggagactccatgcccttttccaaggtcaagagacgaggggagagggtgagcctgaatgccactctgaagcaggcgaggaaggcagaagcccaaacagggagcctcaggggccagagaagaaggaaagaacaatgggggcagcgactaggatagcagacagggtcaagaaataggaggaaacgtgtaccctggccagaggcctggctctgcagtggttccttggccccaccttggagccggggcctgggagggcctctgacgccttcagcaagcagcctgggctgaggggtgtggaaagggggacggtccctgttccagctgtcctgaagggagagggaccctaggcaccaagacggagctcttcatgcatcttcttgtggaagcgctttccagataacttccggataattgtgttcacatgttcattgcttcacttggtagggctttatggcgctcccaatgtcagccagctgcggtgccaggagctagggtgatgtcaggcccctgctgtcacgg

SEQ ID NO: 114550 - DNA, 1030 bp, Homo sapiens
ttttaaaaccacagttcctattgttgaaaatgtgattacttgggttccctttacagggagtacattaattgtatcactgtttatattaatatctaactctgagaagggggagatcaagagtacagaaaggaagcagacaattaattcctgctcatatgagcataattgtgcccagagtgaaagtctgcattttagccccattgctgtgaacaacttttgtatgagtcagttagatgccttcattggaattctaattggggccattgaaatttggatatgaagtagacagaacattattaaacaagaaaaggagttggacaattttcttgccaaagaaagtggaaactggtaactctctaggaacaagggcaccaaaatatatttttgtcattgtattaaagacaagcatcccctttcagccatgggtatatggggcatgtttgtgtgtgtggtaattataatcagttgtagtagagtctgtaaaagctacttttctctagttttctagtttccattttcttacaagttccttcctagtacatcaacattatgttgacatttaattgaacaatgaaacaactttctacataaaatgacacagtaaaccaagtacttgaagatgacatttacagaaatgcttagagtgggatatgggttaactagctggttaagaaaacatttccagaaaagtgtaaatgtcaggttcagttttgagatcatgggttgatttactcgtatgtatccccttcatgacattttaacatttctggaagcaggacttttattttcctcttggcacctaggcactcccaccagctctcttcatagaattttcacagaacaggcatttttaatacatacttgtagaatgaaatgtattgataagctatttgatatgtgcagtacatatttatggggcctactcattttagaggttgaaagaagggagagatttggcagaaatgtgattagggttgctttaatgaaatgcaatattttcacaattaagtagtaattattgataaatatt

SEQ ID NO: 114551 - DNA, 1077 bp, Homo sapiens
gtgaacatcaaaatcacagagcactggattaccgcccaaagtatgtgaaaacacacgagtcttcactgatggaaataaatgattggacaaataagtattaataaattggggggaggggagaggcaggtcttccttgcaagccaccaaatactgtacgttgatactcccccattcaggagttagagtcctgtcccttgtgccacactccctccctctttgagcgtggattggatttagtgacttgctttcaaagaatagaggatggaaagggaaaaataataactacagttgcaaatttggcaagctactttatccaagtgatcaagttaacgacaccagtgatatgccatttggacatcgtgagccccgaaatatgatgtgaggagaggggcgcttcacctcatggactctccccccaacccaaaatctcagcctaatgacgagaaaaacatcagacaactccaaactgacgcatctctacaaaacactcctcagatctgtcaaggtcatgataactgaggaaagtccaggccattctcatagaccacaagagaccaagctgataccaagattgaatgtggcgtggtgcctgggagggtatctgggtatcctggaagggatgaagaaaaaaacaaaacaaaacaaaaacctagcaaagtacaagccaagtccggaatttagttcatagtgtcgtaccgatgggttgtagtttctacaaatgcgccatggtaatgtaaaatattaacagggggaaaactgggtgagagagatcaggagctctctttgtaactcttctgtaaatccactgttgtttctttctttccctcccttcttccctctctctctctctctatctctttctttcttttctttcttcttcttttttcttttggagacagcattgcccaggctggagtgtagtggcgcagtcacagctcactgtaacctcaacttcctgagtgcaggtgatcctcccccatcagcctcctgaatagctgggactacaggcttgtgctaccatgctcagctaactttttaaaatttttgaagagataaggtcccactatgttgcccagg

SEQ ID NO: 114552 - DNA, 1030 bp, Homo sapiens
tcatatttcctttaacgcttttttttttttaaattttaaagaggagggactatgcagaaggaaggaagtcgacattattatttagaggtatttggcaaaaagaggaaaagatacatggtgtagtatcctcactggggtgtcatggtgtagtatcctcactggggtgtattgcattattactcacgtgctgtttattagttctgttgaaggttattcttacttgtgcctgtttttaatacctgaacaactgggagagaggacttataatcctgcagtcatttggcttgtattcttggagagtatttttaaactataacattcagagccatctcatgtcactttaacgcccgagcagtactttcactatttacttctcctggactacagacctcagattttgcatcatattttcacgaacacagaaaatacatgttctagattgtttttgatgttttccttattttggggggccagttattacaatctttattaaaatgagtgatattttcaatcatgactcaggagtcatctgctgtggcacgaaaactgaattccatagcttattaagctgaacatcctcaagtcagaactgctgtttatgttgaataaattgcacatttaaatacttttgttcccctggggctaagtttggatgaaataatcttgcttccaagggattttaatggatgtatcatgcttggaatatataatgaagactcagtaattgagagaatgtctaaatggaacagaaactttatttttaaattgagaaataggcctgaaactgatctagggggtcaaagtaggactatcccaagtttttattaaacaggaatagaaaagcccacctttctccacagttttacttatattaatatatgagcggttcaataaatacataggtgattgagatggaccatttctacttccctagtggaaatagggggggaagtgatcccagtttgaggagtttgtttgtgctctctgtgtagagcacttagaaagttagctacacattgcttataaattc

SEQ ID NO: 114553 - DNA, 1001 bp, Homo sapiens
attgggattatttttaaaagactggctcgaccgagggcatttctttgttattattttacctctgtattcacttctcatctgattgaaatataagcttaggattgtgttgtagactctattctagtccagattcacagtgctgattatgaactggtgtcatgtggttgaagtgaggcattttcttttcttgttgctgtttcatgtcaaatgttacaaacacagacgctgtggcactcctttggagagcttgctgaggagctgccaccttcccttattatctattcttttattcttgttccctgcattgtttttcatgggctttgtctttcttgtttggagagtaaatatggcgctggaagtcacaggtggaattatcaggagagacagatgttttccgttggacttggttagggcctgtgctaagggagggcttcgtcccccttgtttaattagagaaagttgttagggttgtttgcacccctgtgtactgctcatgtgtgcacacaaagggagcagagatctgcggacctgctgggtaaagggagcactttctagcaaagccatgtgaattggtaaatggcgtgggagggggtggtaacacttctcatcaccttttcttttgttcctcctgttatagctcctttttgacaaacagggaaaagcattaaaaacaaacatccccagcgactcacttttaacaaatcagggtggtactgctgttcaagtcctcattctggctctcgggctctcagagtcagcatggggtggttacctgtggcatttgcttattttataggcttgttatgttttagtgattgattctttccatattaagaagatatggaacgtttcactgtgttagtttgtattcttctcctattgagttacaaaagggtttcactaatgatgaagtatcaagttcttaaccctaaagaggtcatctcagaaccagatttgtggctgtcttcctgcatctcaactatggcttgaattcttttggg

SEQ ID NO: 114554 - DNA, 1027 bp, Homo sapiens
actcctggactccccaagggtactcagagtccagcagagaaaggcaatgtgctttttgtggcaccaaggttaggggttaagatttatgatgcttttggatttaatgatgaaggtacagtgacaaatcagtgaataaggataatgttacaattcagaactaatgggtgtggagcacttatcccgtgtcagatattttaggccgttcacctgtagtgtctcttactccatatacataacaactgttggaggaggtaggtgtcgttactaatattcacaatgacactgaggcacagagaagtcaggtgacttgccaggggcacacagccacacttgtgtggttgcaactgttttacacctgggtggcctaattgtagtttatcctctacttgctgggttattttgcccattatatgcatttgccagcctacttcttcaggattctttccacgtcctttggtgtagatgcatttttctgttgtctgacaaatgtcagtagtctaactattgactgatgacttctagtacataggtaagcagagaatcagccagactcctgtcctattgtttctcatgctttagatcttcagggcaagcttaaagcatttctttttgccttttgtacttccaaggcccaacatctgcttgcgtatagaagctgcataagatttttgtggtccattctctagttggaccattctttaggtgtgacacagggcttctttgtcacgtgtctccaggcactcacacagaaaacagcgtgagtggcattccctggagttgcagtgaggttgcctggctggatgttgtgggctttgctgagttttgccctggagggtgcgtgtcaggccaggtaattggcctggctttgtgggaactgccggatcctagaataggctgtgcttaactgaatgaaaagagaattcatactttggtctcagcaggacaactttcaaaacaaatattctagtctgtgattgaccaggatgcattgagttgagagcgtcactactgcttacattttaggttt

SEQ ID NO: 114555 - DNA, 1045 bp, Homo sapiens
atatatatcatttagtgctttgtcaaagtatggctatatgtatagttatatacagttacagttatatacagttacagacttcagtaaagtcaaactttactaaagttatgataaagggtgttcacatgtagcatcgtatttaaaccttgcaggaacccagtgaggcatgtgttgttcccattttacacaggaggaaacaggaggcccagaaaaaagttaactgaacaccaaagatgacgttgaccggtactgttcaatagaatgtttgtagtgatggacatagtctgcctttgcactgcctgttatggtagcttcctgtggctgttgagcatgtgaagtgtggctagtgggactcggaatgccatttgacttttatttaagtgtaagtttaaatagccacacaaggctagtagctgctgtgttagcatagtcttagataagtgctgaagctgggtaatgaagcagcgtccattttccctaaattcaatgatttttctaccccatctctctaaagaaaaataggagactattagggcttacttttttcaatattacagaatcatacttaatgatttcagcacagagtgaaaaaattatattgggagagggttgcttctgcatgaatgggaaggatctttttagactgtcagccagcctggtccaagttcctcgccttatctttgttccgtctgagtagtcggtacctgtgaatgagtgtctgctccctacccagtgtggtcaagggggtatacctgggcccagggggtataccagaagcccagtgcctgaactcagagagcctacccactggtttaggagacacagctgatttggtgaatcgattgagagagtatgtcacagttccaaattgcatgtcatggtctccagggctttacagttgaggacaaagtggggatgagggaggtttggaatagctgatgaaagtcttgtgagatttattgtataagcccagaagaaaaggtatagttttaaaagtgaggttaatggtgagcgatttccatgtaggacaaactcaggaagaaat

SEQ ID NO: 114556 - DNA, 1033 bp, Homo sapiens
tggggaacgtggtattgtggatggaagagattgtggggttcttaataaggagatcatgcttaaacctcagtggataagaatgatttgggagatctagtagatgatcaagagcattctaaccctgaggaatacaatgaacacaatagcatcttgaaggtgtacctaatatttcaaccactacacagtaaacagatgcaatggcagcatgggctggtagaaaatgtagtgggagataaggttggctaggtggtttgtgggggcagtagttgcctcagatgctatgttgtgtgtttggatttgttttttctgtaggcaacagggaccaaaaaaaaaaatactttgtagaagtatccacaaataatttaatggataagtacactgtggttcatttatttattataaattgtgataccatataacaatgaaaatacagctttagcaacaacagggatgaattttacaaatgtaattttggtcaaaagatgcacaaagtaatatatgctgaatgattcaattaagttttaaatggtgcaggaactgaacaggattggttagggatacacacataggggataaaactacaaagaaaataaaagacattctcgaatccgagacgtgcaggcacacacacacacatatgcattcttatctatggtatattttatgaaaaatactgaaatatgaaaaaatgctaaaaaatgatattcatgagaactcagaggagtttggtaaaatagaggccacatagagtgcctgtctcaaaaagcagggtttccacaactgaagtagattgggtaacagtcccatagttttgtggtgatgaggggcctcagataatactatctcactcatttcaccaatgaagaacatgtttttagaattttttccttcatttaaaattttatttatttaaaaattaactaacatagccttacagttcagatgtttaaatgtacagaagggtaaacattttgatgtcttcccacgcctgtccctgtctacgcagtttcctctcagaagcaacccatgttgt

SEQ ID NO: 114557 - DNA, 1061 bp, Homo sapiens
cccgagtagctgggactacaggcgcccgccaccacgcctggccagttttttgtattttttttagtagagacggggtttcaccgtgttagccaggatggtctcgatctcctgacctcgtgatccgtccgcctcggcctcccaaagtgctgggattacaagcgtgagctactgcgcccggccttaacattttatttcttaattttaaattttatttctttaaaaaactaatacagtctcacagtgcaaaagtttaaaggtacaaaagggtaagcattttgaaaatctctttctcatcccagtccctggccgcccagtttcctcacggaggccagcaatgttgctagtttcctgtgtctctttccagatagtgcacatttcagcaaatacaccatattctatgcaaattgtggaataacatatgagctcttccttttcctagtatttcttggtgattgcttccttgttctttttcagctgcttcagaattctattgtaaggatgtctcaaattacttaacctgtctcctactgaggcagtaatgtttccaagcttttgctatttcagcattatagctaatgaccctgtacatgcatcattttgcatatatgcaagtattttagagaacttcccagaagtggaattgctgggtcagagggcatgtgcacttgtaattttgatggctgtcaccatattgcatgcagctccttagggttctaacaatttatactcccaccagcaatgtgtatgactgcctgctttgccacactcttgcgaagaatattttatgaaactttttgatcctgcaaatctgataggtgaaaaagactatcccaaaatgattttattttgcagttctctgtgattgagcattttatcttatgtttaagaactaccacatttaccatttatcagcattgtttgtttataaataacctttgtctattttttcaagtaggccagtgttcttttccttattgatttataggagctgtttttatattaaagactttagcctaatttctgtaacatgagttgcaaacttttttctatgatgttttctt

SEQ ID NO: 114558 - DNA, 2328 bp, Homo sapiens
ggcattgaggagggcgttccagctgcttggaggatgtggcattgtaggttccctaggctgatggggagtcgtgcagtgagagggaagagggtggagagcccttgactcaagggtcccaggtgccaggctgcaggatttggtgagatccagtagacaacaaggaaccactgtgggatctttgattgtgcatggcataacagtgaatttacagacagtgatctctggggtgggactggaagggaagagagcaaacagggatatggaagccggttatgatgcctgcacagggatccaggccagctgtgagaaggggtggcaatgacggggacatcatgggagggagctaatggagatcccagctggaggaggtggctggtgtggagcagaagctggcctggcgtctggggagctggccgctctcccagcccctggggcctcagttatcttgtttcttcagctgcttcctaaggagttgactagaattagatgatccagtctttaaaggctgtaattgtggactctgtcatttcacatttattttaagcggggatagtaatcccagcactgttgacaccgagtaacttcagcgtcctcggttagttctggattttaatgtgcaaagtctgacagtttccatcaagccaagttggcacgtttgtgccaccaggtggtgcacattgtatttggaaaagctgagattccacctttccctgatgaggaaggtgaaagtggttaaacttctggcttcctgcaaaatgggatccgtcgattagcatggaaggctacgggagggtgcccagggaatgtctggattattaggcagggccctttgcctgggggagacttgtgacgctgtgtcggttctgcttccccctgggcaggtggtggatgtggccaagctcatgaaagcctacatcagcatgatcgtgaagaagcgctacagcacgacacgctccgccagcagccagggcagctccaggtgaaggcgggacagagcccacctgtctttgctacctgaacgcaccaccctctggcctaggctggctccagtgtgccatgcccagccaaaacaaacacagagctgcccaggctttctggaagcttctggtctgagggaggtgtctccgaggatccttttgcctgccgccttcattgatcctgtattaagctgtcaactttaacagtctgcacagtttccaaagctttactactcttagaggacacatgccttaaaaaaggaggggaggaaccacgctgccaccaaagcagccggaagtgccttaacttgtggaaccaacactaatcgaccgtaactgtgctactgaagggaactgcctttcccccttctgggggagacttaacagagcgtggaaggggggcattctctgtcaatgatgcactaacctcccaacctgatttccccgaatctgagggaaggtgagggagtgggaagggggatggagagctcgaggggacagtgtgtttgagctggagtgctgcgggcagcctttctcatggaatgacatgaatcaacttttttctttgtttcatcttttaagtgtacgtgcttgcctgttcgtgcatgtgttcataaactcaacactttaatcatggtttcatgagcattaaaaagcaaagggaaaaaggatgtgtaatggtgtacacagtctgtatattttaataatgcagagctatagtctcaattgttactttataaggtggttttattaacaaacccaaatcctggattttcctgtctttgctgtattttgaaaaacacgtgttgactccattgttttacatgtagcaaagtctgccatctgtgtctgctgtattataaacagataagcagcctacaagataactgtatttataaaccactcttcaacagctggctccagtgctggttttagaacaagaatgaagtcattttggagtctttcatgtctaaaagatttaagttaaaaacaaagtgttacttggaaggttagcttctatcattctggatagattacagatataataaccatgttgactatgggggagagacgctgcattccagaaacgtcttaacacttgagtgaatcttcaaaggaccctgacattaaatgctgaggctttaatacacacatattttatcccaagtttataatggtggtctgaacaaggcacctgtaaataaatcagcatttatgaccagaagaaaaataatctggtcttggactttttatttttatatggaaaagttttaaggacttgggccaactaagtctacccacacgaaaaaagaaatttgccttgtccctttgtgtacaaccatgcaaaact

SEQ ID NO: 114559 - DNA, 2510 bp, Homo sapiens
cttctacccttccttagggaagctatagatctaattttttaaacactgataaaaatctacatttaaaaaaatgttatagctgtatatacaaattagaaactttggatatacttgcattttactttgttttttctttacagccatctgtttgaaaggaagaatgtctatctcgtaatggaatttagccattggcatcaacccagtactgatttttgttttgttttaagtagaccgcttattgaaaagaaatcttactaattgtctagatgagagtttggcaaactggtctgtgggtcagatcttgcctgcctccttttttctaaacaaagttttattggaacacagccaagctcattcctttagatatattccctggctgtttttgtacagagttgagtagttgtgacagagaccatgtgatccacaaagtctaaaaatctttactatgcagcccttaacagataagtgtgccagctcatcgtctagattagcttccattttttatgatcacagtaattcagcgtatatctgatgactttatattgaggctgtataaaattctaaatattataaattctagaatccgtgggtggcttttcattaggtgatgtttttgattggtttggttggttcaattatgcctgtttttaagtataaaaaaatcaggtgctttgtacaaagccataattccatttctccctgacaaggaatagataatagcagttaaactcttggcttcctgcaaaacgtgagctgtgaattagcatagaaagctactggcttggccgggcgcggtggctcatgcctgtaatcccagcgctttgggaggccaaggcgggcggatcatgaggtcaggagatcgagaccatcctggctaacacggtgaaaccccatctctgcaaaaaattagctgggcgtggtggcatgcacctgtaatcccagctactcgagaggctgagacaggagaatcgcttgaactcaggaggtggaggttgcagtgagccaggatcacgccactgcactccagcctgggcgacagagtgagactccgtcaaaaaaaaaaagaaaaaagaaagctactggcttttgcatggaggatgcagagaatgtctggttattagggatataaactagagactcttttcagcgtctccaatttatagccctcctgcttgtccaggtttggatcagccctgtgttgttagccccttcatatggggtcttattttcttccaccaatctgtacaggaaagtctacagttaaactggtaaagtccctgttcccactctgcatatggaaggccattgctgctccttgtgaagaggagccagaactgctcagcatgcgtgatttggagaattttcctctgtgatcctagattttgtatttgaagactaaccatccgcaaagaggattggaggcagaactggagatattaatacaagagtagacttggcttgggttgcagggaagcttccttaagtcccccggccaagcatgtacgtttccaggccacttccacgtagctaatccaaacagctagtagaataatgctgagaagtggagagtcaaagcaagatgttagactctgccagttagtgaggttttcccaaaagcgtgagattaactagttagaaatcaagatagccagagaggtgccatttttcatatttcaggcccctccatgcatgcatgcacatcgaatatatttaatcttctgcacagaggacttcactcaaagcctgtcttatggtttagatgctttctgttgccaaccacttcatgacttaactcttctgttgactcttgcccaccagtgcaaggaaggtggcttccctcaggaactctggttgggtgtcagcgcggacgccgtctccgtctacaagcgtggagagggaagaccactggaagtcttccagtatgaacacatcctctcttttggggcacccctggcgaatacgtataagatcgtggtcgatgagagggagctgctctttgaaaccagtgaggtaagaggcaaagcaagttcatctttttattcatggtcttgacaaaacagaaaaacaggaccccatttcctcatgcctttgaccaggtcattttctttgaatatttttcttcaaaacacgaaaatacagtgtggtggtccctttccagctgccggttccctgcaggccaaaatctgagatcaccatattttttttgtatacttttgcaacagaggaatctggttccattttgccaaggagtcttacccttggaggaaaggcagagaaagggaagtgacatagatgtccctgaaaaagtatattatttgcaacaaaaccttatgaaaattagttagcaattatagcggtgtcacagctgtgagactcggctctggtggcctcttgagaccaggagggagccgggagcatgaccatcctgggtgcagctcattctggattgtgaaaccacacacactaaaaggcctctaaatatatgtgctaccagcctccaagtttaaaaa

SEQ ID NO: 114560 - DNA, 1069 bp, Homo sapiens
tcaggtgatccgcccacctgggcctcccaaagtgctgggattacaggcgtgagccactgcacctggcctgtagacctacgctatttgatctgtgacttcatatcctcgaagtagcgcgaaggtattcctgcttagtataaacacagccctcatacaagagtattcacatcaatttttataaatgttatcataatgtatctgaggcttggtaaaggtaataaagaaacaggcttttgtttcttttcttcccgtggactcagcataatgcttagctggtactaattcgaatgcggctctctgaaaacacttgttagctggttaaactaggggctgcctgtttgttttcttaaagcaaaatcaggatgaaagtacgttttttcactctgtttattcctctatccccatctctatccactgttttctgggcccggacagaatgtctgtgtccttagaatacaccatgtaaagtcaggtccctgcgggtcactgaaggcccttctcgttcatattctgagcctctcttgactcctctctgtaggctggctgccacatccgaggttggggacctgccatggaaattctacttcaaactttactgcttcctggacacagacaacgtgccaaaagacagtgtggagtttgcatttatgtttgaacaggtaaaaggaatagttagaaacagatttctttgccggcaagcaagggtgaaacctgttaatacttagccttgtaagttaactggtacttagaaatgaggcacacctgtggatttcccagcaaagacaagaccagctgctctttcattcgtttgtagaatgaaacctgctacacattttatttgaacctccgttccagggactgttctagttgacaggagagagagcacaaggaataaaatatgtgacgtgtgttagatggtatctgtgctagggagaaaattaaatttaaagcagtgagccaggggtgagggtacagttttagccagggcagtcagggaaggtgagtttgagagaaaccctcatgaagtgagggagcaagcgacgtgggcatcccatggcatggcagtgcg

SEQ ID NO: 114561 - DNA, 1170 bp, Homo sapiens
gcctcctgagtagctgagattacaggcgcccgccacaacgcctggctaattttttgtacttttagtagagatggggtttcaccgtgttggccaggctggtctcgaacttctgacctcaggtgatccacccgcctcggcctcccaaagtgctgggattacaggcgttagccacggcgcccggccaagaattttcatatgataggatgaggcatgactctttcaagtattaacaacgctgcagaggtgagttggcagcacagttgctcccagtgagacattggctctttaggggttttttgtatttaaattgaactgcacaaaatgaagcgggcccttgccaagaagtcactggtgcttgctccattcaccagtgggggaccattcactgctttggtctacagaaccttggcacagcctagttcctcccagcagccagcccccatcagtctaaaaattaacagttagtgtttgcctcctaggatacgggaacagtttccaggaagcgagatggaaaaatacgctctcttcacttacgaatctcttaagaaaaccaaatgccgagagtttgtgccttcccgagatgaaatagaagctctgatccacaggcaggaaatgacatccacggtctattgccatggcggcggctcctgcaagatcaccatcaactcccacaccaccgctggggaggtgaggagaggcagctgctgcttgttctgttagatgcctttgctgcagatacacctgcgtcaggaacattgtgcagcattagagtggctgtcctgcacagttgcagtttgcttagtacagctctcaatactaaggaaatgcatgtaacccagaagcaaccacacgaatatagagataaaaatatatatattgagtggaaacacagagataaagtacctgagacataatcttgctaatctgagaagcagctgagtgtctagcagagctgcagacctggctcaggtccagccactttgatgagggtttattgcagtgcttctgcaacaaagtgtttgtttgcacgtgactagctagatgaatatcagatgaacacattttctttttaaaatttgaacttactattataaaaccagttggccaaaagggtggtaatccaataaccaccaccccgacccccaccccccaaggcttcttatggaaaaa

SEQ ID NO: 114562 - DNA, 1872 bp, Homo sapiens
cctccgcctcccgggttcaagcaattatcctgcctcagcctcatgagtagctgagattacagctactcagccaccacacccggctaattttcatatttttagtggagacagggtttcaccatgttggtcaggctggtctcgaactgctgacctcacgatccacctgcgtcagcctcccaaaatgcggggattacaggtgtgagccaccgtgctctgctgagatgaaattttttaaatgtatgtaatctccaggggagaaaatttaaaatcacatggggaagtacacgcacgagaaaataagaaatgagctgtaagaatgtatttttgtgatttgtcttcaaacacagattatgggtatcttcgtccatgaaaccacctaacactggatttccaccatctttgccccactaggtttatggatatttgagagtcttgaaaaatatttatatgtaggaaaatacaggtttcttacaataagcttgcttgctttatttttaggagaactgcctgaactcggatgtggtggaacagatttacaagcggaacccgatccttcgatacacccatcaccccttgcactccccgctcctgccccttccgtatggggacataaatctcaactgtaagtccagagctccaccccgactcctcagagaccatgattccacttgccctgctaactctttagcttaacacagaagcatttgtttttatctcaaagactctcttattcgtcgtgaattggaaggaaaagatgaaatatacttagattcattattaaagcaagacttctagagtgtggttgtagtaatgctaagattgattgctgtagtaaaagaagagatttaaaggagtcagaaaatgccagctctccccatgaactgagagtagccttttgttttgtttttgttttttgagacagagtcttactctgtcactcaggctggggtgcagtggtgcaatcttggttcactgcaacatctgcctcccaggttaaggtcgttctcatgcctcagcctcctaagtagccgggattacaagcacccgccaccacatccagctaatttttgaatttttaatagagacagggtttcgccatattgcccaggctggtcttgaactcctggcctgaagtgacccacctgcctcggcctcccaaagtgctgagattacaggtgtgagccattgcacctggccgagtagccagacaaccagatcctaagtaattttgcattccaaaaaaggattttgttcagcaacagattaccttttaagtaagcattttatgtggtaagaagttcaattagataacaaaacagtgtcaacttacccacctctgtgcttttagatctgtgttcaactgattgagatgtatagggagtgtggtgggcattgcatccgtcctcctcatttattcctttgtcttgactactgctccgattatgctcatgccctattctgaacccctcagatgagttccgtgtttgttttgcttgtcctagtgctcaaagacaaaggctataccacccttcaggatgaggccatcaagatattcaattccctgcagcaactggagtccatgtctgacccaattccaataatccagggcatcctacagacagggcatgacctgcgacctctgcgggacgagctgtactgccagcttatcaaacagaccaacaaagtgccccaccccggcagtgtgggcaacctgtacagctggcagatcctgacatgcctgagctgcaccttcctgccgagtcgagggattctcaagtatctcaagttccatctgaaaaggtaaagcatgggggcacgggagatgagctgggcagagctgcttacacaggtggggcactgggtcctcgttca

SEQ ID NO: 114563 - DNA, 1096 bp, Homo sapiens
gtgacggttcggacagcttgcctctgaactcacacactgccaggccaagtgctgtcttctgaagggagaggctaaagaaaggaaaggaagaaataggaagtaagaaggaaagtcagaaatcagagagagttttcactcctgttccagagcccaaaaagagacattaacttacccttttcccttccagagccagttatcatttatctttatatatttaatgatgggtttattgttctaatactcatctccccatctcagctgtaaatgtcacagtgcaagagacactttttttcttcatcactagatacctagtgcagggcaggacaggacacatgtaggaattaagccagtgtctattgaattgaataattaaagggactgaggtcagagaggacacaggcattgcctcagtccccgaggttggcgttgacgtgcgtgtgctgggcacccctgccattgcaggctactggaacgtcaccgtgtacgggcgcaagcactgttaccggctctacaccaagctgctcaacgaggccacccggtggtccagtgccattcaaaacgtgactgacaccaaggccccgatcgacacccccacccagcagctgattcaagatatcaaggtaagccaagacaagcccatcaaggtgggtgattacagctcagagattctacccttagagcaccaagacctcagcattagtgaagctcagttttttttctgtaatcaaaactagtgcttggttggccggcacggtggctcacgcctgtaattccagcactttggaaggctgaggcaggtggatcacttgaggtcaggagttcaagaccaacctggccaacatgatgaaaccgtatctctactaaaaatacaaaaattagccgggtgtagtgacgcattcctgtaatcccagctacacaggaggctgaggcagaagacttgcttgaacctccgaggcagaggttgcagtgagcagagatcattccactgcaccccagcctaggtgacagagtgagacttcgtctcaaaaaaaaaaaaaaaaaacacccaaaaaactagcgcttggttaaatttgtgtttgagtaccctgctttcggg

SEQ ID NO: 114564 - DNA, 1002 bp, Homo sapiens
gggacaccagagtggagggccaggaattcatcgtgagaggtgactgcctgccctgcttcctcggtctgcttaacagactcccctttccatttgcatatagacatctgcagcattttcatttcgagctgcttttcccagtcattttaactgttggagattttgtaagtgatttttaatttgtgatattataaagtgtttctagagggtcatgttttttgttgctagttgtgattttgggcttttctttcatgtagtcgttccatttacatcgggttggggtgttcgtggtctttttctggcaaacagctagaaaccccacccatgtgttagcattatgcagatgattgtgtggtctttggggtttctcctcacagattttaatttacactttaatctttttttccaggatggttgcacaaagaggtgaagaacagtccaaagatgtcttcactgaaactgaagaaacggtggtttgtactcacccacaattccctggattactacaagagttcagagaagaacgcgctcaaactggggaccctggtcctcaacagcctctgctctgtcgtccccccagatgagaagatattcaaagagacaggtaaccaggctggctgcccgaaccctgagcatcaaatcttaaagtctgggcttgctccgggcaaaggaataagattccttcctagtgtgtactttatttccccccaaagaagttgtcctcttggtttatcttctaagcctgtctggggttagctatgtgaccacttagtgtttaagccgtactagaggtcgattcatggagtggtaggaagattctcgcaaggacaagaaaatgtcaacagatgcagggcatcgtacgggaagcttggttttcatatactgttttcatccttttaattttcattcttctcatttttgagacagggtctcacactgttgcccaggccggagtgcaatggtgcaatcttggttcactacagccttccagggctcaagcaatcc

SEQ ID NO: 114565 - DNA, 1067 bp, Homo sapiens
gtaatcccaatactttgggaggccaaggcggatggatcacttgaggccgccaggaatttgagaccagcctggccaacatggcgagaccccatctctactaaaacacaaaattatccaggtgtggtggcccacacctgtagtcctagctacttaggaggctgaggcacgagaatcacttgaacctggaaggcagaggttgcgttgagctgagatcacaccattgcgcagcctgggcaacagagtgaaactctgtttcaaaaacaaacaaattaaattaaaatagaggtacttgtagaaaacttagttaaaatatttttaaaaacaaagaaataaattattgaaaggttaagaggtaatgattaacttgtaattttaaaaaataaatggcctatagattctgctccgtgtagaggctatttgtactcacacaacagaggagtcgtctcatagataactattattttgaagttaaaaagaaaagagccttttctgtctgattgggagttgtgggctagaggtattactgtagtgtgcaccctactttagtgcttctctcattctgtttactttttgttcttttccagggcaccttggatgtggggctgattgattctgtgtgtgcctctgacagccctgataggtaagctcagatgtggctcttaacaaaaacagctcatcacctgtgtgtgtccacaggtgtctgtgctgctgggtcacgaccctcttcacagggctgtgaaatcacgcaaggctgtgtgttcccaccttgtcaaccccagcaatccagtcttccttcttggtacccaattttacatcacctggaagtctccttctctgggtatctttggagtcctggggaaaaccgtgggaacctggacaattttaaaaagcatgaggaatatttttaatgtgtatacagggacaaacttgggatttatacaggaagaaaatgcctgtttaggaaaatgatattccagcaaaggggaagggagtcattctcctttctgaacttaacgataaacttgaaaaggattttgatgataatgtatatgtagagtattaataaa

SEQ ID NO: 114566 - DNA, 1067 bp, Homo sapiens
ctaatggctgtttaagtaactgatagtgctatggcactggggggttttaaagatcttaatattgaagaattcaacggaagaggtactaacttacacagaacttactattagcttggtgcaaaagtaatcacaattatatttcaggctaatattctaaatgtttcatacctaagtatttcaggaagtattctaaatgcttcataaatattaactcttttgattctcttggatcctgcaaggtagacattaattattaccatcatccatactttgcagaataagagactagggtacagagaacggttagtatcatttgtaatgcagtgcaacctcaattctgttgaatggagacattgaacttcttaaaaacatttgctcctaaggagctttaacttttgactgagattagaagagggtggaggccttcattggctggggcaagttgtctgtagcttcctggacttcaggtttccatgctggagtgctgaggagacatagcacaaaattaaggagacttagcatttgctcttcagtgtgatggatcacagggtcaccttgtggatctgacaccgtggaacgtctgtcctgtctattcctgcagcttgtgagtttgtgagtctgcagggttatgctggaggtgtctgagcaatgccagagaacatcttttttttttttttctttttttttgagacagagtttctctcttgttgcccaggctggagtgcactggtgcaatcttggctcaccgcagcctccaccttccaggttcaagcaattctcctgcctcagcctcccaagtggctgggattacaggcatgcaccaccacgcctggcaaatgttgtattttttatagagatggggtttctccatgttggtcaggctggtctcgaactcccgatctcagatgatctgcccatctcagcctcccaaagtgctgggattacaggcgtgagcctcttcctggctgagaacgtcttttaatttacgagggtaacatccaatagccgaattcttcaattctcagccccaagatcattaggaccttctagtatgttctcaggacccc

SEQ ID NO: 114567 - DNA, 1920 bp, Homo sapiens
gctcctggcccaaaaaacgggtaaagaaactggtaaactttgacaccatgttaaaataattttccctctctggtgcattttgggataagcctgatccatacatagggacatggttctcacccttggcttttgactcattcctgggttagagtgtcagttcattacttgcttttctattggctcctttcaaagctttctcagctaagtgagcaggaactcctttggatagaaggattcttgtataatccagcctggctggtgtgacatctgtgtggtgcccccagacatgagctagcagtgccactcctcactgaggggtctctgcggtgctgcggctggggcagagtctaagctcggctagaccttaacacctgctatgcatgttgttgtcatccaacttgactgacttttctttcacccctctctacccaatctcacggggaacaggtggcctgatgaactcttggaaacgccgctggtgcgtcctcaaggatgaaaccttcttgtggttccgctccaagcaggaggccctcaagcaaggctggctccacaaaaaaggggggggctcctccacgctgtccaggagaaattggaagaagcgctggtttgtcctccgccagtccaagctgatgtactttgaaaacgacagcgaggagaagctcaagggcaccgtagaagtgcgaacggcaaagtaggttgctaagcctggctgtggcccgatgggttgctcatggtttatgctggtggtcatagagccatgctgtgcaagttccttgcagcggcagtagcctgtagcaggtgtcctgatagttcagttcagtaggttaaattactaggaaactgggaagcaagacttaatccatgagtactttgctttttgtgattacactcagacatgtggctgtcatttggaagatggccagccaattggatctggaagttgcctggtggaaacggaattgaatgtgtggaggaagaatggtgtgaatttggaacaagtggctgagtctttttatgggttaatgtatcactttcaattccttactccagctgttgccagcagataaattagctaaattaaaagcagacagactggaggagttttccgaaataaatcacttctcttctgttataccagtgttggttatactagccatccccattcccagcagtgagaggaacagggctggtcttcaaatccaacatgcccccttttctgccacacccttatagaaccaaagctttggactattgagggcctattatttttgttaaaagactaagtaatgtttccagaaaattgttgggagttacaagcagctggttttctggggtaactagatactaagcctgaaaacatgtttggggataacctgtagccgtactccactcaaaactgagtgacctcaaatatttagaaaagtagtaaaataatctttgagggatcaaattaatgcctgaagtcaggagccttaaaagtaaaatgtttctaatcagccagcatccgcaacttcagaaaagtattcattgtaaagtggaaagttaaatgaggagaagaaagtcttttatgtatttgattgtaagggaaaactcatgtctctgcagacggcagaatattggacatttccaggctgtccctttggagttcatgaggtgcgggagtgcgcttgtgagaatcctgggtctgaatcctgcaagggttcacagcaaggcatggctctgttgcctctgccatcttctctcagcctcacataccgtgatgttcctcatctgtctatagatcaattgattgactgacagggtctcactcccattgcccaggctggagtgcagtgacacgatctcggctcactgcagcctcaacttcctgggctcaggtgatcctcccacctcagcctcccgagttgttgggactatagg

SEQ ID NO: 114568 - DNA, 1215 bp, Homo sapiens
tgatgagcatttgcattgtatgctttgattgttactaacatttgagtatactttgctgaaccttaacacttaggggccttgaggcacactccttttggaaaattatttactatttatttatctatttatttaggtatttatttaagacagggtcttgctctgttacccaagctagagggcagtggtgtggtcatggctcactgcagccttgaactcaggttcaagccatcttcctgccgcagccttcataggagctaggactgcaggcgcacaccatcatgccaggctaattttttatagagatggaatctcactatgttgcccaggctggtctccaactcttggcctcaagcagtcctcccaccttggcctcccaaagtgcaggaattgcaggcatgagccaccatgcctagccagaaaattatttaattatttaattgggacctcatatttatgctttgttcctgttcttgactctgactcgtaactcagtgacagggataataagaaaccataatcatcaccaattttgggcaggagttttacgtggatggttaaaaagaagggaccgtcctgtttctcgcatggacctagactggagaggggagagagtcgagaaggtggagatgggcagggatatgagaaccttcctccccaggtctcctcttcctgctttctcccatatttgatttttaaatttgtcttcttcctttttcttcactttcctttttattgccgtctttcttcatttacatttacattttcttttttttgtcttcaccaccatgaaaaccttttttttttttgagacaggatcttgctctgttgcccaggctggagtgcaatggcacagtcgtggctcactgcagcctccacccccggggttcaagtgattctcctgccttagcctcctgagtagctgggattacaggcacacgccaatgcccagctaatttttgtatttttagtagagacagggtttcaccatgtcggccaggctggtctcgaactcctaaccttgtgatctgccctccttggcctcccaaagtgctgggattacaggagtgagccaccgcgcccagccatgaaaacccttttattccattttcccttctttctttctgtgcttctcttttctgttagcttctttacgtttttttccacgtcttttcttttgttatcttcaatattttttttctgttttcttcacttgtg

SEQ ID NO: 114569 - DNA, 1034 bp, Homo sapiens
gggggtgaactcttgcatggtttgattaaaattatagccttaaaaagcattgttagttttagggcagatagcctttggattcaagtatatcttgtctttcatgtatcaattcaactgaccatttgaccttaaaagttggtatttttaattccgaattatttgtgtgctaccgtaaatcaggcgtattgcttgtcagttgttttttttctttttccttttccctttttttttttttttttttttgagactgaggcttgctctgttgcccaggctggagtgcagtggcacgatctctgctcagtgcagtcactgcctcctgggttcgagtgattctgctgcctcagcctcttgagtagctgtatttttgtattttttcaatgatgatacatgctgggtatcttcgtggcttgctttgtggccttttccctcaccgttggcttctctctctcggtccagtttgaagatagtgaagaggactttgattccaggtttgatacagatgatgagctttcataccggcgtgactctgtgtacagctgtgtcactctgccgtatttccacagctttctgtacatgaaaggtatgactgcagccgccatggagtctgggttagggggagagcgaggcgttattttatccgggctgatggatggcggtgggaaataacggaggtgttattgtatctgggctgatggatggggactgggaaagtcgttctacctacccttacctcagtgttgggccacttagatgaatgaagggacaccttgtcatgttggtgtgacatgggtgctgtggtcctaccagcatgaacacagtcgtgactcccctggtttggtgcagagtggcaggacgaagcatttgcaaccactgcctccagtatcagtccttctcccctgtctctccctgtctcgttttcctttcttagctctttcttcatccttctattttctctccctctctctcccactttctctttcactgtctccctctctgtctcagtctcattgctctctctcatatatacagacata

SEQ ID NO: 114570 - DNA, 1117 bp, Homo sapiens
gcagaagctgcaggagcggcgggaccaggagctccgcaggctggaggaggaagcgtgcagggcggcccaggagttcctcgagtccctcaatttcgacgagatcgacgagtgtgtccggaatatcgagcggtccctgtcggtgggaagcgaattttccagcgagctggctgagagcgcatgcgaggagaagcccaacttcaacttcagccagccctacccagaggaggaggtcgatgagggcttcgaagccgacgacgacgccttcaaggactcccccaaccccagcgagcacggccactcagaccagcgaacaagtggcatccggaccagcgatgactcttcagaggaggacccatacatgaacgacacggtggtgcccaccagccccagtgcggacagcacggtgctgctcgccccatcagtgcaggactccgggagcctacacaactcctccagcggcgagtccacctactgcatgccccagaacgctggggacttgccctccccagacggcgactacgactacgaccaggatgactatgaggacggtgccatcacttccggcagcagcgtgaccttctccaactcctacggcagccagtggtcccccgactaccgctgctctgtggggacctacaacagctcgggtgcctaccggttcagctctgagggggcgcagtcctcggtaagtacctgcctggcgtgtcccagtgaaatgggtggccggtcacacccacccctgttgcatcctcaagttgaatgaagatacccgtaggatatctgtgcaaagattgcagagtcgtggtcttagagatcatcttaaaccttttgcttattccataagccaattgcattcataagtagaactttgatgtgcctgtttcagttttagcacaaagcctagagctgagctgtgcccaagacttcagaaaactggctatttatttatttattgttgttgttgttgtttttgaggtggagtcttctctgtcatccaggctggagtgcattggcaggattttgcctcactgcagtccccacctctcgggtccaagctatcctgctgcctcagcttcctgaatagctgggattacagatgcccgccagcacaccggtc

SEQ ID NO: 114571 - DNA, 1051 bp, Homo sapiens
ccaagactacttaaagccaacatgaggggttatgtgtttatttagccaagatagtgataggcttcttactttagttttgtttgttattatttctttgtttttctcctgttttgttttgaccaaaggggcctccttgttctctccagtttccataatgagagtctcattctaaaactgggtcctcttttgtcttgtagccttgatgtgagctcatttgaatagctcaaagcctcattacttcaatgccgattctcttgttttctttcattttcagaaaacaatacagaaaggtcctttattgtgtggtgataatacagaagaattacagagcattccttctgaggaggagatttttgcacctgaaaaaggcagccatagttttccagaagcaactcagaggtcagattgctcggagagtttacagacaattgctggcagagaaaagggagcaagaagaaaagaagaaacaggaagaggaagaaaagaagaaacgggaggaagaagaaaggtacagtacctttcttgctgggatgaaacaaatggatacattttgagtgctgtgctcggtatctgtctgtgcagccagaaatcccagcagatgccccagaacctacaatttgaaacagtaactctaggtggctagaatataaaattccttggcagcattaaagacccagttctgtgaatatttttattcatacagaataaatccatggccagaggaaggggctctgtctttcatgctttctgtctttggcaaagctgttttaaaaacgtagatctctctgaaaagtggttccagggttattgttgttgattttcacttttcctttactatttttagagaaagagagagagagcgaagagaagccgagctccgcgcccagcaggtaatgagtgcagtgacaacttagcctcttgtgtttctacttccttcccacttctaatgcttggactctaggattcaaaactgaattaaagtagaaagataacaggaagaacaatttaagaggatgtgtttatgatccaatttctgacctattacaattgg

SEQ ID NO: 114572 - DNA, 1035 bp, Homo sapiens
taagtttagaaggcttctctggtagtataaatttaacaaagttaagtaagtctgatactttattcagtgttccttttatatttgctctatacagtgctgcttagattatattcccaaataaatctcacagaagcattgtaaccaaatgccttcagaacagtcagccaccccccaacccgcatttttaaatccagagatacggcataagagtcaccaaggctaattttgttttcatatttttatgcttttcttacttttctgaggataatttaatcaagactaaaaacagagaaccacagttctttggatgtttgccctaatttgctggctgcacttgtttggaatactgctaaataaagacaatttgaccacagtgtttgtagaagaaattaaatatgagagaagtcagcccactagggctgatggcagctattccatcaaaagctgtgagggacagttgcaaagcattctttaaatttatttttttgccaattttgaaagcttgcagaataacacggctttatgcctaattctgtgttaatgactgcatttttaagggtcacaaattaagccactttgcattcttgtatttttttaacagttaggtcctatggcactatttttttgtcattgtattcacagttgtgtgggataacaacatgcagcttaattaaagggaacacgggtgggtggactgaaaaaacaaaccactgtccccagagttcctaaatggcccacttttttgctttcctctgaaaacctattgtcctggccccagtgccagtttgtttggcagctgaacaaataaaagaacacatttcagagcattaagtcttggttctgatttcctctgtctttaatttgtgtgttctcaggcttatttagtgatcagagtatggagctctcaataaataagtatttgactagaatttgagcaaagtcaaactctttttcgcctctatgtcttccaaaccggctagcgtggtcatctccccttccccatccccacccccacccccacctcacctgccacag

SEQ ID NO: 114573 - DNA, 1048 bp, Homo sapiens
cagtgttgaaaattaaaaagctctagttttggcgatccaggggttccctttttgcagcaaaaggcagttctgctttctatcttcccaaagagctggaggggtgggagccaaaagaaagtccccaggtacctcatccccaaggagttggtgtgcaagctggtgtgtggcctgaagtttgggatctgcctacagggtttccccagagggcagcccgcagaaggaggcagagttgagaaatctgtccagtgtgcaggagaggagacaagcgaccctggccgtgtgcagtagtccatgcacacgcagggccattgagagagaggaagttggagcggcaggtgcagggctgtgaaaggcaggaagccaggaggcagaaaccagaatggaaggaagaagccatggcggagggcggcctatgttcctagagctcaaggaagcattcaatcacacgctcaacacgtgattttcaggccacttgtgtgttttggaaacaagtatgtgaccaggcacagaggcagccaagattcaaatgagtgaatgtcccatggacataattaaagagaaagggcttgtactaaacactggagagctgttaggcatagcttttccaggcatttctttgctagtttttttttttttttttttgggctggggggaaggatcggagtgtatgtgccccagttttatcttgtttaatccagctttattacagctctgtcctcagcgctggctctgtttcagcatccccataggcaaggaagatgctggcttcaacagtttgttttaaaaaacaaaaatcaaagttaatgtcctaggaatcttttgggggatccctgaaaactaaatataaatttgttagggaaagtagttagttatatgttgtttgagaatcattgtcttgatcttgaaagattatttgacactttatttgatgttaatggaaattcttcgtgtttgatttatttgttcagagtcattagcctcgtgagaacccttcatggggcctttatttcacagtatttgcatgagcattgttttttatctttgaaaa

SEQ ID NO: 114574 - DNA, 1023 bp, Homo sapiens
acaacattcaccaccgtggcctggtcccacggttttctcgtgtaaatcacagcatttagactctgccctacagctctctccattagcctgatgactctatagcaattcattaacctgggcgtttttctacctattccagggctaacagcataaggttttcctctcaaggaacaagttgatttgttgctgtttgctcagtgaataaaagcaacctctcctttagacaatttatggcgaacaagatgataaagcaagttactctttcaacatttctggagtaaaatgatggatgaggctgtcctgggaggccacacatcatggtggaccaaatgaggttttaacactgatccggcctgccttttaccagccacaggtcattggtttgtcactttagttttctgttctcccatcagggaagggagtacagaagccaccctttgtagggtaggtacaaagaggaactgtgagcaagtctgtaaaactcctggctcagactctggcacggacggagacaccactgatggccgtggtggctgataaacagcagtcatagtcatcattatggaaagaagtggcattggagtcttttttttttttttgagacagagtttcgtgcttgtcacccaggctggagtgcaatggcgcagtctcagcttactgcaacctccgcctcccgggttcaagtgattctcctgccttagcctcccaagtagctgggattacaggtgtgcgccaccacgtccggctaatttttgtatttttagtagagacggggtttcaccatgttggccaggctggtctcgaactcctgacctcagttgatccgcccaccttggcctcccaaagtgctgaatttataggcatgagccaccatgcccggcctgacatcgggagtcttggtagagaactctggtgttcactgtgtggctctcccagcaaaaaacaggtgtgttcgtttcttctcgtgatctgtcatttgaacgtgggcaccgttgactgaactcagcagcacattgccaggta

SEQ ID NO: 114575 - DNA, 1072 bp, Homo sapiens
gcatggcattgctttcagtaaagcttgagctagtcagtttacattggactacaagtgtacagagttgcagctcttagaggcttttaatcagaggtaccttgcgaattagggaaataaggtcctgtgcagaagtggaagggcaggttggacctggtcgtgacatcatttgactgggatttccaggcttctaacacagcctgtgagcatgcaggaacaaagaggtgtacaacctctgaaaactctgtggaactgaccctctctcagagcagccattgtttgcagcgctgttgcatcagcagatgggccacttctattcagttgctcctgctatctggggcgtgctagaggcatttcctggtttacataaactctggggctctgccaacgtccttagagttcaagcctttcccttctcatgctcaattaaaataattaactacagtacaatcgccgcttgttctccacttctcaccttgcctgctcacagcacatccattcttcttgttccagcctgtcgctacaaagtagttagatgatagagaaggcaggttgggaatattcaaagactctatagcaactggcctggatgcaaaggctttttttgttctttgtcctggtcgttttggtaaatgtgtagtcgcgtatctgagacatagattgtgctttattcggtgctgtggagagtagaaactagcagcagtacctggaaaggggccctgatctgcgggtgtggatgagtagagactcttcagttgagatttagctctagtgagggttgggtgcaaaaatgtaggaaagagtgaagagatgagcagctcatgtctgagttttttctgtttctgttactgtgtcacagaccagcctcagatcatagttcatgatgccaagatattgttggagttgaatgcggagacagacagggaggattttttagagtgtctgccagtgtgtaatgtgtcataatagcattttctgggtttgggttttttttttttttttttcccgaggctctgtcgcctaggctagagtgtggcggtgggatctcggctcactgcagccttgacctcctggg

SEQ ID NO: 114576 - DNA, 1076 bp, Homo sapiens
acatacacatacacctgctgagaagggagaagtgagggcgaataggaacttgactgggctccctcaccttgagcaatcttctcctcactgctaaacatttccaaaaagagtctgtgactattttcttctttctaatgccaggcaatcaaggctgcacttgctacccttctgcaggaagcttcccagccagcacagtttctctctgccctgcctcttaatccccacccctgctcccaggcctgggacactgctaaccacccctccttcctgacacctctctgaccacccctcctcctcttgactggttcctctggaggtaggcatggcctcgggttctgcccccagtttctcactcgctgggctccaaaagaaacactggcttctctccttcagctccaggctaggtgagtacctctcccctgtgtatttccacctcaaaaccctcctctaagctttggcctcatcatctcccttaattttgtaacttacttgattttcctagttttctagattttctagttccgtgctactctgcttcacctgtttagcactttgaactgaaatgtgtccataattaaacttcacatccttttccttccgcgtcagctatctcaaacagatgattcttgcttaacccttttcctatgtatcaggataagtcagggttcttggcctcggcagtactggcattttgagctggacaggttattctttgttgttgggctctagcctgagctttgaaggaggcttcaaagcagcgctggcatctacctgctagacgctagtaacactctcctctctcaacgtctccagactttcccgggtgccccccagggggcaaaaccacctcctcttgaaaaccactgggctgtcgatgctgatgatttcttggtttttattcttattttttatttgctgtcaataaaaacggcatctacatgtaagttaacttgttatatagcatttgttattgcttttaactgtgtgttttactattcaactaaaatagaaaatggtgtatcgtttcacactttctggatgtacttagtcattcagttaaatgtctattttgtttc

SEQ ID NO: 114577 - DNA, 1048 bp, Homo sapiens
tctcaagatcagggtctgaaactcccctgggtcttctctcatctgtgcagatggtccactctgcttcattagctcttcagcacttcactctgttcttcttcatcctaggggtactttccttgtttttttctccggcaagttctttctatgaccctcaaaaatatgcgacaaagaatagtgacaataataaaaacaccaccgcattagatgctggggtttgcgttcacccctcctcaatataaagacgattcttactgattataaaatattagggaaatatgtgaaatgttttaaaaattagttacccataattttaccagccagagacaaccctctttatatttgttgtgtatatacttttcttccctttaaattgggatcatagtttaccttaattttgtaacctacttttttttttaacttaataaatcttgaaacattctttcgcattttttcatgactataaaattctgtcagtggctatactttcaagtcagatttctattactggattgtttatttgttgttgcaaataatagtactgtatttttcatgtgcacaaatactttctccttaaggtaaattcttgaaagtgtatttgccaatcagaatatgcacgttgttatgactttgatgtatatatagccaaactgccctcattaaagccaacagcaaacaagatatatatatccaatgtgtataacaatggatgtatagctttaatatataaagagccttcacaaatcaataagaacatgttttagtagaaaaacgagtaaaaaacagaaacaagaaatttgcaaaaggtgaaatataaaattacttgaagttctcaatagtgtaatcaaataaatgaagtttaaaatgagatacttttgctagtgtgaggattgaatggtttaatggttttatgctttttttttttttttttgggacatgattatgttgcccaggctggagtgcaggggctatttacaagcacaatcatagcacactacagtctcaaactcctggctgcaagagatcctcctgcctcggcactggagta

SEQ ID NO: 114578 - DNA, 1047 bp, Homo sapiens
ccacccacctaggcctcccgaagtgctgggattataggcgtgagccaccatgcgggcccttctggtttttgattgccactcatgtcccctgttgttttgactgtctcctgcacctggagcacccattgccagcatctttgacttttgaaaacatttcatatagaagacctgtaaaaagctgcctttttacctttggaggaaattttagtaaaggaagcatttaaagcaaccattcttctccctaaacaaaacaatcccagtaaagccctcagtggtcacttccatcctgtttaccaagttgtcatggaaactattcatcagagctctgtagagatcaggataaattgcagcgagtgaagctcagcaccagcaaagagtgctgttcttgttctctgggtggattttccaagatcacaactaaactgcttgattttgtcctgggactttttttaaaaaaaaattattgattggcttttaaaatcaagaatctttgggccctgaaatgtaattacacatttgttgatgcgtgcatgatggttagtttgcccctgcagtcaaaagtgtcttcagcagttcctatcacgtcagcctcgccaggctggacttcctttgagtagaatcaggaatgaattaagcagcacagcccgagacgcaccacataaaaggctgggaacaccagccagccgaagaaagcccatttttgtgtctgtcagcttagatgcccttgcccggactgctaaagatgcagctatttacagtggacagaaactgaaggggtgaaagaaaacccaaggtagggatttttctctttcttgttctgcttaaaagtttcatgtaacttgccatgatgatggtattgtaaaactgcagagatcatacacggggaacagattttgctgtttctccaggcacggaagtgtttacaagtgggttagtgctgattttgattgcatgtacaagtttgaactacaaatttttttttgtaaaaatgaaggacacaattcactgatcagttaaggcgttgataatgcaatatattttcatatg

SEQ ID NO: 114579 - DNA, 1047 bp, Homo sapiens
ggatcccaaacagaaagctccaattatgcaatgctgatgtgaacagagtaactgtatttatctaaattaattcaggaaacagagactttaagaatagatttctcattaaaatgtgttttagttttaatagctctcttcagcagttttttaaagtgggggttgaagctgtgggaattaagagaaaatggaatatagaaataggagttgctggacgtaggagccctgtttagatttccttgggcatgatctgccccctgctggctaaaatgtgttttactactttaaaaacattctcatgcttgagaaaataagcctgtttgaattatataggacttcatagatcaatttttctctcgctttataagtgaacatcgattggataggctcctctgctacttggtggcaatgccaggtccctgggcttctagtccaagcctcttcctttgatttcattttcaaggttgttgcctctcttaaggtctagttttaattttgccatttttgtgtacatttaaatgaatgctcatgctattacagttttgaatatatgtgtgtgtgtgtgtgtatatatatatatatataaatttaaaacttacttgaattttccatctcataaggtcagtgtttgactttggttgatctctagtacatttgacattgactctagtttttcatacaccgtataggccagacagggtttagtttattatggtgtattagtccgttttcacactgttgataaagatatgctcgagactgggcaatttacaaaagaaagaggtttaattggagttacaggtccacgtggctggggaagcctcacaatcatggtggaaggcaaggagaagcaagtcacgtcttacatggatggaagcaggcaaagagacagtgaagaagatgcaaaggcagaaacccctgataaaaccattagatctcatgaaacccactcactactgcgagaacagcatggggaaaccaccctcatgattcagtcgtctcccaccaggtccctcccacaacatggcgggaaccatgggagtacaattc

SEQ ID NO: 114580 - DNA, 1050 bp, Homo sapiens
ctgagctgtcaggttccatgggttgctggcaagtggctcatcgccaggtagagaggctgccattctttgctaaggagtaatgttagctttttctccttggggactggtctttttatctgagaactttgtcagaaaccaggaaaatatttttttattgtagcttttggcatcttctattgaaatggggtagaaagtgataaaaaaaaaaaaaaaataaaagcacccagaatagtcaagttagagttgatcttcccttttcttcactaacctcctctttggctccgtattgataattgaatctttctgaacaccagtttttaaaataaacgtgttttcaaaggtcagatatcataatccctcttaacagggatgttttaaagtaaaagaagtgaaagctctgggaactttaacctttgtacctttgtctccatcttagccatctcatagcaacaagtgtttatttagaaagttcctgcctcgaacttggctccattttaagggggatttggaagaagtttacagcatcatccctagcctcaaagcttgcaatttagtggggagataacaccaaggccagctcacagcacatggccttggatagctgaagtcctgtcattgagggttatgtgatgatgacacaggcttgggtttgagtgtgcttatgaagcccctgaaccttaccgctgggccctttagctattcctgtgggtgcattcctgtcccaggcttgtcgctgaggggacagaggccgtaccgagtttgatgccagtgtccataggtctggactgcgtggtttaagctgcagtgcctgggttagagcccctctgcgctggctgtaactgcctgtgcagaagcccggccttctatgcccctgttagattctcttcctggaaccccaggctcttcctgcctgagacttcccctcatcaatcttatccttcctctggccacttcaagactagagccctgctctgctcccagttcccagccaggggccccaggtttccaccctgaacctcttggctatgggtttgctgccttgaggagagg

SEQ ID NO: 114581 - DNA, 1052 bp, Homo sapiens
ggttcttccaatttatctacccttagactgagaaaggagctgggaaagagaaagaattatatatttatgggtttaaactgctaaattttcctcagttaaaaaaaaaaagagtgtatttgccttttttttttttttttgagacagagtctcactctgtcaccaggctggagtgcactggcactatcttggctcactgcaggctccgcctcctgggttcaagtgattctcctgcctcagcctcccgagtagctgggactacaggcgtgtgctaccacgcccagctaatttttgtattttcagtagagacaaggtcaccatgttggtcaggatggtctcgatctcctgaccttgtgatccgcccgcctcggcctcccaaagtgctgggattacaggcatgagccactgtgccccgccctttttttttttttttttttacactgtgaaagtgtcatttttgtcaaatcgacctaatgtttgccaaatgttttcaaacagccctgtccagagaaattcaatcatgctgtcttcctctgacttgctgagctagcttgtcctgtctttagattaaaatattttccatatgttcagaaaaggtaatgtttatacctgttggtgtgaaagtggcgatgcattctgtgttttgcatgagctggcataatgtgcatttatttctctgttctcatctcaaagatccccttgtagatgaccagtgaaccacctctttcccatagaataccactgcataggtatccacatgaccgctgcactgtgcgtgtgttgttattattaaatatttgacactgtcgtgtaactatttgtttacatagcagtttctttgctaggtttgtcaaggacttattttgtcttcctggaaccaaggacactgccaggcacctggtagttgtgcaataaatgtttataaaataaatgccattcatattacaaagtcttgtagttgataaaatgtgaacctggattttaaaattttttattggtgtatgtctcttgtaggtgcagataggttgaatatacctaatccaaaaactccaaat

SEQ ID NO: 114582 - DNA, 1171 bp, Homo sapiens
gatgaagacttgaatgcaggcgtgtgcaatctcacagaaaacaatactgttccatttgtaaattcagctcgtggcctgtgttagaagtttcaaatgcagttgcttcgtttcagacgttaaagtccgtcgttcatctggctgctgtttggatgttacagatggttctgggaatcattttgggataattaataatagcgtaggtcttccagtgagggtaacaggtagctaacccttgagaattcagtgagcatttcagtctcctggaatgatctgctgttctaaaatgcatccatctccccgccacgtcagagttcacagtgccttgttccaagcatctgcttttgctcctgcaaacagagctaatgacagatgttaactggctgagctgagagacagtcactcttatgacaatgggttggagcatatgctgtcccgagtttcaggaagcttttgtaacaaaggactcaaaagagatcaggcctccagggaatgttgccaacatgcctttgtaaagggcaaatcctgtccgattaacctaatttccttccccgagcagtgataaaccagggagattaaaatttgcagctatttcaactttagcatttatttttttctgatataagatgtatttataattaacatctgaagatagtttatttaaaacatgtatctcgctttattttttttccctccaccaaaaggtcataacttgccttggaaagtaatacatgggcctcatggatgtttggaggtagcaccagcgagtgtagacttcagcatccactccctgaattttggatgttccctgttcgggacattatctgcaatggttaagatgaagtaaataccatagagaaaaaataattcctgccatttgaggaaagccatactcttgagtattcattattggctcattgctatctttgatggagattttaaaatagtttgcagatgttacttttagctacaagaggaaaagcagctaaagccacattttagcacctaggatttgattcgttaacaacttgcattagcttgagtgatggtctgaaatacaaagcaacagtttttttggtttttttttttgagatggagtctcactgttgtcgtctgggctgagtgcaatggcgcaatctcggctcactgcaacctccgcctcccaggttctggc

SEQ ID NO: 114583 - DNA, 1003 bp, Homo sapiens
gtcttgcagtgctggtgttgggcacaaagaaaagggctcatgtttggtgctattgacccctgtggttgctttcgattttgtggttagctttgaaaatttaaattgaaggtaagtgggctactgtcttgtatttttggtccctgtgaatactgaaaataatccgctaattaatactggatgctaagctccgaccaggcagtaatttgtgactggaataaaatagaaaacggacggaatcaaacgtaattcttttatttgaatgcttaaataaatactatgcttttgttgtataataaaattatatttattttaacaaagtcatattttgtgaaaaatgcgaaggccttgtttgggaacaaaaaacagttcagaaattatccctgggaatcagacagcatcatttaatgccggtgtgatttcagaagagaaatcagaggcagtttgttcaatacaggcaattgtctgtctgtgaatgagttgcattccgtttcaaaaatgcattttttaggcctgttatttggaacaagtctttccaaatagtaatatacatggtgaattgatcatccagctggtctgcaaagacctatccaggcatccacagtgcactgagggcagggatgatgctgaagccctcttgttgcctcattccaactttaaacgtgtgtttggagttccaacccagggtgccacagttctgacattagggaatcccattcttcccgtggtcccctttctgctgagtggtgggaagaggggcacccagttctaagccatgacctcctcatagttggtgaggatgagggccttatcagggttggcatttcggatgggtaaaggggagagattgagatttgctgggtgacatctctccagcaggcaccatgctggtacatgccaatctgtttgtcctgtttaattcctgtaagtatcccatgaggaaggcaatattaaccagccatattttaatgagatggcaattgagcctaggtgtaataacacgtcc

SEQ ID NO: 114584 - DNA, 1065 bp, Homo sapiens
actttgacctaagagaatgggagccattagtttctgaagagttctcaaagagggtgaaggcttgttgagacctagttaaacttctggtttctggagcccaactgcctgtcatgcactcgctcagtctttgtgatgctgggcaagttagtttacctctaggcctctggttctccatctgtaaaatgggaatggtcatagtgcctgcttcatcatctcaaatgacgtaatccacctaaatcagttgcatggtgagaacacaggggctagctactattttcttagtccctctttgccttctatgtctgatgggactctcagtcacacttgtggatagtaaagcctgtggatgatgctttgcgaagatttgttctttgcttgagaaagacatttacttttcaagaagattttttttaaaggaatataggagttagggtaatttcgacagtacagtttcgccacaaaatgcaatccaaactcagttcagtcttgtttgttttgtttacagggaacacgggtctggctgagagaaaatggccagcattttccaagtactgtaaattcctgtgcagaaggcatcgtcgtcttccggacagactatggtcaggtgagaacaagtccctgcagcttcccaacatccatggtctgctttgtagctattcgtgcccagggcatgtgtgcttggcccccctacacatacacacgctttacatttttttcctaagtgataattcaaaatcccagtgggaatgtagaatgtaaaccatgtgtgtgtaatagatacaatacagttctctcaaatggaacacagcaaatattccaactagtgtggggacagaagggcatggcactggcctggtttccctcctgggtatcttttctgccttctttcatctttttcagctatcagaagtagaggatgcaagtaatttgagcaaaagttcaagtatatgatatttgctgactgattaacttgttactttctcttaaaattcttaaactttcgtagtgtcttagtcagtttgggctgccatgacagaataccatagactgagtgatttatgaaga

SEQ ID NO: 114585 - DNA, 1070 bp, Homo sapiens
ttaaatgcgtcagtggccacctctgctttccatgaagcatttctgattatccactcaccttctttctcagagttagcctctttaatccccacagttcctgggaggtagattgtatttgcttttcctctacattcgatgaggaaatgaaggcccgtggaggttcatttgtccaaggccacatggctaagatgtggtaaagccagggttcctgtccaggcggtttggccccctggatagagccattatcaaaaaccactatccttcggtctagccaggaaaaaaaacttcagacagcccacagaggagggatgtttcacagaatacctgaccagcatttctcaaaaccgtcaaggctatcaaagaaggagcatgacgattacatccaatgtcccagaaggggtcctgggacggaaaaaggacattaggtggaaactggagaactctgaatgaagtgtggcattgagttcatggtaaggtgccagtgtcggttccttagtgtgataaatgtccacattatgtaagatataagaacaggaaccagagtgagaggtgtacagggactccctgtattatctttgcaacttgtctggaaaatctaaaactattctaaaatgaaaagtttacttaacaacttaatgacaatgccaccactaagcccactgcactccactgcctggctggcttgtcacacactctgggtaccctcactcctcgctgcctggtgcccacccactgctggggagaggctgtgtcctcggagaagagtcccctccaatttcagcacgtaacagtgacggagggatataactagggctagtcacagggccatcagaagtgctgcccccacttatttatttatttatttatgtttttagcagtgtagtctgttccaaagtctctgttgaacccaacaggaggtgtaatatggagagaaatgaaaatgaattttgctgtaggagggaaataattttctttttttttttttttttttgagacagagtctcactccctcacccaggctggagtgtggtggcacgatctcagctcaccgcaacctctgcctcccgagt

SEQ ID NO: 114586 - DNA, 1907 bp, Homo sapiens
ggtgtgtgggaagggtctgggagcttctgtgctctccctaggtgtgccaccctccagaaacccccatgtgtccagctgtccggaagctctgtccttttgggtttttatagaagctttatgacgcaaccatgactgatttctttcactggttactggtcaaccttcagcccctttcctttccctgccttggtctttcctgtgagcagcccccatcctgaaaccacctaggggctaccagccaccagtcaactcatggcatacaagacacttacactttgaagattgcaaggatcttagagttggatgtcagaggacaatgacgctgaccaaatctgtatttcacaataccccacaacccagcctgtcattttcaaatacttcagctcatggaacgcaggtcctcactcccatctaagcccataatctccctttgtattttatgtgcacttcttatgtcattcctctctgcactttattatggccactttctgttatttacaaggtttttctctgattaaactgtttgagagcaggctggcttctattcctttttcaggctgttgagcagttctctatgccaggtgctaggctggactattttctaatatttgttcccttatttaacctcttagctgctttgtggactgatgcttattatctgcatttgtaaaatattaataggaaagtggcttatgaaagccaatcagtaaagctatttcaaaaagaggagaaaaactgaacccgtttaccacctgttagctctgggaccgtgggcaagttctttatctgctccatgcctcgtttcccatgtctgtaagatgggagcattattattattattatttttgaaatggagtcttgctctgtcgccaggctggagtgcaatggcacgatctcagctcgctgcatgcaacctccgcctcccaggttcaagtgattctcctgcctcagcctcccgagttgctaggattacaggcatgcgctaccacgcccagctaatttatgtatttttagtagagacagggtttcaccatgttggtcaggctggtcttcaactcctgacctcatgatccgcccgccttggcctcccaagtgctgggattacaggcgtgagccatcgcgcctggtagggagtgttattagttactcactcacagggtgttttaagaattaagcaagttagtgcgtgtgaagcgtttaggacagaggcctgcacatggtcaatgtgtcagctgttaggattattctccaaggttacgaggcattgggagatcagagcctggtctggattcagaagcccatgtccttgccattgaattccatgtccttctgggcctggcactgtgccttgtcagccacgagggctaaataaatatttgtagcatgaataaatgcatttgaaatttttgatggtggttgttctccaggtgaaatgaatttacttaaaagatggccctgggcacggtggcttacgcctgtaatcccggcactttgggacgccaaggcgggtggatcacctgaggtcaggagtttgagacaagcttgactgaaaccccatctccactaaaaatacaaaaaattagccgggcctctctccggtccatgcttccaagatgacaaagaaaagaaggaacaatggtcgtgccaaaaagggccgcggccacgtgcagcctattcgctgcactaactgtgcccgatgcgtgcccaaggacaaggccatcaagaaattcgtcattcgaaacatagtggaggccgcagcagtcagggacatgtctgaagcgagcgtcttcgatgcctatgtgcttcccaagctgtatgtgaagttacattactgtctgagttgtgcagttctcagcaaagtagtcaggaatcgatctcgtgaagcccgcaaggaccgaacaccccca

SEQ ID NO: 114587 - DNA, 1054 bp, Homo sapiens
aagtttgtcacaggcaggaatcatgtggaatggcagcgaaggaaggcggcatggccagctgttgggatcggcagagctggctctggcagtgggcactcagccaagccgcccgcacttcctataaaacaccctggtctctacccagcttcccgtaggtactgtaggaagaaatgccaccttgaacccttggcccagcttgcagtaccatgctggaacattaaggtctttatcatttggtcaggatcggacagacttgctcatgttcctttgcttttcctgccccaccactgaagttggtatcttcaggtgtgtttccagggaggagcccaggttagctgtgttgtattgtttcttgtcttaactgaaatcccataaaaggggctgagtgtagtatcccacgtgatccaggtcattcctcctcctggtgcctcttggctccctctccttcttgtctttttgtctcgagcaactgtatcctaacctcctccctctcttgccacatggtggtctagtctttgcctggcctgttgttcttggagctcagaattttgctggccttatttctgaacttcagctcatacttacgtatcctggttctcacttgtctctcttgttctgactcaagatgttgcaggctcctagccacacccaaaccccacattgcacacctacgcttgctttgtccactgcctggggttggctgtgtttctgtaagcaggcaggtcagtagcctgtcttccactgccagccttccctggcactctgggcactggccacctccacagtggcagatgcagttttgcaaaagtgacttcattcacaaacttgagaagaaggaaattctgcgataccagggtgaaaaccaaaattaatcattcagtcttgagctttagacagccatacacgtatatacaaggagaagcagaagattgtagtttgaaatgttcatatgcaattcataccctaaaggcttggattccttctagcattaccaactatgcatctctgtgctttattgctagaggagacttgactattactcaagatttgattt

SEQ ID NO: 114588 - DNA, 1025 bp, Homo sapiens
gcgaaggaacagacaatacggacctgatttgtatatttctgagatgaaagaaagattgaaggggctgacgttagcaatctacactatattctttggacctcttcgtgtcatctaattattttagttaattaccaacatttttgttaccaaccctgataatgcaagaggcagcctctttgaatggggtacgtgaacctttaccagtgaattcatatcttttttcttttccgtttctcccaattttgatgagtaagtgtgtggtttttcttcttaattttcatcaagcctattgttttcttgccagccacagtgatgaatcactctaaaagcttggtgagggcagttgaatcagcaggcaaaacttttttatttgctgaaaataaatggaaggctgcttataggttcacacccttgctgctctcatcaaatcttcaggcaggagggaaatgaaattggatcatcttaaacttcctggatttaatctgtgatttaggagtgagttctttccatgcttctcctctcctcttttcccttcctagcaagaggagaaaaaaagcaagtaatttaatgtaatctgatttttttttttttttttttttttacttcatggctttttgacattggaagagaaatgagccatctttctagaggagctttagtgtcatgtgtgcttttcttattgattgggaataacttaaaaagactcctcagaactccgaatgggatatttaatttgttagaacacgagtctgcaccactatctgttgacggtgaaatgaatttactaagtggataatttgctgagcattagctgaccctgacgtggcggaacgaaggtctctggagatggttcatggtggaaatctgggcttgatgggtcggtaatgagacttcagcgatgacatctttaccaaggctgaggcttaacactcgggaccaagcgattcaactggtaagcgacatgctttgaatatttactcaccagctctgttaattcagattcaggataagaaatgtatggtgag

SEQ ID NO: 114589 - DNA, 1031 bp, Homo sapiens
cagtgagcagagatcgtgccactgcactccagcctgggtgacaaagtgagactctgtctcaaaaaaaaaaaaaaaaaagtgataaagtgatagttgataccaaataactcctgccaatagaaattcaaagttaatatcactttccacccacgaccatgatttgtactttatttgaggagtttctgcatatttacttatttttttgccattttgatgtgcaggggtgtgagggtccaagagtagtctgcccattcttcctgtggctgtatcatcaattatatgacaattttaggttgtttctagaaaacagcgcatgaacgcttttgtacctaagtcattgcgtgcctatttgattatttcctgaggagtaaaatttcccgggagtggaaatgttggatcacaaagtttgcagattcttatttggattatttggcagtggaagtttcatgagaggtgtcagtgcagctggcagctgcgcagctgagagaccctgtcatgatgtatttatgaccccggggattttgtaactccttactagaagcttaaggaaatacattgattagcggaggaagttagctcatgatactagattttcatttccatttttaggtcttctgtgaaccaggagaaggccatcttttctgttaattgcaaacaaggctcttgattcacatgctccattcatctcaccccccagcgtggttgttgatgttcgtttaaggccaaagcacactcaagggactaggctgtacattgcctggggagccagtggacattcatttggagaattatttgtatggagttttactttagttttttgagacagcgtctcactccgtcatttaggctggagtgcagtggtgctatcatggctcactgcagccttgatctctttggctcaggcgatcctcccacctcagcctcctgagtagctgggaccacaggcctgtgccaccttgcctggctaatttttacattttttgtagagatgaggtctccttgttttgcccaggctggtctcgaactcctga

SEQ ID NO: 114590 - DNA, 1025 bp, Homo sapiens
ggcggggcgaggtcgctgggctgtagtcccgcgggcgagagctggctgagccgcggcgcgggactgctcacctccaagcgctcgcgcggggatcgcggctcctgctcactttgcggcccgctgtcctcctgcccgccccgagggcccccggccggagcgcagagggagggggccgcgctcgccagcaccccgccgccttcccccgcctgggggaagaatgtgccaccagctgttctccgcttgcgagcgctgcgcccagtagtgaggaacttggaggaagaagagacaaaggctgccgtcgggacgggcgagttagggacttgggtttgggcgaacaaaaggtgagaaggacaagaagggaccgggcgatggcagcaggggagccccgcgggcgcgcgtcctcgggagtggcgccgtgacacgcatggtttccccggacccgcggcggcgctgacttccgcgagtcggagcggcactcggcgagtccgggactgcgctggaacaatggataacttcttcaccgaggtaagtgcgctcccagtccgacctggcctccggagcccagggagagaggcgtctgcccaccacgccgcgcgccctgggtactttttcctaagccctggaaggcgcaactttctgggagtctcctgaaatcaccccccatccccccgcggagtctctgatgagtaagcccgggcaggttttgtttcgtcctgtcccgcgctcgcattttgctccgggaggtagcgaaggtgcgtttccgtttgcgtgggtggctggctctcggggcgccctgggacacccgcgccaggtgaggcggcgcgcgccggggcgcgggcggggcgatccgcccgctcgactgcccgggtgcaggaagcccaataaaatgttcagcggggacctgcctttctccaagaaaggtcttgtctggtatttcctttgcaaaacgtgcgggcttcctgtgcaggggttcaaacacttccagaggagacggcttaatgaagtgtgagaaggagaggcaaggg

SEQ ID NO: 114591 - DNA, 1494 bp, Homo sapiens
gcagagggagtgcagggggtggggagatggagctggagggggtggaggggagacgggcggggcgccgggctggagggaggggagagaggcgggcggggagcgcgggaggagggaggctgggcgggcggacgcgcggggggagggcactgggcaggaaggggagggggagcgagcgcgagaaatgcagaggctgcagcggcggcggcggcggcagtagcggcagcggcgacgacggcggcggcagcgctccaactggctcctcgctccgggctccgccgtcgagccgggagagagcctccgccagcggccaggcaccagccagacgacgccagcgaccccggcctctcggcggcaccgcgctaactcaggggctgcataggcacccagagccggtaaggaggcgcgcccggtggccccgcgccgccgcggacccgggggcctccgtcccccaccgcgccgcgccccgccccgcagcccccgggctctcccttcatgcagcgggcagcagggatgtgggcccggattggacggcaagggcctggggtccctctgtgagggctccgtcgcacttcggggatcccgggtgatggggggcccagaagtgggaggcttcagccgctcgcatggtggaggggtgaggggggcggcgaggttggtaaacggagctggggggagggggctgtcggggagaggagctgcgggtgacgggaggaattgccgaatgcgaaaccccctcagtgcgttgagtcccggggagacggttctgtgggctgaagggagcgcttccgtcatcggagcccttaccagcctgggagaaagcgctcggggcgaggggcgcagcagccaaagatggagggtgggggtggggtggggcgggagtccggggagaaagaagatggggaatctggcccgatcagaaggaagtgggtggctttttgctttggcaaacgggttttctcgacccatgggactcctggatcttggttctggggccaaggaatacgaggttcacacggcgacgtgcactcagaagcacctcccgagcagatcggagccccagcctcgtcagtggcggaattgccttcctacgaacccgtgggctgcctcggagcagtttgttttttcgagcctttggttccaagaatgcgccaggcgcctccgccctgggtcccggccccggcccgggcccggggggtgtgggcttgaacctgacagcgcgcggccctaactgggctcagccccgctgggagcgtagggttggggttgagcagcttttgcccaaagcgctaaagctgaaacccggcgcccggttcctgctccccccgcccccgtcccccctccatttccagaaaaataaaaattgcggaatcctggatccgatcgcacgcacaatgcgcggctgcaaaccgcattcttttcatgaatattcatcgaacgcttggccaggctccttatctgcgtccccagagacatttccgccttgaaacgaactcg

SEQ ID NO: 114592 - DNA, 1139 bp, Homo sapiens
gataaagtactctttatgtgttttggggtaatgtttttggagtggtttctcaggaaatcgtataaagactggatttgaagaatctaataattcctattttggggttgtaataagaactacatatgatatctaaaaatgacttaagtgtggaatggctggctctgaagggctcctcaacctctcagtctcaattagtgatatcaattacactgaaagtgttttcaacaactgaaagtgtcaatcaacactttcagtgtaattgacatcactaactaatttcagtatattcagctgtatttttgttccagcttgattaatgaagcccgggggaccccaggagtattaagttagaagtaggatgtctcaatcctaaaggggaccaaatatcatggttcctattttctgtccttgtgtttgtagatatttgaaattctgtattatatgggaattagcctgaaagtggatttcatgatatcaagatggccaccttccttgaattccccaggtctgcttatacttatacttatgtaacttaagaagtggcatttaagttctcttgagaaaatacaagggtagtcttgaaaccacagcagtgcccagcctgccaaaggaaggcttttgtgaaacgcctttccagccacagcctttgaggcagacgtctaggtaagtgtcacatgagaacagatgtctggtaaatgctctcaagagtaaaaatcaaccatacagagtccatttctcaccagaatatagttcaattgtaattttgaggagccacaagcctaagaaggaagcagtgtgattaaaacagcattctccttttccctctagaagtcagaaatgggatgaaatgggaggcagagagaatgaaatagtgtgtttttcttctgcaccctaaggatttaaataacataaaaaattatttcttaatgttttacagactttccatactcagtacatttttgaacaaaaatagggaaagctgagattttttgactcaacaaggccgtcagtgctgagaggtggtgattgagcaggcttggaagtctaggaatacattcctgaaagctttagagatttagaaatagaaaccatctgcaagcaccacaggggcccagggcataaggaaacacttcaggata

SEQ ID NO: 114593 - DNA, 1020 bp, Homo sapiens
acataagtggcttattccattcacctctacttttctattgtaactggatttatttctgccatccagacagagagcctgggctttgatttcatctgtaccaaagttttctgggtggacaggtacagggggtcatcgtaagagaactcaactgaccacaatgcagagagaggtaactatccaatggaatggtaacatggttccactacggtaagaactgtagtgttaaatgaaatgaattcttaatgggaaaggagtcctatgaatatttctaagttgttatgtttaacttaactaactcttaaatgcagggaatttaacttaaaagtgaatttaacaaagaagtgaatttaaaagccaacaagcttcatatctctccacctcaccccaaacccgtgttaattagcccttcttgcttaaatcaaatcaccttgttgaaatttaatgctgtgactagcaatgtattctttgaccatatccttgtttccagcaacaaatactgccacgttaaggggagaaggaagtgatggatagagggaccagttggcagattgggacacacgtacaaacactattcctttaacttgctttctttagatccgtagttcctacctgtgagtctcatttctgtattgatccgcattggctaagcatacgactaaagcgggattctttgtcttttcttcagtgagctagccaggaatctcagaaaaagggcaaagaagtccagaatgatgtaatgctgcaaaaaatgttactgctgtttctaaggggagtggaagaaacccaagccagttttgagttgagtgtgcttcctgttggaagggggtgagaattcagagatgtatacctattaaaaaaaaaacaaaactcttaggatatcacacagcgtggcaaaccagcaagccctgacctgttagcagttgtttgcatagtttaccaggtagagaaagcatccacagatagaatcaaatgtttgaggacactaacgtgcactgtggttagtgtgaggtttaactggct

SEQ ID NO: 114594 - DNA, 1050 bp, Homo sapiens
gggaagtgtgtgtcgggaatcatggaaatcctccatgactatagaaaccaaggctaatgaattttggggcctttccaagcaataaaacaagtagtgatacttacagggattcttttgaggggcattctcaacaagtgtgggtgtgggtaagtctacacttaacccttttgagagggtcctttttattattatttcattttattttattttttgagacaggggctcgctctgtgatgcaggctgcagtggtgtgatctcatctcactgcaacctccgcctcccgagttcaagcgattctcctgcctcagcctcccaagtaggtgggattacaggtgtgtgccaccatgcctggctaatttttgtcttttgttttaggggagatggggtttcgtcatgttggccaggctggtctccaactcctgacctcaaatgatccacccgccttggcctcccaaagtgctgggattacaggccactgcgcccagcccgagagggtctttttaaaacagtttacgacttttaggcgtaccctgtcaagtaattcagttattgctttcctggctcaaatttaaggtcacattacgttaactctggcaatacaaatattgcctcatgaatccccagtgaaattgagaattaacaatttaattttactacactagataaacaaaccactggtcttaaaaataattgaaacgatgctgtttaatgtcttttataacaactttcactgaattgttttctacataaaacataggatgtaagttattgtagaatttaaaaattttaactcttaaaatttatgcagtgtctattttcaatgcaatgtcagtgaggacctttagcactcactttcctggtagatagcaccttcttccaatcatgccagaaaactaggcttgtctcctggaattccccatatggcctccttcctgggtagtgaaactcacatatgtccatttccctctacttgaagccattaatctagtggaagcttctattctctcctggatcactgccctaatactctcctaaatccaagcatgacat

SEQ ID NO: 114595 - DNA, 1059 bp, Homo sapiens
cctggcactgggcatttttgtccctgcatttgccagaattgatgagattatgtaacgtctctgctcctctagattaaaacatccaggaggcagggatgtgtctgttttgtggacccataacagtgccctataacaatttctgatccataccaagcaccccatgtctgttcagtgttgaaggttgtctacagtacattatgttcatggagagcacgtgtcttctgaacatcgcctttggcagctgagatgacttccataaatgggccaaaatttcacctcatcagttgtgcttactatgaagatgaatagctgatgaactccaattacagtaattattctgtttccaggcaataaccttagcagtagttgttctaaagccctgagacattacaagtaatgagtactgatggctcatgcatctgagtgtcctcccaaggtagagtccgaaatgaaaaatgaagctgtgtattatttgagggagacaaatagtattacattgtgggaacctttcagaaacacaacacgatgagtgaaagctgaggatgattgtggttacactcctcgtctgtccttccaggttattgaatgcttttggtctgctttggatcaatcattattgaacaacttaactgaatgcattttagtaacagcctttgtgaagctgcgaacatcaggtccctagaaaagcaggtggcttgaaatctttacacattagtcaattataaacctaatgaagtaaaaacgaatttagctctaattctgcgctgtgactacttactctgcatcgtgagttctacgaggttaggaccttgctttgttcatctttggatgtcagtttctagcacctaaccgaacctgtggtccagtaaagggctggatacgtggaagggcatgtttcatggtcatgtgacatcatgctgtgcaaataaggcacatttcagaacgctgtcctttactttcacatccaggaaccagcttgtaacgaacctttggcaaacatcaccgtggatttttctttttcttttttttttggaggaggaggtggggcacaactaagac

SEQ ID NO: 114596 - DNA, 1036 bp, Homo sapiens
gtctcaaaaacaaacaaacaaacaaaacaaacaaaaaacaatactggaaaatacaaacaagcccaaggagtgattggtagatgtttagagtctaccatttctcgacttcaggaaatgtctgtgtgtatctcagtcttctgctattgtaggcacacatcatacttcaactgtatgaagattattctattcctgctctataaatatgttattggattggatgagcaagatatacacttacacatttgaagccgtaagtaaaaaaaaaaattatatagttaaaaggtacaaataattgcttttgtgatgaatttgttctttaaatgaaacatcagtggcatttgttcatgtagttctcagataaaacttcctaaaagtggttcaagtgatttcaaaatgccaagaatatgttgcaaacttgtttttttgtatacaaatgaacagctgacatgaggtttttctaccatgtgaatgtgacgtgggaacatacaaaccacactaaaatattgcagaattgatgtttgtttattgatggagttgggagacgcatctcctttaagtagcttacagtgggtgaaggcaaacaaggaaatcagtaattacagcgaagcaaatgttggtccgtagatacatggggtagagatataaacagcagatagtcattaagtttactactccgatcaattatattctttttcttcaatctgtccctagatccacctcttttgcctgactaagccatgtgagatattccagtgagatattcaattggctattatttaaagagttttatgtgaatatcactgtagagaatatggaagaattcagcatcgattacatttagtttaaaggtcttaatcactagatagaaaagagatttacacatcttaaatttccattaaaaagcaggcatttggggattagaaactgaaggaaaagatttccaagagtagctagttcttaaaacacagtaagaatatgctttagctcttgaacacagtgtttgtagttactgtcagactccttggggaagtgtctt

SEQ ID NO: 114597 - DNA, 1406 bp, Homo sapiens
ttaacattagtgacttcggtatggctcattttgaagaaagaaaattgcctaaatctatagttgagcttgcacacattacaggtctctggaaataagatgcttaaacaggttctataatctggttcttgctaggtgagtgtcccctgacattgcttttttttttttttttccgtgatggagtctcgctctgccactcaggctgtagtgcagtggctcactgtaacctccacctcttgggttcaagtgaatctcctgcctccacctcccgagtagctgggactacaggcatgcaccaccatgcctggctaatttttgaatttttagtagagacagtgtttcaccatgttggccaggcttgtcttgaattcctcacctcaagtgatccacccacgtcggcctcccaaagtgctgggattacaggcatgagccactgtgtccggccccctgacattgctttctaaagtaagattacctgtagttctcagtgttcgccaagcatgtatgaaacacaacgtatgttaagaggctgtttaattacataaatgcttatttgggggattcttgttctcagtggccttctctcttttggatggatatacacagtttgattggcactcctattgacactttatttggtttgtgacttgtttgtctcggtgcctttctattaatatattttttctatttaaactaccctctttttttcagtacagcactggacattttctttgaaatcttccagattcatttggttgtcttcctcatctcagctgtcttatgcaggaaaagtggtcactgttcagtcaattcattctacgtagctggctatctgagttttttttttatcgaaaccaaaataaaacttaaaagaaacagaagaagctgagtctccctcccctccctttcaactaacacctactgatgtttatcttggaaataatttgacgtctatttgatgaaacctgtagttaagtgttaatggagactaacgtcaagcttcagaacagtgaggagaaacctttagtattgtgtgtctagcatttgatgcaagtgctctgtggaaaccatggaagctgggataaaaatgctcgcctgatccccagatagtctcatctgaatgtactgaggcatcaccgcattcattccaaatctgaacctgacctacttttccccttcatctcctgccatctcttccctagtttgtcatcttcttttccagcaccacgaatggttcatgctttctgataaatatctgatgtatggcatcaattatatgactatttaaacatgactcatagtgaactgtatttaaatattgatatgactccatgcgttttcaaagaatgtgtggaatgttctttttgagtgtcagttattaatcatctgttttccgttcaactttggtt

SEQ ID NO: 114598 - DNA, 1778 bp, Homo sapiens
cctgggcgacagagccagaccctgtctctaaataaataaataaataagtagatagataaatgccatttggatttctgaaagcaaggtttgtcttttaaatgtcagttggatttccgaatgttggattcttaaagttctgaacatgtaaagtataggccactggatctcagagctttttatccaggtgcccagaggctgagaaaatgccccataggttctataaaggacatggatcctgacttcatacaggtcaacaactatgttactgtgtttttatctggtttagaggatgggaaacccatcagtgttattatgccttcattcaattatggaagaaatcggttgaataccagactgcccaatgaatgtagtttctgtatattttcaggcttttagactgatctgaagttgtgcctctatgcacgaatgctgcttcttcaaaaggtgccagtggctgggggtcaactttgatgtggcctataaagttcctggcccagcacttaggcctgcctttcaggacataacctctcagctggatttaagaaatagcatctctttcagtgtgaggcagcggcaggaatgaagtgtgttcgtgtccgtgtgctggcgcttcgtatgtacatttttgttgcgtctttaacttagaaaatcagtagactttatgagtatcagaggataaatgtactgcagaggatgagaaaatatttagcgtttttgtggtctctcttcagcagtgcctccctctttcctggaaaagggcattggtgaccagagaaattgtgattctgtttgcatcctaggccaccatggagttgacttatgtgtagactggccatagcccagggtcatccctcccctctctgtcttgttctcagttgcttgtcatcatttccattcaaacacttgaatattccagatctgggatagtgggcagatggtttcatgctattcaatattctagtaaatatcttttcaatggttacctgtagtcagtcacattgtcagaattctcacttcagctatacgtgtgacaatcccttggctcacacttaaatttaacccagtgcttgtaaactgtggaaattaaaggacctagttgataccaaatgtccgttatctggagtagcctctgtcggtagctggatgccttcatttgatgtgaaaacaattgtgtcatagttgaaaataaaagaatgtttttcagcatgtgctgttgctgtgtgctggataagacttttataattaaaaatttcccctgaatgtcaatacatatatggtattcattttatagtggactatgctgtgttactttagagaggctactgctgcagaaccatcagaaaatatctgtttcagccccaattggacatgactctcgggtatgctgttgtttaataatcattacattagacggttcaatctttatccaaagattggacattctcattgcatacatttgagggttaataaaaccaagctcaggcacttcggtattcttttaaactctgaatgatgtcccctgtagaatgtgaatgatttccagcccgtgtttaccatgtcctaaaacacgcatatttatgggtgcctacaagatggcacagaatgaatcaaaaccataatctcttaaaaaatatgtaccacactgcagttgtgcttgttgataatttaaaaagcacgtttacatgtggtgcgcctattctaggtctccttgatttccttcttccctttgtaccaccactccatgggctgtagcatcctttaagtatggaggccctgct

SEQ ID NO: 114599 - DNA, 1034 bp, Homo sapiens
ggtgccctgcttctagtgcagtgcctggatgtttgtgtcatttctcaaataaataagtgaatttgagtgctcaatagaatctagttgtgtgtatacattattactgcacgtttgtgcaaaaactaaaaattatagacataaaggatacaattctagtcatttatattacaaatgaaataaccaaccctgggaggttaacagtggcttgtttaatgtcagcagctagtttagtggctgtaacgagactgaatcccaagttgaacagaaatcgtttaaaaattcaagttttaaaaatcaagtacaatgaatgatattggctgcttttctaaggagagtgattctctaagcctataggaaaaaaatactggtggctgacttgtggccttaattgcatgctaaggttgaggaaggatctccagtaattctttgctttactttgtgtttgaatataggattttatagctgtgggtggaaaaaaaaatatttctagggaaaaggtttcctgataatttaactgaaccccaaacaagtgaactgggtgaaacagaatatggcacatggtcctttatcacaacctttctacctaacctaaagccagtaagatggaaatagtttggaaaagacactatctgctgaggttgctttaaatagagtctctcctgggacttagaacacattttgaggctcattctcccttttgatagtttcttggagacatttttctgtatatactggatgcaggcatttgtattcctggatggcattcatcttttaccagtgtgaggaggctgtttttatcattgtgagatttattaacatttacttgctcttagaatctacagattatataacagatattgcaggctataacctagaatttaaatattaaaaagagtgattaaaaaacaaaacaaaaagagtgattctttttgttataattgaatcaattcctattgtttacctgtgttgaatacagtaattggtcccaccgatcttttacttaatcttgaaattcagagttattctctattcta

SEQ ID NO: 114600 - DNA, 1010 bp, Homo sapiens
tgtgcatttccttatctcagaagctcctaaaaccatttataatgtagcaagcctgtttgctttacttttgcataccggttgtttcacacaataagacctctccaggtttagtggtcactgtggcagttcttcagcattttagttgttgaaatgtctgtccctttcccagtacttaagaaatcctaagtgttgtaatacgagagtactatgaaggtaaatgactgcagaatgaaatactgtaaggtaaaggactatttcaaagagacatgatctaacgtttactatgtggagatcttgtggagccattactctggaataattcagatttaaccatattcatgtaaaagagagcatgttgagttggaataaccatcagatttggaatttatctcattggcttctctcccccccaccgtctgcataacaaagtgttccacttcagcaaacatctggacttaactttctgaatctcccagaactttgcgctgtcaagattcctccctcaactttccactttagttttgatttttatcctttgtctcatcctatcttcccatagatattttcagttcttgcaaatccttgtaaacaaataaaagtcttgccaaaattgcacgtttctgccgttaccaacactctctggtattgaccattgtggctttctcttctggcgcctcatgtgctctgtgagccctttcaaagaggcaggtgtcttcactcctttatcgaagtgactctagggtccgttgttgacagcccatcaccggatcaatttgcgccatctcttcttatcttttgtaacctttttgtagcagcatatgcctcctccaagctgctttgtaaaattttctcttttgattttttgagacatcatcttttcctttctaactcctacaagagctgtttttctgctttctgtcatctaagtaattttccctattaggcaacctttatagatttagagtccatcttttctcactccaagtatctgagagtcctctccttcctct

SEQ ID NO: 114601 - DNA, 1073 bp, Homo sapiens
tattacaatttttgaataaaatgtggtaagataaaattaaggtaatgaacattgctcacctcagatatttatgcattttggatttttgatgagagatccccaaagaccctgtgccagtgcatctgtaggactagactgggcttcatgaagaataatggaggcgtttcttgtgattaatcttcttttgtattagggactttctgactttgtagatccaactcatctggatcacctctttgggaaaatttggttgtagaaatgtgagtgtgtgctaatctgtgtatgtgtactttgttccctcaagtttgttgcatatctttatcatacttttttacagtgaggaacatttttattgtgacaaggtaataaattgtctcgaatgttttctctaaatttttactcatgatatttcaaaggtttacctagaaacttagacatgggttggcacctcttaggacagtttcctctccccagaggacatctgcatcctctaaatgatggggatgttattagaattgctaaatatgagccttggctgaatcagacaccgacaacaataatttcaacaatggaaattgccaccaggcactgaagacttgacaagtcactgcgacagagcacatactggttggaatactaaaaatacacatgggctgcattacctttatttcattttcctcttttagaataaaaattttgacctttaaaagaaaagggccagtcacttgttgaaaatagaaattgctggacataaatattttagatttctttcttctgacagtattgaaaatactttgtatgtgttgtgcttttttattgtttgtaaattcttttctttatataaaaaagaattttttccctcttattccaacatttgcttcaggtaggtttgaccaatatcttggattctttccacttgtgtaattataaacccaacttgttggtgatggatttgcttgtagatgcaactcagttgtaactttgtgttacttaaaaaaaattgttagtggattggctggtgtataattcttgttaacctttgcagctctgaattagtagatgatagttgcttg

SEQ ID NO: 114602 - DNA, 1166 bp, Homo sapiens
agtgaaattatttgctattaagtgtgtacagaggggatcctattatagtttgtaagaattgtggttttttagtgaaattcttagctattaaaatagcgtgtacagaggggatctggacccagtgtgtcctgtggattctgtgtacaaaataaacacagcagatgatctgaagggataaggaatatcttctgtgttccctgacaggcttcctggagaaaaaggaacaagcaattggaaaactcggtagaggagattgtctctattacagagtgtcttcattataacatcagatttcaaattatttctcacctttactctcccaaagaaattttcatattaaatttaagctctcaatagtaagaaggagtttactggtttttctttttggggggtttgctattatagcaatgcataggaccacatatttttcctataaatagaaatttctgtaaaataagaaatacttgttagctctaagactcaacagaattgttttaatttgctttggaggaagaattaaaacctattttttaggcctatgttcattctttatttttatttattgattttttaaccagatcctctgaagacactaaagtgtagttgtctctgaggacaaaaacaaacgaacaaacaacaacaaaaaaacttcaccttaccttgctgacctagctatgaagttgctcttttatggccttcctaggcatgaagaagttagagaaacttgtctttaaaagtttcatgaacgttcataaatgtacacgtttatttattagggaacatgatttgctgccaataaacgaaagaaagatttgtgtcaggactgagtgtgtagtctaagctaacatcagttgtaggaagtgagactcagaaggtgatgggtatgtattccacggatgcaaacactttttgagtttcctggcaggtgtaggcaaaaaaggaccaggctggtgtgatgaataatcacttccaaccctccctctgaccttttcaggcctccctctgatttgcctgctttccagcccaggttgctctgatcaactcacagtgctcgaatggcacactctcttctctcttcaccgaaaagcagaactttatcacatttcttccagaatagctgtttctagccaggtgggattaattggatggaggcttggttttataag

SEQ ID NO: 114603 - DNA, 2016 bp, Homo sapiens
gtgacacattgttttaaaaactcatttaaaattattgcagaactcacttaattgagctccttaatgtttttgattctttttaaaatttttaacttttaattgtgtaataacagtgtaatataataatttaactgattacttgggcgtggtgggtacacctgtgggcccagctgtgtgggaggctgaggcgggaggatcccctgagcccaggaggtggaggctgcagtgagaagagatctcaccacggcattccagcctgggtaacatagcgagaccctgtctcaaaaataaatacatgaataaattgaatttaactgtgcctaactatagtttaccatgccacccctttggggtgtgcagtgcagcaggcccagaaccccttgctttgcaaaatgcagctttttgtggtccccacacttgcctagtaaccgccgttttgttttgttttgtgtttgcttccagaactccaagatgggaggcaagctcagcaagaagaagaagggctacaatgtgaacgacgagaaagccaaggagaaagacaagaaggccgagggcgcggcgacggaagaggaggggaccccgaaggagagtgagccccaggcggccgcagagcccgccgaggccaaggagggcaaggagaagcccgaccaggacgccgagggcaaggccgaggagaaggagggcgagaaggacgcggcggctgccaaggaggaggccccgaaggcggagcccgagaagacggagggcgcggcagaggccaaggctgagcccccgaaggcgcccgagcaggagcaggcggcccccggccccgctgcgggcggcgaggcccccaaagctgctgaggccgccgcggccccggccgagagcgcggcccctgccgccggggaggagcccagcaaggaggaaggggaacccaaaaagactgaggcgcccgcagctcctgccgcccaggagaccaaaagtgacggggccccagcttcagactcaaaacccggcagctcggaggctgccccctcttccaaggagacccccgcagccacggaagcgcctagttccacacccaaggcccagggccccgcagcctctgcagaagagcccaagccggtggaggccccggcagctaattccgaccaaaccgtaaccgtgaaagagtgacaaggacagcctataggaaaaacaataccacttaaaacaatctcctctctctctctctctctctctctctatctctctctctatctcctctctctctctcctctcctatctctcctctctctctctcctatactaacttgtttcaaattggaagtaatgatatgtattgcccaaggaaaaatacaggatgttgtcccatcaagggagggagggggtgggagaatccaaatagtatttttgtggggaaatatctaatataccttcagtcaactttaccaagaagtcctggatttccaagatccgcgtctgaaagtgcagtacatcgtttgtacctgaaactgccgccacatgcactcctccaccgctgagagttgaatagcttttcttctgcaatgggagttgggagtgatgcgtttgattctgcccacagggcctgtgccaaggcaatcagatctttatgagagcagtattttctgtgttttctttttaatttacagcctttcttattttgatatttttttaatgttgtggatgaatgccagctttcagacagagcccacttagcttgtccacatggatctcaatgccaatcctccattcttcctctccagatatttttgggagtgacaaacattctctcatcctacttagcctacctagatttctcatgacgagttaatgcatgtccgtggttgggtgcacctgtagttctgtttattggtcagtggaaatgaaaaaaaaaaaaaaaaaaagtctgcgttcattgcagttccagtttctcttccattctgtgtcacagacaccaacacaccactcattggaaaatggaaaaaaaaaacaaaaaaaaaacaaaaaaatgta

SEQ ID NO: 114604 - DNA, 1051 bp, Homo sapiens
gggggatcttttttactctatctactaattcaaaaaaacattctcatagacacatctagaaatcatgttttatcagctctgtgggccttccttagactagtcaagttgacatgtaaaattaaccattatatcaatcaattaaaactcagaaacctaacaggttactgcttacctatcatcatatgtggtaaaaagaaatacatacattttaaatttggtaacattcttctaaaaagtagtctgttgtggaacactgtgtaataaagcaaaaatggaataagagctatggaaaggtggaaaaatgtcttactgaatttttcagagaattgacttacttcagctagtgtaaatgaataagtaaatccatttcttttcctcctatttctgtcacatttcttgtgagaatctgattcacattcggagtttgaaatggaaaataaaaatagagcactgtttgtgtcagataattactttccaaattctgtaactgaaagccagttgggactggaactgtgtttttgttcctgtgaaacagaaattctgtcatgtgcagctacaggatttgactgatattgctagaagttacctttccactcagcgagcatgagtgactagttcatccagttacaagtgatgagaaagctgctaaaggaaagatatttccagaaagttaacatatccttacataatacaattatatatgtaatacatttcttattttgaatttgcatacaactttatcaagagaaatcttttttctttctgcccctactaaatatgtgctgaacagatgtgtgtgtgtgtgtgtgtgtgtgtgtgtgtgtgtttaaaagtcgaattgcaagaatatcattaggtttcctaggagcccacacatctgtgttccgtgagtacctgctcagtgtcatgtctctggaattttacacatattaatatttactaccacacgcactgccactctcattttcaaatgaggaagccaactctttagatgtgctctggtgccgactgaaagatttatgtttctaatctcaaactctttcatgagctt

SEQ ID NO: 114605 - DNA, 1050 bp, Homo sapiens
atctttcaaaagaaatgagtctcaaaatgtattgtgaacaattatcataacatagctgcccagcatctgaaacactcctttatattgctgaatttctaccataaaaggattgatgtggctcatctcagaccacagaagaaaatacgataatttagtagattttattaatgttttcaattatccactgccttcactatgaaaagatttgcatctctttctattgtcaagctgttttaagtgtctctctgttgaatgagtttaatttcctgccccattaacatcatgcttggctttgtaacttgatatcatcaatgaaatgtgagcagaagtgactgcatgcaaggccagagccaaagatttcacagataacacatcattctattctttcaccctaggccttgaattgtgaacagataagaaaggaaacctcagttaacacaaaattgacatataaagtatgtaagaatatattatttttcaaagtgaaggagctatagttgctgcagcataatctgaaagaagctatctaatacacttactgtcccacctaaggcatggacatgtttcatgacttcaacccatcagatgcactgattccatattatgagctagaagctagtgataaagatacaaagcagagaatacgttctgttatcagtggcagctaggttagtcatgtgcattctccaggagaaaaagtatctgttgattgatgctggcaacgaagcaatagcgcaagctgtcctgtaaataaataactagatgcagggtttctgcagtttctgtggtatggttttggctgcagttccagtatcttttagctctagcatcccagacatttctgtgaaataaagatatggctctgatgactggaagagcaccagggtccttggtctcgcaccgacaggattaatgacacagacacacttggagtggttttaaggggcaaaaagtttaacaggcaagaaagaagaaagaagaaaatggcttccccctgtacagagagagtgggagaggggcttgaaacagagaggatccctgtgcgtggca

SEQ ID NO: 114606 - DNA, 1812 bp, Homo sapiens
ggcatctgtaactctgtctttcttttcattcacttcaacatcacttgtcccaccaaacttcagcacaactactccatctgaaagttttgccagccattcattcagtttttccttttcatattcactagttgtgacatctaactgcccaatgatttcttgaatacgtttttcaagttgagccttgtcaccttttccttttaagagcatggcatcgtctttggtcacaatgacctctccaacttttcctaagtcatgaggctgaacatcttcaagattcagggtcaacccctcttctccaaacactgcaccaccagtagcaatagccatatctttaagttggttctttctattgtcaccaaaccctggagccttgactgccacaacctgaagaccaacctttagcctattcaagatgagtgtacttagagcttctccatcaacatcttcagcgattatcaccaaaggcttatggtgagcattggcaatttcaagagcaggtacaatggactggacactagaaattttcttttcactcaacagaacataggcatcctggaattcacatttctgaccttttgatgtattaataaagtatggagaaatataccctcaatcaaacttcatgccttcaataatttctaattcatcattcagtgtttttccatcctttactgtgatgacaccctttcttccaacctttttcattgcatcagagatgatattgccaatttctttgtctccatttgcagaaatcatagcaacctgtgcaatttcttcaggggtggtcacaggtttagactgctttttaagttcagcaattacagcatcaacagctaacatcacacctctcctgatttccactggattagcacctttgctaatcttctggaagccttccttggctatagagcctgccagtacagtagcagtggtagtgccatccccagattcttcatttgtgttattggcaacatcttgaacaagtttagctccaatgtttttatatttatccttcaagtcaattgactttgcaacagtcacaccatcttttgttacgttgggacttccccagctctgctcaataatcactgttcttccctttggctccattgtaacggccacagcatcggctaaaaggtctacctacaccttgaagcattaaggctcgggcatctgcaccaaattttacatctttggcataagctcgagtgagatgaggagccagtaccctggacactggtctcatctggcgaaagactgtgggtaaccgaagcatttctgtggggcggctgcagggcatgcgcgcggcgagacaggttgtcggcggcgagtgagggacagagtgctaatatatcacttttaaaaagcaaataaatgtggcagttgtactataaatggaacatacagacatctgccaaattatgagagcaatacagccaatctatgtctggttcaaataacctgtttttttctgatttaaaaatcaatttgaaatactgataaagtaataaaaatacgtctttttgttaatttctatgattgctttacgtcatcctctgtgtgtggctgtgcatgtggcaataagcaaattaaatatacgtcacaaacatttggacatgagaataaattcagataaaatgtgacttccagtaatggaagaatcatcatgatgcatcattgcttaatttataatggcataacaaagaaatccagtgacaataaccgtctgaagctaaaatggtattactgaaacctgaacattggctctaattaaatactggcaatattgtttgatatatctttacaaatatt

SEQ ID NO: 114607 - DNA, 2127 bp, Homo sapiens
tttatctgaatttattctcatgtccaaatgtttgtgacgtatatttaatttgcttattgccacatgcacagccacacacagaggatgacgtaaagcaatcatagaaattaacaaaaagacgtatttttattactttatcagtatttcaaattgatttttaaatcagaaaaaaacaggttatttgaaccagacatagattggctgtattgctctcataatttggcagatgtctgtatgttccatttatagtacaactgccacatttatttgctttttaaaagtgatatattagcactctgtccctcactcgccgccgacaacctgtctcgccgcgcgcatgccctgcagccgccccacagaaatgcttcggttacccacagtctttcgccagatgagaccagtgtccagggtactggctcctcatctcactcgagcttatgccaaagatgtaaaatttggtgcagatgcccgagccttaatgcttcaaggtgtaggtagaccttttagccgatgctgtggccgttacaatggagccaaagggaagaacagtgattattgagcagagctggggaagtcccaacgtaacaaaagatggtgtgactgttgcaaagtcaattgacttgaaggataaatataaaaacattggagctaaacttgttcaagatgttgccaataacacaaatgaagaatctggggatggcactaccactgctactgtactggcaggctctatagccaaggaaggcttccagaagattagcaaaggtgctaatccagtggaaatcaggagaggtgtgatgttagctgttgatgctgtaattgctgaacttaaaaagcagtctaaacctgtgaccacccctgaagaaattgcacaggttgctatgatttctgcaaatggagacaaagaaattggcaatatcatctctgatgcaatgaaaaaggttggaagaaagggtgtcatcacagtaaaggatggaaaaacactgaatgatgaattagaaattattgaaggcatgaagtttgattgagggtatatttctccatactttattaatacatcaaaaggtcagaaatgtgaattccaggatgcctatgttctgttgagtgaaaagaaaatttctagtgtccagtccattgtacctgctcttgaaattgccaatgctcaccataagcctttggtgataatcgctgaagatgttgatggagaagctctaagtacactcatcttgaataggctaaaggttggtcttcaggttgtggcagtcaaggctccagggtttggtgacaatagaaagaaccaacttaaagatatggctattgctactggtggtgcagtgtttggagaagaggggttgaccctgaatcttgaagatgttcagcctcatgacttaggaaaagttggagaggtcattgtgaccaaagacgatgccatgctcttaaaaggaaaaggtgacaaggctcaacttgaaaaacgtattcaagaaatcattgggcagttagatgtcacaactagtgaatatgaaaaggaaaaactgaatgaatggctggcaaaactttcagatggagtagttgtgctgaagtttggtgggacaagtgatgttgaagtgaatgaaaagaaagacagagttacagatgcccttaatgctacaagagctgctgttgaaggaggcattgttttgggagggggttttgccctccttcgatgcattccagccttggactcattgactccagctaatgaagatcaaaaaattggtatggaaattattaaaagaacactcaaaattccagcaatgaccactgctacgaatgcaggtgttgaaggatctttgatagttgagaaaattatgcaaaattcctcagaagttggttatgatgctatggttggagattttatgaatatggtagaaaaaggaattattgacccaacaaagcttgtgagaactgctttattggatgctgctggtgtggcctctctgttaactacagcagaagttgtagtcacagaaattcctaaagaagagaaggaccctggaatgggtgcaatgggtggaatgggaggtggtatgggaggtggcatgttctaactcctagactagtgctttacctttattaatgaactgtgac

SEQ ID NO: 114608 - DNA, 1025 bp, Homo sapiens
atcctgccaggctcttaagtgctaacaatcatttcaatactctattaaactaaagtgttataataataggtgggaattgaacaatgagaacacttggacacagaaaggggaacatcacacactggggtggggagaggggggagggatagcattaggagatatacctaatgtaaatgacgagttaatgggtgcagcacaccaacatggcacatgtatacatatgtaacaaacctgcacattgtacacatgtaccctataacttaaagtataataataataataaaagcctaaacacacacacacacacacacacacacacacacacacaaaagtgctataatagaaacactgttgggaaatgtctatgactccgtccaaaagatggaagaattcaagaaaatcatcacaaatgaggaagtacctgagatgagtcttgaaggatgatttaatttttctagaagtggtagtatggggaaaagtttttgtaagccctgaggcttgaaacttcaaggtgagcctaggtagccatatttcagtaaagtcagatggtcagagtgtaaagccaactacttagagtgaataaatacagaaagtatggaaaggttcaattctcatacccagatgagtagcattcttaaaagtataaagacccataaaatgcctcgtttgaggattaatattaatggaattgcaattctagaatgaccgatcagacagccaattaaaagatgcattgaagacggggaaaaaggtgtagagatagggagagcatctgcaggagaaagttacaataggcttgtgtaggaagtacaatgaaggaaatgggaaattagagtagaatatttgaaaggtgaagagataatgaaaaatttcaagattcattgatcatggcaatgtaaaggatgagacaaattagagaaatattgtgaaggcaaaatctgcagaaattagtgggtaattgcatacagagaatcaaagaaagggaagaataaaaaatgacacagatttctgacttctgttttatt

SEQ ID NO: 114609 - DNA, 1050 bp, Homo sapiens
aagttagcatttacatgttctggggtttaagatgtgaaattatctttgtgatagtcaccatccagtcctatcacagtctaacctcagcccctgaaaatttatgtgaatctatatgcaacaatagccaacctatcccggcatacttggaagtctaaatccattatagcacaaactctaaatttataatctcctctatatatcattaacccagaagccaaaattgataatttaacttagatatgcatgagactttggatatgattcatcttgaggcaaaatttctctccatttatgaacctgtgaaaccagaaaacaagttatctgccttaaaaatataatggtgggcttggcataagatagatggccccattccaaaaggcagaaattgtaaacaatgaaaaggttaccagtcccaagcaagtttgaaatctaacaagacaaatcccattaggtttcagggtctcagagtaattaatcttttgtaactcacagctcctttctcttggcctgaggctcactcctgtgggcatgagattccatctgctttagtttctacacccattgctccaccagcctctgcctttgagtaattcttccttttccttgaaggttcacacacatttacagctgagtagctctatatttctgtttgttgcctgtagatttttgaaaatcctgcaattttctgtcatattatcatcttacgttccttttggtccaagctagcagtatgtctgctataacagtctcaaaaacctagtggttctcctgtgtgaatcacagtgattcatatcattagacgagagtcctccatagattttttttcctctggataataccatttctattctcagattataatgagatttaaaagtaaatttttaatttgtaatcctttggcagaaggttgtccagtaatatctttggacttctcttaacagcacacgtttccaacagtgaattttctaattgtagtattctttgcaatttgtacaggcttagaacctcttgagtcatcaaatgctggttgctttttgcttaatagttact

SEQ ID NO: 114610 - DNA, 1439 bp, Homo sapiens
ggctaacatggtgaaaccctgtctctactaaaaataaaaaatttaaaaatttaaaaaattagctgggcgtggtggtgggcgcctgtagtcccagctactcaggaggctgaggcaggagaatggcatgaacccacgaggcggagcttgcagtgagccaagattgtaccactgcactccagcctgggcgacagagcgagactccatctcaaaaaaaaaaaaaaaaaaaggttgggggggcttttcttttatgatctttttatgttaaagtgatttccttctattcctagtttgttcagtgtgtttgtcgtgaaaggtcaatttacattttaaaaattaatgtactagataccttattaggtatactttaatagacaggatgaaacaaagatgaagttttatctatttttttaagtcttaagaaaattagcaatgcctttaatagaaacataggccttaatgatacttcagaaaacatttccaaatcgcctttggataatacttggaatcatcactctctgattcagaattctctgtctctaatgagaaactccagagttaggcccggcatggtggctcacgcctgtaatctcagcactttgggaggcagacgcaggtggatcacctgaggtcaggagtttgagaccagcatcgccaacatggagaaaccctatctctactaaaaatacaaaaattagccgggtgtggtggcgtacacctgtagttcccaacaactcacaaggctgaggcaggagaatcgcttgaatccgggagagggaggttgcagtgagtggagattgagccactgcactccagcctgggcgacagagggagactccgtctcaaaaataaaaaataaaaataaaaaatagaagagagaatctctagtgtttggaaacatttaccaaccaaaccactgatttctcatcaccttttagtcaaacctccttggatggccttaagagtggaacagcgtaaacaccagaaggtaagtatttcccaaatcctattgacaagaaaccttcctcatggatccaaacacaggtaagaggaggagaatgtacagactatcataggaactaatgccttcttttcctgatctctttagcacagtgtctgacatcatcattattttaagagttaataagaacagcaacaataattgctaccatggtgttattttctcagtattttcagactctattttaagcattttacatgaataaactttacatatagttcctattcaactttatatatagtacctattaagtagatgttgtaactatagccattttacagatgagaaaactgaggtataaaaatgttcagttatatccctgggatcacattcagtgttggtgcagtctaatccaaaactccttctctaaagcacttacaagatcattaacacaagatcattaaaagtttcatagttttat

SEQ ID NO: 114611 - DNA, 1008 bp, Homo sapiens
gcactttgggaggttgaggtgggtggatcacttgaggtgaggagttcgagaccatcctggccaacctagtgaaaccccgtctctaataaatatacaaaaattagctgggtatggtggcacatgcctgtaatcctagcttctcgggaggctgaggtagaagaatctcttgaacttgggaggtggaggctgcagtgagctgatatcgtgccactgcacttcagcctaggcaacagagcgagactccttctcaaaaaaaaaaaaaaaaaaaaaagcatgtatgccaatttctggatcaggaaactaaagagaattagctaacaatacacccttattcaagcagacaagcagaagtggtacaggaactaattaatctaattccaaagccaaatattctttccaggatatggcaacatgcaactttgacatcattttcttggttgtctagatatatttttgccaatcgtctctttgttctgttcccaatcttactgctctattacctcattttccagaagtgctttgtccctctgtgcttctctacatttccccttctatcaaaagtctactagtttatggaagattccctccttctctttgtaagcccttacccccttctttcacagatcttgttgattctccagctagtcttcccaagtattcctcctccttccctttgacttacatagaacattttagagaaagttgaaggaaagagccttaagacatgggttagagtcccagattcactactcacttagaccttctcttttccctctagtatttagacactctaggtattttcaaggtttgaacattaactagagtcatgcatatgaaaacatgttgcaagccgtaaagaactaaagaaattcgtgttgtcttttaatatgtgactctcacattaaagggaatgcccaaggcgtcattcagtaatgaatctagtttgaaagaattgtcaagaacagcaaatttactgaatgcaagtggctcagagcaggctcagaaacc

SEQ ID NO: 114612 - DNA, 1053 bp, Homo sapiens
agatgtaatgtgacctcaagaaatatcttccaaatgaataaatgcatgaatgaaccattttgtaagtagaaatgttgggaggttaatggtataatgagaacagccagaaactaatattaaataggcatctgcagtcagtgtgggtgtggggtctaagtctctctgaagcagtagttaaagagggggacactagagtatgtagaaaggtagatgccaatttgatggtagatttcacattttcttatgaaacaaggacaaacaccccagattcccaattttacccgtctactcttctccaacctagaactcaggaagaaggagactgaaagaaagatgtatagcctgcgagaaagaaagggtcatgcatacaaagaggtcagcgagccgcaggatgatgattacctctgtaagtgacacttttggccactcacacagcttgctgttatgtcctggtgcaataatttcatcatttggcccacaaatcattcccttactctaatgaattagagtacaggattagggctaaataatgtgaatgccaagctctttctgaagctcttatatcaaggaacatgcattacaactttcctaatctctgcttccctcacttccagattgtgagatgtgtcagaacttcttcattgacagctgtgctgcccatgggccccctacatttgtaaaggacagtgcagtggacaaggggcaccccaaccgttcagccctcagtctgcccccagggctgagaattgggccatcaggcatccctcaggctgggcttggagtatggaatgaggcatctgatctgccgctgggtctgcactttggcccttatgagggccgaattacagaagacgaagaggcagccaacaatggatactcctggctggtaagaagagcctgccatttcccctgttctgtcttcccacatcccttctgtgcctttggtggggcataatcttctacatgttagtatataggtaaggataacatggttagctctgtgtactcaaggttctttgcatgaacacggaactcctatttagagatcagagg

SEQ ID NO: 114613 - DNA, 1044 bp, Homo sapiens
accatattaggtggttgcaatacattgctattgtctttattagggaccttgaatatgagtaaaatttgtgtgtggattcacacctgacaagctatgctgagttttctcttaccatcctagcatgactatcagaccctctttagtgtcttaggcatcatagagaagaatctaagaggtacatttcccagaatcctgtccttgtatggacctgggttagtgttttccaatgcagccactttctcaagatttgggaggcagaagaggagaggacatttttttctgaaagcagatgcagccagatgagtagacagatgtgacacctttagaaccaccctaatcccctgctcatggagatgactagtagaggatgctccaatgctggtgaaataaagcatctttttaaagagactttgcgaacttttttcacattcctatactagatataattaacatatcggatataaactccaaagcaattaaaatttattctaatcatttttgtgtctttacacaaactattttaaaatattaaagatgtggacatagcctatgttgcacatatattagctacatccaatctgttccttaatattgtcataattaatgaaatcatgacttttaatattttacaactgtgaagaagatatagaaatttgaatacattaaactgtatgctctgaacagatatagactttggatgaattagtaggtaattttgttgtttatagacaatagcaatatcaaggatcttttttgtctttgttattatttttggcttaaatatttgttttcttgtttatactaacctaccttaaaacttctgaaataagtaatataacagaatctcatttaaacataggtaacttgagtctggacattttattttattctttattctgtgttgttttcctctgtctttgttaaaatctctggagtctgaatgtatgactgggcttctttatgaatacaaatatttagcatgtctagggcagtctttctagtccctgtatttagagagagctacctcactgtggatagagatgc

SEQ ID NO: 114614 - DNA, 1052 bp, Homo sapiens
atattagcccatcatgatttgaaactcccggataaaacaacttataatgaaaatgcagggagactctcaactgtagcgattttaatgctcacctctattattataataataggggtctcaaatggggctgtggagaacagtggctgcccctgactagaattcaaccagaaagatcaagagagagccctaattgcctttcttctcagatcaaacaattgacttaattctccgggcctacacacggaaatgtgtttgaggagattcaaataggttactatagaggattaaggttttctctgcagattatacttttatgccctgtagttcattgcttgaagtgttaagtagttttgtcaaaataagcaaggctggaaggatttttagaaacttacaaatcacatactcttgctgagtaacacaagggacctctgtttttttttttcctctccctttaaaaaaaaaattaatggttgaggcgtgaaggtggggagaaattaaccatgttcaagattagttggaaatttcaagaggcatctcagataagagaaatgcaagtgtggtggtttattgtgtttcctctcttgaaaattgtttcatgaatgatgcggctgaagaagccacataaagagaagggattttcttgtgaatgcttaactgcctgaagagaaagtccgaaggggatgtgaaatccgacccttgaggcttctctgcagtgccgtgctcatcagtgttattttactcactaagacttcatttctgcttaaaggagttggtggcagaataagctttcattctctcacaatagattattcccaggaaagggcacttgtcgggaagtcatcagtgacattctgtccttggtgccacaggtggccgttgctcagccaacttgctctgttgttctccccgttcccttgggaatgcgtccttcctcatcaaaaagttgcccggtgaatttacctactgcagggaacagtggcgatctgtacacctccctccactttttcagccctcctgggtccatcgctcttagtaaagctacatgaagaagc

SEQ ID NO: 114615 - DNA, 1039 bp, Homo sapiens
ccacactttaaaccaagtgctctcaccctggggttagtggaacctttaagaagttaatgaacagacttcaaggaagtcaaaaacctcccaatactatattcaattttctgtgtgtgtttgagatttgagagggcatggggagcaggaaggaggagggtttatagcttttatcagcctctctaagtgggccctgcagtaaaaggctaacatgacattcaaagacataacattttaaaaaaagttattccaaactaaacatcactggtttcttattaataaaggcaaaacttctttgtaaaacaaatctgtttcattcatcatttcagcaaatatatagtgagtgcttcctatgtatcagacactgttctagcctttggggctatagcagtgaacagaacaaacaaaacccctggtccttgaggagcttgggtgctagtgcaggtatacccacaacagaccaagagcccaatggcaagaaataaagcaggaacttgtgggtgcagttttcaatgaggtgtttgaggagttctccctaaaagggtattatttaagatgggaaagaggagaggaagtgaacgcttcaggtatctgggagtgtttcttatataaatattaaatattacatatgtattatcaaacatttgaaaaatgggccaggcacggtggcttatgcctgtaatcccagccctttgggaggctgaggcaggcagatcactttaggtcaggagttcgagaccagcctggccagcatggtggaaccccatctctactaaaagtacaaaaattacccaggcatggtggcgggcgcctgtaatcccagctactctgggggctgaggcatgagaatcgcttgaacctgggaggcagaggttgcagtgagccaagatcgcgccactgcactccagcctgggtgatagagcaagactcagtctcaaaaacataaaaattaaaataaaaattgaaaaacacattacttttattagcaggagaaagaaacaaatgttgcttagaaactattatggaaaaagtagaaagcata

SEQ ID NO: 114616 - DNA, 1035 bp, Homo sapiens
ttgctcttttctgaatctttaattcttggtaaataatggtgtgataatatcatttgtttgaagtttttagtttgagcttttcaaaaactgtgactccattttactgtatcctttcatctctcccagaaagtcacctgttgctaggagagtgatgctaaagcacctgcttggtaacattcccaagccacacgtctgtgttttggcatttctgtatgttcggtgcctgctatacccaagttcacatcagatactgaaatttacaatcaggggcactcatccagacttccattatgtttttgagtgatgaaagaataagggaagaaaacagttttctatcttgtgccttataaaatacaattatacacatttcatatgcacgtatatttgtatgtgtatatgtttagttgcattattctttgcactagattattaaatataattttattaaatataaaatatatttccttgtgtcagataattttccccagatggcccatcagaagcggttcatcgaacggaagtacagacaagagttaaaagaaatgaggtgggaaagagagcatcaagagagagagccagatgagactgaagacatcaagaaataaaggagggcatgcaagtgtggagtatttacttgctcagtaactgtgactgttgtctattgagacctagcctagttttcctgcagacaatgaatgaagtgtgctcattgaaataaaatacagagtcaaatcgctattgttgttttaatgatctgtttttagctggatggtctttattacaaagtattagatttttcttctatttaacggaaaacttgactttggtgaatgtgcattacttccttttattttgctctttaaataataaaattcaagaagcatattctatgtggaatagatcctgtttttccatctgtgtcccagattgtgaccctagactttcaattgacaagtaaaaaattgactttactagacattttgactgtgctctagtaacatctatcctttttcaaatctctggatttttaagtag

SEQ ID NO: 114617 - DNA, 1920 bp, Homo sapiens
gagtgggatgcgtgggttgaagaaacttcaattacatgattgaccttgtaggaaactgcatagtcttttgtaaactgaaggcttaagtgcaagggatttttcttctgaggtctgttgtgctgcacagcagaacctgtgggcgcaacatgacagtgcaattctattatgcttcaagtaccctgctaaatgaggtaggagacagcaaaatgcgggaagctaaaagtgaagaggcccagaatcctcaggcatgggagagattccaggaaaggcaagcaggccaacagccaagtggaaatcagcaaagtttcctgttcaggggcagggagtttagtgggagcagacgctgatgctgccagggtccagcatccatggattcttcactgagagttttaagctggctattaggaacttcatccattgtacatataaatttgcaatcagagtgaaataaaagtgagattccattttttgtttgttttcaactataaaacagtactggagagatcacctattctgagacaggcctgcatatccatactggtaggagtgagttgtttaaactactggaaagcaatttggcagtatgtagcagttccttaaagaagttcatacccttggtaggccaagttggaagacaaaaaattaaaaaaaaaaaaaaaattagccaggcttggtggcatgcacttatagtgctagctacttggaaggctgaggccagaggatcacttgagcccaggggttcgaggctgcagtgagctatggtcatgccactgcactccagcctgtctcttcccctccccgccaaaaaaagtttataccatgagaatcatgacaacttgatttatagtagcagataaaaaaaacctatgtgttttagagtaggaaaatgtttaataaattgtggtatatcccaggggttaggaaacatttgctgtaaagggccggatagtaggcattttagacttcccagaccatataatctctgtcgcaattctccaactctgccattgcagcccactggcctggatagtgtgcaaactaatggatgtgtctatttaatgggtgtgtctgtctgccaataaaaatttataaaaacagatagatagctgtatttggcctgtggatagtagtttaccaacccttgctatacccaaatgttgtatgcattacagtaatggttttaaaaactaatgatatgggaaaatgcttatactagaataagtgaaaaaaagtatacccatgaatacatacctatattgtactttcccaatgagtaatgattttaaatgttcaagtgtctaggtgtatgtgtgtgtgtgtatatatatgtatatatgtatgtatatacacatttacattgcatatatatgtagtacaacttcataggaaaagggctataaggatatatttttaaagttttatcaatagttaaatgtgaattttgtttttcaaatgcaaatttgattttacagtagagtttattccggaaatagagttcattttgtagaaacttgctttacagcttagtggggtttgtttatttttgaaaaaagtagttatatttgaaacctacataaggaatcaatttgatcagttcaggaataggattttattactgttttatttccaaaatacagatgtcatgttctttttttgtttaaaatcaatctctgggccgggcatggtggctcatgcctttaatcccagcactttgggaggccgaggcaggaggccaggagtttgagaccagcctggccagcatggcgaaaccccatctcgactaaaaatacaaaaattagccggttgtggtggcacacgcctgtaatcccagctacttgggaggcagaggcagagaattgcttgaacctgggaggtggaggctgcagtgagctgagggactgcgctccagcgagattccat

SEQ ID NO: 114618 - DNA, 2035 bp, Homo sapiens
tcagatgtttcagaaattaaatacattttctgatcttttagataagatacagacattagaaagaatccataaaggatgtgaaagcattcagatgtggcttgaagtgtattaccccaatatttattgttttaggctgtgattagcactgaaaaccaatagacaggagctcttaacttttcatgataaaagtttgtgaatatgcacacttagaaattctttgaaaatattttacacttcactgttagccttttgatgttatttatattactttgggaagaaatattaaaatacaatgcagaatttttaaaaatttctatttcaaatgctctcgatatttgtcggattagcaaatcaaaaacttaactctttttacctttctgccattttcacatttcctgttattttacttaactctgtctaggcactaagtacatggttttcctcatagttacatagtaaccatgacaaataacactttaccataataaatgttctttcctttccctttcaggactctgcagacagtgggcccatcccatgcccgaacctacactgtggctgtttatttcaagggagaaagaataggctgtgggaaaggaccaaggtatgagaagagaatacctggaattgctttgaatgaacatcctgtgtgtctaattccctagctgctatctccaaactcagtcatctgtcttttttaactcagagaataaaatgttcaagagtagtagcaaagtgaattccaggaattaatgtccccacattaattgtctcaaagccgagccctggaccatgggaataccattgtgtaagggggctttagctatcttgagaaaaccatattacctggcaagaaggtctgcctagttttagttacccagagcacactttgatgcaagctgtgtgtgtaagatgtgtcatgtcgcacatgacacgaccattagacttttatttatttttttttttggagacagagtctcactttgtcacctagtctggggtacagtggcatgatctccattcactgcaacctctaattgtgccttggctactcgagaagctagtattacaggcatgtgccaccatgcctgctaatttttgtgtttttagtagagacagggttttaccatgttggccaagctggtctcgaacttctgacctcaagtggtcccaaccccccctcagcctcccaaagtgctgggattttaggtatgagttcactgtgtccagctctgttagacattcgatttactactactcacctgagctgtatggaaacgctagcatctttaggtgaaaagaattatgtatattatcacctttctttgaactctccagtctgtatcttaaactgagaaatgatttgaaacctgtctgtatttttttttattcttttcctctttaaactttacagtgagggtattcaaacttaagtatgaaatacttcagacctaacataaatggaaggcattttattgcagtattaaagtgtggagtgaataacttaagtaggctttgtgcaaatcaatgacatttctgcatgctcttgtgtatattcctatctgtgcaattcagtgtgtgacactgtaagtaatcagaggagattttatgcactgaacgtgaaaatcagcctgaaagatttgtagccataccttgcattttttgaaaaaaaaaaaaaaaaaaaaaaaagaatcttgaaattaaagtatgtcttactttattttatttaatagtattcagcaagcggaaatgggagcagcaatggatgcgcttgaaaaatgtaagcctgtttttttttctataattatgttcataatgtaatgagtgttttatggaaaggaaatgaggaaggagaaaaatggtaagtattgataaaatgtgatcttgttttcttcagaattattctttacacagagaatatagtagaatgtgagacattctaaaatgggcttatatttaaaaataaaagtattcctgagtgctttttgatttgcagtttccttttttgcttagagtcctaatctcagcgcgggtg

SEQ ID NO: 114619 - DNA, 1591 bp, Homo sapiens
tttttctctttttgggcagattgaatctataaattaccccatttctgttcattaaatttaacatagaatccttaaaaacaggggatctcaggattggtgttgaaaatggcaagacccaagaatgtgcgtattctggcatcatatctaatcttcaagtaatattttgacttatttgatgtgaacagggttgggtgctcagcattttttccctgatatacagcggcattctgtgtaccttttaagctattcctttagcccttagctaaatgcagtttggtgtttgtactctatgatttgcatcttacacatctcttgctgcttctgatattaatgataaaaagtgggggaagatgaaatggtagcactgaaaaataaagagggcctggaagttgaaactattactaaaattttgcttaaaggtctaggtctcttactctttctgatagatggcagtgattgtggtttattttaaagtattcttttttccccagcatttattgcagcgctgtacattgataaggatttggaatatgttcatactttcatgaatgtctgcttctttccacgattgaaagtaagctcatataaagtttgaattagtggtctgctttatgtttggtgattccagaacccattactaaatagttttgggggacttccacaggagttcattttgaatcaggattggaatgaccccaaatcccagcttcagcagtgttgcttgacacttaggacagaaggaaaagagccagacattcctctgtacaagtaagtacttgttgcctgcaggccattggttggatccagcatgcctaaaattgactttccatgtgccttgaagaatgagtcattgtggggtgatcatgacaggagcccaggattgagacttcttggctgttagtgtgactttgggccccacagggaaactcactggggctctcactcttagctgtaataagtgggtcccactccattatctcaatgttctctcccatttctaaaaatctctgtgaactactgcctgggagggagaccaactaagattatgagattaaaaagaaaatttggattcagtggtttttatatacatttttatatttgtcttcttgcttgtaacttctgctgggctgtgcatccagatgagaagatcatgtatgattatttgtagcgatatttgggtacctctctgcactttccctgaacccctattggcttcaacttggaacttttcttctcagaatgtgtgtcaaaagccatcatgtactttgaatatctttatcctttgagtggtagccaaaagtcattaaaaaggaatgtaggtgagtaatgggtcactacaccacttaatacccgttttgatgaaaacaggaggttcagctctgaagtagagtaattatcttgagacacacataggttgattaagaagatgctttcaaagtggaattacaaaatgaaaggattattgaaataggtgggttgcatctcaaggtattgtctgggtacatgattttaaggatgtttaaagattgtttcaaaactgtttcaccccatgtggatgcatacacggttgcaagcacacacatctgtgtgt

SEQ ID NO: 114620 - DNA, 1047 bp, Homo sapiens
aaggattcactatcagacactaagaataaatcttgattttcataagctctgttgacaccatggagccacagagcataaaacttgcatctaataaagaaagtgcaacatggaacagcagggagtggaataccagcacaactcacagctgcttcctgttcctcgtccctgttttcaggaatgtttcttagcaggaagttttttaatagaccgagaatttgttatatgtattctaagaaaagttgtagttgtagatgcattactctcccaaatcttagagatcagggatgattatgttccatttttgtttggtgagttcccatctttgtatgtacctccttgctcccggctgtcctcctctcctcttccctagtgagtggttaatgagtgttaatgcctaaaccatacttgttttatggacacttctataatggattcgttgcataattttcatgcagtgtatagtgttactagttggaaattcttggaggactcttagctgtctgatgaaattcctagtagaaatttttgttttgaattcctaaagttgaaatatgaaaattatattttaatttgattagagacaaaggataccagtatgggctgggcgcagtggctcacgcctgtaatcccaacactttgaaaggtcaaggtgggtggatcacttgagctctggagttcgagaccagcctaggcaacatggtgaaaccctgtctctacaaaaaatacaaaaattagctgggcatgttggcaggtgcctatagtcacagctactcgggaggctgaggtgggaggatagcttgagtccagaaggtggaggttgcagtgagccaagatggtgcaccactgcactccagcctaggcaacagagcaagagcctgtctcaaaaaaaaggatatcagtatgaaaaactgagactcaagctagataccataaatctttaaaataataataaaataaaaatgtaaataaataatttaaatcttttcatagtatttacttaaacctcacttaagtcctataatatcaaaattagcatcagtgccgtga

SEQ ID NO: 114621 - DNA, 1048 bp, Homo sapiens
ctatagcggtgatgaacctacagtttttgtttgtttttaatgatttgggataatgggaaagagagcaaggattacagataaaaagctcaagaaccagtgatctaatcctgccctgatgcttccacacagcactgagcataaatcattcagacaaacaggtattttatctaaaagatctcgttgagaagatagattacacagcctcctgtatgaggatttctgtcactgacataatttggctctttgtatctgacctgtatttgcctgctagcatttatgtaccttttctttagttatcacaggaaatggagaccatctggcgaccactcttgttataatagagctgtgtggcatattattgtcactttcaatagtatattctgctttcaccccgtgttcttatattaagccctcaaaataataaatcacagtctgcttaatttacactaggtgtccctctttggtagctcatcccccagctgtggtttttcccttcagattcaagagtgaaattgggaacttgaaggaagattgtcaatatgtatgttttatttaaacgaataaatctttttcttatgaaagtttaaagtaatgatgaaagactgctatgctggcataatagaaaacatcctggattctcaataccagagtttgagatctgggatatttacattggtctctgacattgcaccaggaattcagcagtcctttcctcaggtttacagagagctttaattatagtcttcttagtcatttctggtgatttcaaattaaactttgtctttttggaagtattttttttaaagttgttgatgacaggttagcacctggtaaaatggggaattttgaggacagtgagtggacaggacgggtatccaaaacattttacattgaaaacaaattcagaggaattcttagaattttctagaaccttttcccataactgaagagcaaacatattttgtcgaattatgatgatgctgttgtgaataacacagcaacagctaacatttctgttgtgtttatcatatgccagtcattgtagtta

SEQ ID NO: 114622 - DNA, 1632 bp, Homo sapiens
catttgtaatgacccactgtaaaagcatgatctcataaacataagatcttatgaagacgacatggggcgttttccactccatcttaaaatagctcatatgataatgaattagtgcctaaaatgaaggacatttgaaatgagttttaattacaaaaggcacagctgatgcacatttctggacaatggtaagaaaaaaatatgattaaaagagcagcttagtgcagtgtattaagttaaccaaatatgtaacttagttttaaaaggtgtctgacttctgggactagaggaggctcttttcccccgtagcttaataggctaattagagtcactacaggcggtttgagtggtgaatacacttaaaaaaaaaattagtttgccagcactgttgaatttgccataagtggagtcagtgtctgaaatagttccgtatttcaaataatgacattttatttagtactctagagtgcgttaaatggctcccttgagcattaaaggcatcactccattttccaggacctgcgcgaagtctggctcaattatcctctccacccactccaagtaagtatgacctccctgtctgcagtgagctttataactccagctattcatgttactttcctttgcctttttttccttccccacttttatcttttgattctcttcggtggcattgtgcctttaagctgaggtgtcagacctggaaaactttggaacaataggagaatgaacccatgcattgtgtttatgtggtctggaatagggtagggggagcattgggagtcatcttccctcagtgaggaaggaagagctactgtgtagttatggatgccccaccaccaccaaaaggtgatattgaaagcataaaatgttgactccagtatatctacacacttgcttttgcagggaaagtgttaatagtatggaagcgagtctgagcatactaaaaaagtagaacaaatactaaattaacattgttaacgtatgatctaatctggatcttagaaattgaaagcttcaattcagagtgtataaaacctgtaaattaaaaaattagtatagtgtgatagcttttcactcaagattttggaatttaaaagctctacatatggtggtggcacctatttccccagatggtttaagaattcttactattctttgcctttatttctgttttactttgggatatatgcatatatgtaaacatcatatgtatcctcatatacttatttttatatatgtatataaaataaatgtaagaagtggttgaactctcataagaggctttacagtaagaaatgacattaattcagagtactttaaaaatattttattaatacatgagtgcccaaagttgttgcaaatgttcattttaatcacacttttcatatttgctctctaccagttgttaaaggctcattgttggagcaccacctgtctagtggtataataatctccaatgtacattgaactctgttttaatgatgctcattgccaaaataagttggtccctagaaaacacagtagtaaattactttaatgcagtagtttttaaagggcagacccagaccagcagcatctgcatcacctgggaacatgtcaggaagacggattcccagtcttgattccagacat

SEQ ID NO: 114623 - DNA, 1876 bp, Homo sapiens
tgaaatgtcattataattgaatgaaatagccctcatggagcaataaagaacacgggaagccagttttaagcctctgtgaaaccttcagcttaaatggctgtcagacgttattactgtattactttgggtagtttttttaaaaaaggatcaatagttttggaaaatatgacctggacaatgttcatatctgagaatttgatttttgtatttgtttttctagagatatgtgatgatttttatggatgaatttcctccttatgggaagattatctacagatgctctgtgtcccccatttttgtcctgcacatataaacacatgtgcatcttgatttgcatctgtatcagatggtgtgtgttttaagaccttttctcaaatcttaaattttctttgttctggccttcaccttttgtgggtcatttcagcaacctctttgctctctttccttcctgcagtcttgtctgtgtgtcccccagcaccctttagactccttcccccacccccacctcctccctgtcctcttctcccatcttacctgcatcccccaatccactgtgttctgttgttctgttttgctgcagttttctacttgtcttctttaattgcatcagtctgtgtttagattcttttctctttaaactgcctctctcccagttgtctacttagtgagcttatcttgtgtttccagtacctagtgcaatgctggcatgtgcagcgtttaatacagatttgttagaagagtgaagtgaataaatgactggattaaaagcagagtgtgaacattatcttacaaacagggtggttgagattcagaatttgttttagtgtgtcttttgtgaaactgcataaggctcacaatgtatgggttttcctctttagcattttgaagtacacaaacttggacactgactcatttgacatctccatattggtttccacctattagttgtagcatgtgagagatgttagtgaaccaatgtacttcttttttgaataaggcatcatgaaagcctaattagccaaagacagccagggacaaacctgtaggcaacaaagtcaggttgattggctgtgttgtgggggtggagagagacatcctttgtgaggcctgggctggtgctgaataattcttaggaggttcttggctgtggccagtttaggagcagcaagagattactttgggattgggtgccgtcccaaggcaagggcagcttggcgattaagtatctgcggtgatccttagtcagagggtcataatggcattttacagcagctgcaagaccttgaggaaaacattgtttcctgttcactttgctgctggctttatctgtgtctgtcttctcagccctgtaaacagcagggctgtttttttctttttcaccctcaactgagttttactctttcagccccagttttgctggttttgtattttggtctttgtgtaacccttcaagtttgacccagtacattcagatccattgtttcattttgattatgttaatggcccgcttagaaagctagagtggtgttaatgtgatttttcctatgcccctgctttccacaccttttctctttacacagctgtcccagtacctctgactcaggccttttctctggagctgcagaaactggaaaaagtgtcttttcaagttgcctctgggcacctcacaggtgtttcacagatacctcatttcaacatgtgtaacattgaacccatcacttttaacccccaaatgtgttcctccttccttatttttatcttctaaaccagaaaccttaggatttatttttgtccctaagctttcttctcctcttatctgatcgattgcaagagtctatcaattctgaccctaatatttcttgaattgctaccctac

SEQ ID NO: 114624 - DNA, 2262 bp, Homo sapiens
agatgaaatttacatattctagtataaactcttgcactttgggatcaatttttaaaaagagatattttctgctattgcatttgcggtagtcaaaactcatttgagtatattttataatcacaaatttcaaacagtataaaatactacagcatatatgtcttatttttattgtctttgtgtttttccaatatgaataaatatggatatttaagatacatactgagacacacagaatctatgtcttttgtctgaggactggtggaactcatattgtcctaggctgttcattgacttgtgatttgttccatgttatgtggcatgttattgcttagtatttattgaattgaattacatggtaatggaaatggatttattgcatatttatgcaatgtttgtagctttcttttttatggaaagaattatgatttccatttattcaatctcaggagttgcataaaaaatattctttcacattgtgtctagttctaaaaggctggaattgatttgtatgttgtaatgccatgggataagaaataagcagccacagagatcaaagtaaaggaaaactatgagtaagatagtgaaatgaatccagaggtaaagttagtatacactgacgtattcatcagccctacacctacaactgggctacaaatttggctctaaactcttctgaggccaaatcagaaaaggaaacacaattcactacaaatgctattttcagagcccttaagatcaatccaattcattgcttagaaggtctcagtgaacccacagagagatgagtatggaaacctcatgagggggacacaagtgcagaggggtccccaaatcgtcacaacaaataaaaataaagatttagaagtgtaaggcattttgaagtcttctgagggtcctcacttactctaccacataaaaatctattttgggccaggcgtggtggctcacacctgtaatcccagcactttgggaggctgaggtggctggatcacctaaggtcaggagtttgagaccagcctggccaacatggtgaaaccccatctctactaaaaatacagaaattagctgggtgtggtggcaggtgcctgtagtcccatctactcgggtgggtgaggcaggagaatcgcttgaacccaagagttggaggttgcagtaagccaagatcataccactgcactccagcctgggcgacagagccagattccgtctcaaaaaaaaaaaaaaatctgttttgtatggtgctgacattgtcagtaccacatgacttgagtcaaagacgtaaaattgactttcagaagtttgtgttaggtttgtaattctctccctaggcatattggatgaacccaggggcttgtagcagagtcttattccagcctgggctagtgcttgatctgaacttggaattggaaagttcagatctgatcaattctgaaccctacttgaactattggagtttgtagaagcctgtttgggaaagaattgagttagtgaaaactgagctgtatgtataggacttctaatgaatgttaaactaaactctctcttaatatattcatggatttgtaaccattacgctgcccccatctcgtctccgcaccaactctctgcaagagatgctgagttactatagttaagattttggcaaactctttcttacgttttgtcattgtgaattttgtagaaacttgaactggatcgatttatgctgtatgctcacgggcctgacctttgtagagaatcggaccttcgacatgcaatggccaattgttttgaagcgttaataggtaatttctctcttcttcaagaagtctactttcttgcatgtctaaacagtctggagagcacataaaatttagtgtggaaacttgggacagaattacttgttcccaaagcacatgaggttcctaggacgacacctaccaccttatattatagttatttcagttccttcagagcagtgaacatgcctctttttttttttttttttttttttgcattctactgcctgaattggtgtctggtgtctgatgtcatgtagatggttagtatttaatgaattgaaatgaggtgagttaatatggagatggattactttccagatttgattcaggatcacatacataaacaaacagattaggttgctgagagactccagtgttgcttttgattaaactatttgtaagatttctgttttaaacatcttgagaacaccacatcttttaagccccacccagggtttgagtctgtataactgttattgat

SEQ ID NO: 114625 - DNA, 1130 bp, Homo sapiens
cattcagatatactgttcttaccatttaactttcaaagactttaatcagatcctttagtttgattcacctgatatccattgcacagctactgtgtgccagccctgtttctgtgactcagagccacagacagaatgtcgtgatgcatatttattcatgtacttctttttttttttgtagcgtccatttgtactatttgtttcctagtctggaagaaggaggattagcaacctatcggactgccattgttcagaatcagcaccttgccatgctagcaaaggtatagaagacatctgcagcatttgtagttacgtctgacatgctcttctgcggtccatgcataattttgcatttgaataagtaactcgttaggatatattaggagtgttaatattttacagaccaggaagtattttttgttgggttttaaggatccagtcttattagttctgttacctttgtgagtttcaccagcagctaatgaactccacagtgaggtaacttgagaacagatgaagaaaaatttgacagatgtgcatgaacagagttaaacatttggggaaaaggaacatgggaacaaagcaaaagaaatgaaatatactgtcttttccctttgtgtagtatttctgtagtacatttgtttttaatttacattaacaagccaaatgatagctttgaacagaatattacagaccattttttatccactaggggtactttctacacctttgagaatcccccaaatcacaaatcctattaagatttagggtttaggctgttcccctagcctcattgacttagctcagtgactaacagaaccttttcataattcagataaatgtgatctgatttgatgtttccatctccatattatgtcttattataataaatcatggctgataagaacattccagtccacactcctcctcttacaaacaggtggccatggacaaattgacaaattgttgttctcttctccaagcctctgctttctcgtctgtaaaatggaaatgacattagcccttggcacacagcctggttgtgagaattaaatgagattatgagttttaatgatgtcatttataaagtgctacgcataatacttgtttatagtaattacacaaagatgtta

SEQ ID NO: 114626 - DNA, 1103 bp, Homo sapiens
attctgtgtaccctcactggatttggcctatcccaagatggctttccttggagtgaatggcaccttacagtacttactgttacagggagacggttgtgttttataaagtgcattgaattcctcagacaaaatgtgctgtataaatgttacagttaatctagatttcataatgcctctgttgattcacttcttaaaaacaaatggagtgtttactgctcagtaaacatctcatcttggatcctgctagtatttataaagagggtgattaaagaaagtctaaacaatgaaagaaggaacaaaagatttgctactgctgtgaggactagcagcccactcttcccatttttccagataaaccgttggcttaggaattgtagagtataataataaactaaagtggtatttaatccccattcttatttatggcttattgccagagtttagtcataatgtagatacagaaaaacatatgttggatttgggcaaattatttaataaatggcagactctctgttgaataaatctgtttagaaccatgaccttgtatttcaacaaaatgaataataatccaactttgtggttattaaaaccttagatgtagtttttgtctccatgaaagtttataaaagaaattaaggtaaaacttatgccaatatgacttcagttaaaatagtatatgacttcaagcatatactaaatatgacttattgtcatgtttgactaaatgtcttattattctttaaaaatgcattagacatccaaatatggtttgtccccagctcctttgtccccagtttcttgctttccatgtgaagatttttctgtatagtactttgcactattaggaagaagataaagcctgtgccacagaaaatgcatttttattttactggctcatgaaaaagaatttatttcttaaaactcactatttctttcttatttctatccttaccaggacagcagcttaataggtttcttgaaattgcaggaggacttaggagttaacattgtcttaccattaaatcatgcctctattccttgatgttttctccaagaatgatggcagatgcttttgaagttctggtgtatttgacagaaagcaa

SEQ ID NO: 114627 - DNA, 1018 bp, Homo sapiens
taaacaacctgattgatatataattcacgtactatacagtttactcatttaaagcatacaattcagtggtttttagtatgttcacaaaattgtgtatccatggccatcatctaattttgcaacattgacattaccccaaagagaaaccctgtactcattagtaatctcttcccatgttccttagcctgcccaatcctaggcaaccaccaatttattttcaacctctatggatttgtctcttctgaacattttatatgaaaggcatcatataaatcagttctttgtgattgtcttcttttacttagcatgttttcaggatttgtccatagtatagtatgtgtcaatacttcattgtttttattgctaaataatattccatgatatgggcatatcatattttatgtatctgttcatcagttaatgggcacatggattgtttccactttttggctggtgaataatgctgctttgaatatttgtgtacagattttgtttggacatatattttgattttgcttgggtatatacttaggagtagaattgctgggtcatatggtaactctgtttaaccttttaaggaactgccagactgttttctgaagtggctgtaccattttatattcccagcagcaatatagcagggatccaatgtcttcacatttttgtcaacacttgttattgtctgtcttttttattctagcccttctattctagtgaatatgaagtattatctcattatggttttgatttgcctttccctcagggctcatgaaattgagcatcttttcatgtgcttattgactatttgttcatcttcttcagagaaatatctattcagatccttttcccatttttaattgggttattctaaattattgagttatagtagtttttaaatatattctcagatacaaattccttatcagatttgcaaaaatttttttcattctgtgaattgtcttttctctctcttgatgacgtcctttgcagtactaaacttttgatgaagttttagcta

SEQ ID NO: 114628 - DNA, 1100 bp, Homo sapiens
cacgtggaggtgctcaattatatacttactgaattgaactggcaagaaagatttttttgttgattagagatcctatttggtagaatgaatctttctttataagttaataacataactaatttctatagtttcaagcaaatccattttcatgtatttttaaacaataccagcttaaaacacttcaaagactgaaataatataaagcatatgtcaatcattctgtgggctgggtccatcctccaggttctgatgaataagaatgactccttacattctcttgtgttcttgcgaaatagtattaaggaaaagaaaaagatatgacttccatgaaattatctcccaataaggaatttatagccaaatgaaaagggattgaaggaaaaatttaaattctgtgtccttgggtaccttaactatactggtggctttataaaaattgtcttcagaatgttagatcattaaatgtcaaacttagggtggcatatctggttgagaagctcttcaaggatagtcgtgggctttaggggtttgtgaacccattaaacttgtgtacaacttttgcatgtttgtgcacagggacatttttctggggaaagagtcattttccttggattcccaaaaatatcttgaccctaaaaaagtttcagaatgaatgaatcctaatccattcccttttaattaaagatagacaaggaggcacagaaatgcatgtgacttactcgaagctaccctgctgaatactgatagaaccagggctattcctaatggaatgagggctaacaggccttgttctaagaagatttttgtatttcctcttttaatccttttagctatcctcggaagtaggtatatttattattctcattgtgcgggtgaggaaactgaggcagagaggtaagataacttgccccaggtcacacagtgaatgagtggcagagcaggatttagacccaggcattctgattctagagactatatactcttaacagctacagtctctcacagaggattctccagaatgccatgcagccaataagctgtttcaggacttagtgagatggaatttggaatgtgaaaatggttctggcttgttgtaaaat

SEQ ID NO: 114629 - DNA, 2365 bp, Homo sapiens
tacatgctcatttcaaatcccaaaccacattttgcttcctttatcaatgaaagggcatattttgttcaaaaataccagaatggtagatttggtttagagtttttcttatctagttgccaagaaaggctgggctgtgttataccccaagctttgagcattccagcctccattttaaagaaaatattgtaattttgtatgaagaggtttgagtatctgaatgtaggggtaatattaaatgaatccaacttattttctaatgcttgatgtttggcttactattgctttatagcagttgtgttactcatcataatgaattcttttctaggaagccctccaaaaaatacggcagaagaatacaatgagacgagaagtaacggtggagctaagtagccaaggattctggaaaactggcatccgttctgatgtctgtcaggtggggagacttctgaggacacagttatgcccatacttttcttcctttaaaacaaatctggtactgagggtttcttaattgagaatgttctttagaaaatactaccttgagactaaatggaatatcaactataaattgttttctattatttggattttgtttttgttgtctgttttgatgctggtgtgtgtgtgtatgttgtatttgtgggtgctggggcagggagaagcttacttagtagtgttcagttcagtgtcttctctttggataaaggtaagtctgtcctcatgcatctgctcatgcatctgcctgtttgcagcacatgtataggtgcttatacaaaagagataatccagcagccatacaagcagactcgtaaagtgtatgttttctagactgatgactcaaatttacattgcaatttatattgcagagaactgaaggcattaatgaacagaatcagtgtatacttcatatttgaaccaaatgataatatattttccctgggtgaacgcaatagagtaacatttctgctatatgtaactgactgactaataagcatttttgtttttcctatgggtggaatttatatgtgattaaagatcccctaaaccaacatattctgttttttcacttgattcttttgtcacaattgatattggatgaagtccatgagaattacagtaaaggaaatgagtactcaggctatggttaggtaatgcagtttgctgtgttcagccttttggaagaatacttccaggcttccatttatctgtttcgatggtagcatgtgttgcagtaagttcaagcagcttactcttagctcttcttagtgttcatttcatcataatgaattttttaaaaaatcagtgttggcttttaattattatattgactagcagggtttaaaagtattgctacacaatttatttactaagtgacgtccaaagctaactatttttgcattaagatgaactgctattggtgtaatattgccctattttcagggtaatcatctacagtggtagccagctattttcaccaagtctacaattattttaccgattgacaaatatcttatgactgtcagtactttcagatgaatattttacttccattgattctctctcagggccatttgaagccgtatcacctggtttttctgtttgtcagtgtttccccaaaaccaatgtaatgtcatccaaaggtggacatcatcagaccagtgagcagaatcctagacagtttgctccaaatctgatgatctcagtgataagtcagagttgattgtctaagagatcataaaactgttgagcattaagaactagaaggcgccttccagaccttctagttagtagttttgaacttgtgtttttggttaacttcaaagtatttttttttcatacaaaacccttctagagccattatttgtaaaaagataaagaataactgcctgattgactagtgggagatgggagtggagacagtatcctgttttacttgatttctcccccacctcctgtagcagtccctaaggccactgaatacagtatcttttttttttttttctgaagcattgagcctttttttttctttttgtgaagcaaacaagagtgctgaattatctgttccagtacagttttgtattcttcagctatatcacaaatgtccttcctctaccctcagctagttgagaagcagctggaggagtaagtgatcttgtctcttgctgtgtgatatgctatattctgtttcgaggttggtaggcaaaaggactcactcagtttccttgcctaactggtggaagaaaagggatcccgattaaactcctgcaaaggtgaatgctttatgatctaataaccgttcctccctctgtagaactctcactcttccagagagaactgccatctgtttagaagccatgcttccatt

SEQ ID NO: 114630 - DNA, 1067 bp, Homo sapiens
gcttaactatttggcctttgcaccactatactttctaacttaaagatgtagaattaaaggaatacataagatccactgagaacaagtgagggaaaaaacttaaatagaggcatctgtgcattctgaaatgtgaaattaaagcagaagaggctctgcctgtgatgtggaatccttcccctgtgccttcagagaggttaaggaaaagttatatctgactaggtgtccttttaaaagtttaatttttaaaggtttctatgtggactgcaaaaaaggacaaaatcattgttcattatgccaaatggcataggctcatttacaaggatgacattatagtttttagatagtatagctgctgtaattaaagggttttaaatgaccttttccctttggggacaaggctttcctggaaaaaagtccgatttattccttccctacttaggttaaagtcaatacataaagacttcttatgggaataaatggctttgatttttctctctagaaaccaagctctgtccgtatcgatcaactggatcgtgaacagttcaaccccgatgtgattacttttccgattatcgtccactttgggatacgccctgcacagttgagttatgcaggagacccacagtaagatatttctcagtgtttgtcttagccaatttcaccttctactaacagccaaattagcagagaaataccctttagtggatgtttcctttttaaaaattaagacctgaaatgagccatacttccaatttagattacccaaatgaaacaattgtggtagctcctgaagaattattttctgtacatatttgagtgcaagaaactattattcaatagaatatttttggcaaacttggtcaacataagtccttgtatgtttttaaactttaaggaactttttctttattcatccttataataataattattattttttattttttcagtgccctctagaggaaagtagcacatattggttcctagcactgccgaatttatgcagagttctctttttgggggcatcttaagagttcaagatcacatgcaaagtcaaggttgtgttg

SEQ ID NO: 114631 - DNA, 1001 bp, Homo sapiens
actagtatatgatttgcatctattttttaataattcattgagcagatggatatttttaaagattgtgatatatagtgccaaatttcttgtcaaaagaataacatcagtttgtgctgccatgaaaaatgcattattattcatttttagcattttgcctttcccatcttccttctctcctttctttcttccttttaaaaaatttcagtggtgagttccatgaggctgaagagtaaacatttgtctgtcttgttgtatcactagtgctaacatacttcatggcacatagcagggacgcagtaaatgcttgtttactgattttatttaattggtcataataatgccttatctaagtattcatgtttttggttactagtgagtgtgcttttcaaatagtctttggtattatctctcatttttataaagtaaacttttggttgaactataacataaatactgaaaagtgcatggatcatgaatataggaccttagtgagtttttacaaagtgaatatgaccatccacccagcacccagatcaagattagtagcttccaagaacccccttcggacccctttccagtcgctgctgagaccctcaagggtaaccgctattctgacttgaaacaccatgtattagttttacctgtttttgaactataaaaactagaattttatattctgttttgcttctgtcttttgtttaatgtatttcagaatcatatcctgttgcacttaactgtagttggctcattctcactactatatagtattatatgggatgactaaattaaaataaacctatctatgattaatggacatttgagtattttcagtatatatatatatatatatatatatactgacattgccaatagaaaaacgggcaaaagacttgaatgagcactttaaaaaaaacactatctaggtacctaataaatatatgaaatagtgctccattttattagtcattaggagaatgcaaattaaaatcacaatgtgatac

SEQ ID NO: 114632 - DNA, 1302 bp, Homo sapiens
cctcagcctcccgagtagctgggactacaggcgcccaccactacgcccggctaatttttttttgtatttttagtagagacgggatttctctgtgttagccaggttggtctcgatatcctgacctcgtgatccgcctgcctcggcctcccaaagtgctgggattacaggcgtgagccactgcgcccagcggttggaagtatccgtattctagcaaacagttacttatttattggtgaatggcttttcaaactgatagcatttctcaacattttttttttagtgtagtgattaaaatgggaaagaatgaacacatagtcacattatatcatgcagtaattcaattataataagtcttgatagttttgaattttaaaaataattttactgtatgtatttgctacttggggctttcatcctcttcttgccttcctgtagtctcctcattgcagtcttccttgggtgcttgtggcagttaccaatgattgatttagccactgaggaggagtggcaggaggtggtggtaatttttatgcctctacttctggtggtagtttttgtggttatcataaatcttagaaattaagttgcagtgcttgttttttaagactgagttttcttttttttttttttttctcatttgtttgcttcaggtcctttgtttgaagacagccctccctgctgcccaagatttcatttcatgccacgttttgtaagatttcttccaggtaaatcttctggcttgtcagtgacctggtgagatagtgcatctgaaaataagcttgccattttcctttcagtcttcagggacaactttcccaccttcgatactgttaattatctacttctcaggttaggcacggaaatgtaaaattatacatgtggatttatatccctgcataaattatggtagtccaaattagatgaacaatggaagaacagatttataaattttagaaatctacttgacaaaatatcatgcgggtgtgttaatgtggagaaatgattgtggcttaaaaaatgcatatggctaattggaaaacaataaaaaaatttaaatgcaatatgattataactgctgaaaaaattactgtaataatagttacattaaggtagtaggattatagtgattttttcttatcttttgacatgtgcttgaattcattttacagtgaaaaaaaggtataaaataattttttctcccaataaaatatagggaaatatatgacagttttttaaagcaatattttaactgttttctaattttttaaaaagaatccacctgtaatatttggcattatattt

SEQ ID NO: 114633 - DNA, 1036 bp, Homo sapiens
aaatatatctgtttagcttgtttacaggagaaattttggtgcagagttgtataattttcttagccctttatttgcattcattactttttgaactttttgggtacacaggacctctgttttttggtaactccatgacaattatgctggatgtatggggcgggggtgggggacaagcctatcaggtgcatatgtataatctgaattaacaaaacatcctcagaagattctgacacagtttataattgaattagaaaaatatattaatataagtgagactttactttttgaatttcttattttatttgtatactgagaagggctaagttgacattaaggaatcctagtggcattattgtctatttcatttccatctgaaactagcgatcagtggccaaactcttcaggaaactatatggtcttagtatagttttaacagacacttttaaagacacttgacaagaacaagttgaaccttcagttaatgtatattttgccaaactacagtaatttaattttggtttatttttcagaatttttgtgtgaaagggcttgaactcttttcactgttcctattcagagatattttggaattatatgactggaatcttaaaggtaagtaataggatttaaagaagagagtagtgtttatggaagaacattatggtatatgtgaaaactcttataaaagttgtagggagatagttgaaatttctcttattttttaaatacccagagaaaagtgttattcacaggaatgcttgttatcatttgacatgaataagtttctatggattttactttatacagtttgacagggcttattattagctggtagcggcttgaagatggtaccagttattatgtgtagctaccttgatatatgtgtacctgggaaattaccattagttaatattttaaatctagtaaactttgctgtaataaatcttctaagatgcaaaactttggttagtcattaaaacacacacatgcacacacgcagacacttagagtgaactagatagattcaaagacttga

SEQ ID NO: 114634 - DNA, 1046 bp, Homo sapiens
tccataattgatgagttatcaccctactatccctgatctgcctaaggagccagagattctaaaatattttaaaaacttgagaaacagaaatgtttatggttatggttttattaattctttagaggtgatacttgtggttttaatgggttcttgtcatgtttgtgttgctgctgctaatactgttaattaagcaccacattatgcaggtttcttggcgaggccaggccagctgggttcttgtcattaaaatccagcagttgtggtcaagcttcatgtgcagtgttgttagccgctgagatgaaggtgaagccttctcatttggttcatggccttttgggtcaggtaacaaacgtgtataatatgagcctgcagggagacgttggggaactgaacctcacttctttttattgcagattccactgtgtaaagtaattagattcaacatagactacacgattcatttcattgaagagatgatgccggaggtaagggaaaagattgtgtgtggtttgatgtagtttgctcttttgcttgttccatactactattttaaagcattgaacttggccagatctggcttttgccaggaatatctctaaagtatcatattcactgttgaaagagtcagtgaaatgtagctctagtatcaaggttaaaattcaggccaattttcaacttgttgacctgtttttatacccctttctccttgtgttacgtctgctgatattaactttacatctgtttctagtttcttttacgtaggggacagattttggttactggccattatcagaggggaaattggaatagtgaaacaatctgatagctgttgtaataatcttattcgttatctccaatgacaagatcaatgcttggttcatttttcttcccatatatttacatatttttcctaattgtttttcattgcgagtgctcaacagcagatttatctcaatatatgcaagagatttaaaattccaaaggaagattaatgtgaatctcagaatgattcatagtctgatcttgaatttagtggtgtcaacaaa

SEQ ID NO: 114635 - DNA, 1139 bp, Homo sapiens
cccaggctggtcttgaactcctgggcttaagcaatcctcccaccttggcctcctaaagtgctatgattacaggcatgaaccactgtgcctggccctactttacagttgtttttaaggtgagtcccatcacaggccaaacaagctctcttggtctccgaagttaatcaggctctgtgggcccttgccatgctggaaaatgccaagacacaaccaccacccaaccaagtgtttccagctgcagctcacacctctcccagccccaacttggcaccttgtagccagaggttcagacacctggcatcgctctccttggcctccccaggcccatcacccacaggacaagaccctgtccagctgtctgcaacaagggcagagctacttctactggcagctgcaataaaggggactcccaaatgggcccatctccggcaagcctcatgagttccttcagaccctccttacaactgacgtggcctgctcacccaccgacccagatggaagaacaccaagtcttcatcaaggccacctatgtgtactagcagtccagtgggtgtccctctggtaccctcatggatgataattgctcatttaccaagttcatggtattttggaggccccaaaacctcagacatttgcggccttattggtcatccttgcttcaccagcacctgaggaagcggctgagagctggagactggccagcccttttttattggtctaggtatggcaaagccaatactgttctttcctaccagtctgtgaaggaacagacataaaacctgttttgttagatgtgaatctaggaaatacaatatatttttaagtaaaagtactcttgctttacttgtaaactgattttcgtttttttcccctcaggccatcaagccctgtcgtcctatgaccaacaatgctggcagacttttccactaccggatcacagtctccccgcctacgaactttttagtaagtttctaaagaatcacatgcatatcatttaaaatgtaaatagagtaaaatgtgaataggctaaagttattgattctgttctcaaatgttcttactttgaaaaatattttatttttatgttgacaaattggcctttctcacgatgacgtttctttcagcttcctcttcactat

SEQ ID NO: 114636 - DNA, 1626 bp, Homo sapiens
cccctctggagtatactgtaagtggcatattgtggctgtaagattaagggtagccataacttcattcaggtgtctcacagggctgatactccatgtcagcagtgttgtccgtgtcagcctgtgtcagcagtctacaacctagcctggagatttccaggagacaaggccacctaggcacagatgcagctttcataagtcttaaaacaaagtttccccttacaagaatagtttaaactccttttagaaaagagacacctggtaactgacctggactgaatacaggtataagcaaaggagaaggatcctccaaacttgagaatggtctctggatgaagaccctcctggtgacttggtcatctaagtccctggctatatctggcctgcgtctgctgttcgtcttgtaagagaataagcagaataaactgcttgagcatcagttggtgactaagacttatctttgaggagaatcagatggaaagggagaagtccctcctgaaagagctggttaattaggtccactcaaaacaccccagccaccaacacgacagctggggatggtgatgggatttgcataagcaggtgagtaatggcactcatttctatgagagaatcatgagagagtgaatgggagctatctctgatccagctactgggtgagccctatggactgttccacagtgggactggcagtttttattctgctttctggccaattgctaccttctgtgtgcactttgtacctctgttatggaaattgccaccaggcacatgccaaaattattcttaagatccttccaggcccatagtaaggggggacaggctcccaagtggaggaggactgtctggatgtcagggatgcccttggcttcaagagttgactgccggctggcgtgtctccagcccttgctgtgccagaggagcatcttggcctgaaggatcctgggattgtgacaccataggccaggaagtcttaggtcaggtttatctgcagaaagcctctctgttgttgtctgccagtgggggaattagaagatgatcccctgcaagtctgtacaatcactgaagggcacattatcctctctgcactcctgatgggactgcgcagcttctccagggatgtgctctaccctcagatgcctgctgggtgccacgtaccccagtcacatgggctcagctcagagtcgcatcacttggcctggctgatccgtaggccttcaagctgtggaatgatgatcccgagtgcacggggttaccattggttgcactacaggcattaccagtcaccacctgggtcatggttaggacagtggctgtcacctccacaacctgctcagatgaggaggcatgccccagacaccatggaagtctgcaaataggtttaccctttgtcaaggccagaaatttagagcttcctcaaagacctgatgcagggactcagtgagaaagttgtcactggctgtactgtgtgtatcacacaggaactggactgtaactcacagactgaaaaatgtaacagtcggtagctatctccaaagatggtaagatctctcatgacttcaacacccagtcaaggttatccagggagcacaacttgatggggctgtgggcatagagcaggcagccata

SEQ ID NO: 114637 - DNA, 1674 bp, Homo sapiens
tgccccgaccgtcgggagctctttggtattatgagtgggtgggagcactggggcaaaactataactataaatgtctgtgaaccattctgatcctcatttctgattgggatagaaaataacccattcaccaaatcagttgccatgtactttatatctgctctagctaaactacaacacctggcccggcagctacaatcagagttcctgcttggttaagtttgtggtagtttgcagtcatccttcaggtcttcaggggccagacaggtgaattaattggagataggaccggtaccatctcccctatatccttcagatccttaagggtggcacttacctcttccatccccacagtgcaatattggttttgatgcctgggttgacgggggtggtggtaatttcgtttctgcttggctttcccattaggatagctcttattccacatgtcaaggacccagtgttgagtagcacgttgggtctgccaagaatgtcaattctagtgtacattcaaggaccaggggaaggaccactgggtagatctgtgattcagtagacccactgtaagtcagaccttgaccaagatccatttattaccttggcctcatattctctactctaactggggcaccacagtgatgtatccagtctccaagtatcaatgatgattcagatactgcatctaacatggcttgaactgtctgctattcctcttttcccagtgtacagctccccaggtaaatggccataagcccctttggggaatgacagggctgttattttgttacaggatccttcctcctgggatctggccacctcttcagtcggtggatttcagtccaaaaaacatgatcacgtctggaactgggcaaggaatagtgtgactatttattggaatcacctgccttcagtgtcttggttatccattcttggtttcttatgttcgtacaaactaagtagtactcttactggttacccacttattttgtaccgaaggacaccatgttctattaactatttccatgactctttgtgggtcagacccctttggctgctactttggcctggcttccagcacttagtcctatcacctggcatctcttgtttcaggattctgtcatccctattactgctggtgagctctgctctctgaccacttttgtagtcagccctggcctgcagaggaggctaccactgatcttcctgatgatgtttgtgctcctgtcacctgcacatttgttttggtgtgtcctctggggcttcccatgcaacatgattatttggcatattttccagctgtagatactttatccattctaacttccttgagtccttgaattccttcctccactgtctaccacggcaattccggtatttcagctttgctcagcgtgggccgttgcttcttcatgcttttaggagccatgctggtagggagttctcaacataccctggtggtgttgtatcctgagtgccccaggtcaatctactcttccctaaacaattttatgttctggccctgttgatcaaagctctcatcatcaggtcctctgcagacttctctggctgttgccacatgctagttagttcctgcaattcttttgaaatataatctgtttccttccagcacctccccagttggggccctgaaatgaccccaattataggtattggccagga

SEQ ID NO: 114638 - DNA, 1404 bp, Homo sapiens
gttcctccaggatataaaatttgcttttgtgaaagagtcatttttcttgagataagaaatagggaaacaaaagtgtcctgggaattggtagaagaagatgggggcaaacagtgtgctgacattgatattttctgcttggctgcacaaataactcaggaatgtggtgttgtcacacggtttccctttatcagacaatatagacagtttgcagctttattggttttggaacatccgtttaatcttctaaccgtgacagcctctcagagcttcagcgctcatgacattaaaacccacgcattttcggaggcatcaccgtgcatggtgtggatttttccctccaataaaaacgaattacattgtgtttctgacagatgaatgatggaccactctgcaaatgcagcgcaaaggcaagacgcacaggaattaggcacagcatttatcctggagaagaggtaactggtttgggttattatgtttgtaaatgctgagaagccagaagtagacagatgttgttgctgttctttcccccataaatgaaataataccatcaaaattctcttcatattccctaatagtctcttactgataattgcagaggaaagcacttgggttttgggagcgcagtggggaatgttctcaaggaaactttaacaaaagttttagtcgttttattatttaaaataggcatggtgtgtttgatatggtttcccatttcaagtattcttcagctgcacatattatagttttatgtttcatcataagtggctatgaatggccctggagcgacgctcttagtaaagtgctttgaagtgcatgtcttctctctctgttagtctgtcctttccaccaaactgaatatatattgactattttacctgcgtctctgcccttggtttatcagggaccctctaataagtttaactgaataggtagaacacttttacattgcagagtcatatataactatccctttcaattattgtccctcatttgttccctttatcttttatttttataagctatttttattaatcccaagctcctcactttataattcagtgcattgtatttaaacatagtatatgtaaaaccttaatttctatttaaaacttgtttgagggctcaacaataatgggaataaagactatgagatggtgcctgataatttgaaatacttgcatcacttctgctcatttgtctttgaaagttggcaagtgtagcgaggaattgtgggacaaggtggcatcttgtgagcgtttgtgcacatgcctcaggttgggagctctgagatgttgacgagggatcaacacctgtgacaggaaaagagcagaggtgggaactattcacctgtgatgtgggtctgatcaggcctggcttgtcagaatttttgtgtgttgtgctgga

SEQ ID NO: 114639 - DNA, 1177 bp, Homo sapiens
tcttggctcactgcaacctctgcctcctgggttcaagtgattctcctgcctcagcctcctgagtagctgggagtataggcatgcgcctccacgcctggccaattttgtatttttagtagagatagggtttctccatgttgatcaggctggtctcgaactcccgacctcaggtgatccacctggctcagccttccaaagtgctgggattacaggtgtgagccactgcgcctggcctgcctaggtagttttaaaaaattatttgtagagatgaggtctcgctatgttgcccaggctggtctcaaactcctaggctcaagcagtcctcctgcctcagcctcccaaagtgttgggattacgggcatgagccactgcgcctggccctctagtctttttacttgactgttgtttcctgtttcgcaagaagcctctacactgatttccgtggatacctgtttctatcagaaattcaacagtgctttgtaaacagtctttctaatgctgtttagtgttattggttttgtgtcctctgtatagttgagccttgtgaagggctgaatatgtaggatcccagaccttggtaaaaggcaagcatgtaggatgtctctgcttccctggagatccgtgaacactaagttaattttttatatttttcatcacaacaagtcatgactggcattaagagtgtgttataactttttttttgtcttttttttttttgagacggagtctcaaaaaaactcctgctctgttgcccaggctggagttggagtgcagtggtgtaatctcagctcactgcaacttccacctcccaggttcaagcgattctcctgccttagcctccccagtggctgtgactacaggcttgcaccaccacgcccagctaatttttgtatttttagtagagatgaggtttcaccctgttggctaggctgttctcgaactcctgacctcaagtgatctgcctgcctcggcctcccaaagtgctgggattacaggcatgagctattgcacctggccttaggagtgtgttataagtttttttttttttttgagacggggtctcactctgtcgcccaggctggagtgccgtggtacaatctcagctcgctgcaagctctgcatatctggttcaagcaattctccctgcctcagcctcatgagtagctgggattacagg

SEQ ID NO: 114640 - DNA, 1103 bp, Homo sapiens
gttgcttagtagagtatttggtgtagagtaggcctttaagtattttctagaagaataaagaactcttcttacctttagaggtttaggtcatttggaagcctccacaaaaaccagtttgtcagccgggtgcggtggctcatgcctataatcccagcactttaggaggccgagacgggtgtttcacctgaggtcaggagttcgagaccagcctggtcaacatggcaaaatcctgtctctactaaaaacacaaaaaatagctgggtgtggtggcaggcgcctgtaatcccagctactcgggaggctaaggcaggagaatcacttgaactcgggaggtggagtttgcagtgagctgagatcgcgcactgcactccagcctgggtgacagagcgagactccaactcagggaaaaaaaaaaaccagtttgttaattccatcaatttctgtatttttctcccaacccctgttagagagttccagtgaatccgagtgtgagtctgatgaggacagcacctgttctagcagctcagactctgaagtttttgacgttattgcagaaatcaaacgcaaaaaggcccaccctgaccgacttcatgatgaactttggtacaacgatccaggccaggtgcgtgtttttatgcccttgctgtgaaggttgcaaacccagacataacggttattgctctgggctcagaagatacatgttgcctagtattgaaactgaattttactgtcagggttttgtccttcagagctatttcttttcagcttcaggttagttccaaagcataagcaccagagcagctgtcccttgaatcatttttgatgatgtttgtaaattccatgttggggagaggagtaatggccctgcctcattaaattgcagtagatggaaggagacacatggtaggatgaggagagagaacttggaggtctttttagaagtagttcacctggaaggtatcttgctgcaaaatagtaaataagtcctataagatttcttttttttagttggtaacagtcacaagttctcttccttgttaagcatgtttgagctaaaaacataataggtggacataattatttttatttttaattactgtctt

SEQ ID NO: 114641 - DNA, 1041 bp, Homo sapiens
tggcacagtcatagtcatagctcactgcatcctccaactcttgggctcaaacagttctcctgccttagcctcccaggtagcacaggcacacaccacctggctaatttttttctttttcatagaggtggggtcttgctatgttgcccaggctggtcttgaactcctggcctcgagcaatcctcctgcctctgcctcccaaagttgctaggattacaggcgtgagccagcacgcctggcctgttctaatgtttctgaatgttggcaaggcacatttacctgaagactgtgtcagcgataagtgtgtgtttgattcagagtatgattgccagtacttgagcattttgtttttaaatgtttgttaaatttagggttgaaaaatagcatcttgctgttaaaaatgctttgattacctgtgagatcttacatatctttgatatgatcgttattgatatagttcctaatattgatcctttatttttaaaagggagattctacagtggttggaacgagtaggcttcgtgacttatatgacaaatttgaggaggagttggggagcaggcaagaaaaggccaaagctgctcggcctccgtgggaacctccaaagacgaagctcgatgaagatttaggtgagtcagagtcactaactagcctgagacccttgcgattatagcttcattcctaaattttggggaaatacccttgagagtcccacattgagatttcttctttttcattttatttttcttaattacagtcagtaagatacatagcagtagaacttccttctttttgatcgtatttttccttagttcatttggcagaatacagcagcgatctcatttgcaaggcatgctaacaagggtgccccttggagagttgtccagtcagaagagttcagcatctttccgagagcaggagcccatgccccctgcctctcatgaggacaggtgtccttccttggccctctcctttgccaggtgcgcctggtttgatgagggaaacagcgactgtaccccagctctgtttgaaggtttctctcca

SEQ ID NO: 114642 - DNA, 1433 bp, Homo sapiens
tgtgtgttttctccaaaatgaaaaataaggaagaatttgagtttgtctcttcgaagtgtatccttgaccaaaagagcaccaaccctacgaagttgcccatgcatattggctagttttgcagaaagggagagccattgtcacccttaatgggctggagggaggactcctagagcacatgctgccagggccggggcgcctgtggtgctacagccggcgtgctcattgccatgacagactccaccactatttctacatgctcacttctcttttctttcttccatctccattttattttctgtcactgtcacctttttgctctctcttcccctcttccccctaggcgttatgcctccatcctgttaggcatatttgccacagagtaggcatgttgtaatgttcattgattaaatgaatgagtggacatctcattcatttaattaatgaactcgtgcagatttcgggcatgaaaagttgcagatgttagatttagtgtatgggattagataagagataagagagagttgtgttatttggaattttgtgaaaatagcttctatttggactcgtatctgtggggagcttgaaaggagatttctgtgtttttggaaacaaaggatttgagaagtctctcatagtggtgtgatattttatttgataaattagagcaggcttttaagtcatagttgatgtggtacagggaagggaaagctcacatactgtgcactttacggtgcctgaatgttattccatgcttctcatgttgtcttagttgaccctgaaaacacccctggcaagaaggtggttctgtccgttagaaatgctgctaggagtaataacacctgactaagtgggacttaaacaagctgggtttgttcttctcataataaggtacctggagggaggccatggctggtgttcactgagtggctcagtgatggcaggccctgctgtcttcctgagcatcttccacagttgcaggatgatgcaggactagcaggcctcaggtccttacacacccgcatcctcacacgcaggatgcagagggcatgttgggtgagcattcttctagtgtcttgcccgagctctcctttcatcccttgactccccttccatccctttaccagagccatgtgacatgcctaccccagggattcatttttccttactgccatgacagagttccacaaatggcatggcttgaaaccgcacacatttgtcatctcacagcttgggaggtcagaagtccagcatgggcctcactggctccatcaggatgtcagcaggtctgtgctcctttatggaggctctggagaaaatctgttttcttgctcattcaggttgctggcagagttcagttgcttgtgtctggaggacagaggaccttgtgtccttgttggctgtcaggtgtgggcacttcttggttcctccaggcc

SEQ ID NO: 114643 - DNA, 1027 bp, Homo sapiens
tatgtggacatttccaaacattttgcaaatatctttttcttttaggagttacggtttatcggttgttcctgaacctgctggatgcacaccagaattacctggggagattattaaaaatacagattcttgggccccacccctggagattgtgaatcagtaagtagatctggggtggggcctgggaatttgtatttttaaacaagtaaacttcaggtgattctgatgccaccagactggtatttgggagtcactggtttaacaaaagtacacacggtgatttggcatggtattcatattttaggtgaaaaatgcaccaaataggtgaaatagaatagtttttacagtggaagagtatttttaataattaacctcctttgccctcttttgaagtcgctccccaagtagggagaagaagagagctcgttgggaggaagaaaaagaccgttggagtgacaaccagagttctggcaaagacaagaactatacctcaatcaaggaaaaagagcccgaggagaccatgcctgacaagaatgaggaggaagaagaagaacttcttaagcctgtgtggattcgatgcactcattcagaaaactactactccagtgaccccatggatcaggtggtaggtctgaagtagcagacaagctgtagactagggcttctcggcgttgtcactattggcctttggggctggataaattcttgattgtggggactgccctatgcattgtaggatgtttagcggcatctctgggctctacctgttagatgccagtagtacccctccccagttgtggttaccgaaaatgtcttcaaatattgccaaatgtcccctggggggaaaagatcacccccagttgagaatcactgttacagacaaaagccgttttaaaaagctaaaagccaagagtgcagtaggttaattaaaatatctttttataatgcatttttatttatttatttttgagacagggtctcgctctgtcacccaggctggagtgcagtggcaccatcgtggctcactgca

SEQ ID NO: 114644 - DNA, 1078 bp, Homo sapiens
attaaaaattgtgttaaaagtaactgatgaaaatataaaatctttttttaaccttgggataggaaatggcttccaagcatactaaggcaggaagcataaaaagatctctagatttgactttataaaagttgtatgtagcagcaaacagatttcaaagcaagaaactggaaacggttacaatgcatatgacagagggaggacagttatcttaatgaaaactgtttcaaccaattaaagactctaatcataattttaaaaaatttgcatagcctgtgaccagaatgttcacaaaagacttaagcatgaaacatattcatttcaatattgataaaatacttcaaattaaattatatgaaaatactgtttcatcagaatggcaaagattaaaaataaccatagtgacaggatgtgtggaaatgggaactcttatgtggttttgatggtagtctaaacgagtactgcctaactagagagaagccttaaaaagtatgcatttgggaaagaatctgacaagtgtgcaaagaacacaaatgtgttcatgatagcattgtttatggtggaagagaagtaaatgttaacctaaatgactattattagttttgttaaattatggtatatacatataaaagaataataatgtacctattaaaaatgctccaaatatataattattgaaataggtgttcctgatttactactgaatgagaaggtcaggctataacattaaaacatttatgaaatatagtgattttctctgagtggtgttatgtgtggtttttatgtttgtgctttattttttctacagcgaacatacattgacagtaatttttctggtaacaaaactaatgatgcgtattgtaatgtctggaagttatataaataatatgtataatctttctaatcctcccaaagtatacatacctacacacatatatatacatacagactttccctgttagaaaattacaagttagtggtagagttaatgagaatacttattactttgatctggatgtaaacttacatggatagtagtaactttgttagtggagctgtgaaggctaccaggtgatcttac

SEQ ID NO: 114645 - DNA, 1010 bp, Homo sapiens
ggggaacttgagcaaaggcatgacagcaaatggtgaacaatgggatgttgaattggtcattttggaagtggagcagctttaaggaatggtcggtccagggactaaacatggcagtgggctgggtggccaagaaaggggaagaggagtttattgagcatgagggtttcagatgttagcaggaacccagtattaaatgggtggcctattccagtggcttgactagggggtctttgagttgctcatcaagatggtcaggcatttatgaaaccctgtttacatagtaagaattattttttaaaaaaacttttccctttttcttttctgccatgaagtcacagaatgtcgttccacccgggacgagggtgtccccgaggacgaggaggacatggagccagaccctcagcaccatcctttaggccccaaaatctgaggctgcttcaccctcagcagcctcctgtgcaatatcaatatgaacctccaagtgccccttccaccactttctcaaactctccagcccccaattttctccctccacgaccagactttgtacccttccccccacccatgcctccgtcagcgcaaggccctcttcccccctgcccaatcaggccgcctttccccaaccaccagatgaggcaccccttcccagttcctccttgttttcctcccatgccaccaccaatgccttgtcctaataaccccccagtccctggggcacctcctggacaaggcactttccccttcatgatgccccctccctccatgcctcatcccccgccccctccagtcatgccgcagcaggttaattatcagtaccctccgggctattctcaccacaacttcccacctcccagttttaatagtttccagaacaaccctagttctttcctgcccagtgctaataacagcagtagtcctcatttcagacatctccctccatacccactcccaaaggctcccagtgagagaaggtccccagaaaggctgaaacactatgatgaccacaggca

SEQ ID NO: 114646 - DNA, 1050 bp, Homo sapiens
acgcccggctaagtttttgtatttttagtagagacaggatttcactgtgttagccaggatggtctccacctcctgccctcgtgatccacctgcctcgacctcccaaagtgctgggattacaggcgtgaactaccatgcccggcctatgcctacctgtttttaccatgaaggaaacgagagtatgaagggggagaggggaaatgatatttttcccaagtcttttaacaaattagagatgatctatgcctataagtctttttagctgctgatagttttgagttggcaaaactagtaataatgacattttaaaatttaaggacattaaaaatttagttggaaactttaacacagttcaacatgcttttaattttgtttgtaggctaagtgtattggaaactacaaaattagtgttatggtaattgcagaaatattttgtagcattggcagtttgggaaacatgtttatgtctgttttattctttctgttttttagagcttatattctctgtggaagatgtgacatatccaggcggaacatcatgatgcagggaaacacatggtgagtgccgtgatgggaatggcaatagtttgggagaaccgagagaggagcagacattggtgctgggctatagagggtggaaaggatttagatacatggggagaggggataatgtgctcattctttcaacagtgggcacaatacaatagagggccatgcccagggctgggaagccagaccagaacagttaatagaaatcccagagcgctgccctgacagcgcttgcagttccgaggtgcaggcagacattaaaggtggaattaggtccttagaaggtggattgtaattattgtaggacctgctaagaagcagcacagagtgttgtgagagcaaggaacctaacaaagccctagggtcagtgacagtggttgtagaaaggccagcaaggatattattataatagccatgtaagaggtgatgatgtgaagtagatgaattcaggaaatatttatgaagcagaaacaattggattttttgtttattttttattaa

SEQ ID NO: 114647 - DNA, 1079 bp, Homo sapiens
atggatcaggatgaaggtgactgccctgcagatccacctggggaaagagggagttctcaataaaaatgtagtcacactttaaaattctttttacatgcactgacgttctggccgtgttaactattcaagacagctccttcagtgtctctgtttccaaaccgcaaccgagaagagacagacggagaaaagagagttacttttccaggtgcagtgaattccttgacttttgaattaaagtctgcatccacaacacagccggactatgccttcaataggtcaatttcatgattagtatttttagattttctaactactgaaacatccatgaggatctggcagtgaatgttcagctcttgttacacactgtacaagagtgttcgtgaccctgacttttgcccacctctaggtgcggcacacacctttgtgttcccctaagccctgcacatacctcttttttgtgtgtttattgcattattttgtatttttaaaacacttacttgtacgtgggttctgagttccttgaatcctacaggctgtgtgtcttattatctctgagtctacagggcctgggacagtgcttcccatttatgggctcattaaatattgcatgactcagtgaaaaggcctgctttctgttgcggaggtacatggaagggaaatgtacagtagcaacatggaaacatactattggtgagagagtaaacatttattgaccacctactgtgtgtaggttgcttttcccggggatgtgaaggatacagaaatgactgtgaatcaacccatatcatcaaggagctgataatctagtggaagagttagacgtgtgcatacttcactatgatatgaggcagtctctggtaagtgctgtaaaaggattaagtatagactaagtctagagggaatgggattacctaagggaatcaggaagggcttcatagaggaggtggcatttaagattgatagatggatagaaaatcactgggcagattcatacgttgggagatttttttttttttttttttttgagctagagtttcgctcttgttgcccaggctggagtgcaatggcgcgatctgaac

SEQ ID NO: 114648 - DNA, 1106 bp, Homo sapiens
ctagagactgctctcagtttttgtcaaataggtccgttcttatatttctgccataccatagtgaaatgtcaactgatttgcccattcttcttaaaaatcgttttttcctctgattcagggttacaagtacagatcattatttcctaagtgatggtctgtatgtacctgaagaccagctagagaaccaaaaacctttacaattggatgtaattatggtaaaaccttataaactctgtaacaatcaagaagaaaacgatgcagtgtcttctgctaagaaaccaaagctagccctggaagattcggaaaacactgcctctactaactgtgactcttcttcagaaggactggaaaaggacacagcaacacagagaagtgaccagacttgcctagaaccatcatgttcatgttcttctgaaaatcaggaatgccagactgctgccagcactggggaaattctggaaattttgaagaaagggaaggcatttgttttagatattgacttggattttttttcagtcaagaatcccttcaaagaaatgttcactcaggtaaataattgtgtttttaacacatagatcttgagaattgtatggcttttctctagatgaggaaccagcaaactctttaaacagccagctagcaattattttaggctttggggttcacattctctactaatacccttttctgttgttttctaaaccttttaaagttgtatataccattcttaacttgagggccatacacaaacaggctataggctgtggattgccaactcctgctctagatagtattcattattttgcatttattaattggggtaatgtatacatgggtgatggataaaaattaagtcatacagtacaggtatatacagtcagccctctgtatccgtgggttctgtattcctggatttaaccagccacagataggaaatattcagaaaaaataaaaaacaactagaaataacaatacaagagtaaaaaataatacaaataaaaaacaatacagtataacaactatttacataggatttacactgtattagataccacaagtaatttagagatgacttaaagtatatgagagggtatgcatatgttata

SEQ ID NO: 114649 - DNA, 1046 bp, Homo sapiens
aggctcggcggatcccctgcgcagcgaggcgaggagcggaccccagcgccggtgcgtgccggccccgggcagcgggacgcggcggggcggcggctgcaggcagccgaggagccgcaggccgaacccaaggcaccgggattgcgcctcccgcggctgccggcgaaccgcggctctgcagctcggggcaggcgcggcggcggcaccggtggtggccgcggtggcggcagctgcgcggggacccgccgggcggcgcctgggtctggacgcgcgaggaagccgcgggagcctcggccaagccgcgagcaggtgaagcgaccgtcccgctgcagccgggacgcgcggctccgggtgggcaggggatgggggaggcccggcacccccgagaccgtgtgtgcccaggaaagtttagctacaaatccgggtgcgggaatcccagccctggcagggcggggagtgaggacgccgaaccggggtcccacgttgggcggcgcaaactcctctagcatccggccggggacggggagggcgcagcccaggggagggggctagacagagcgggaccgagacagcgggacaaccggagacgcactgccgggggtactcaagacagggccgggacctcctgctcgggcgcgcatcccgggtccccatccctgggccgtcttctggtcccttcctccgacaggagtggaggtactcaggtactccggcctcaggtaatgtcttggggaccatcctccctcgggcttgtttcatctctcaacccccgcctctttgcccagatgagacgttagacgcggggcgagggaatgcagggggcgcgcaaagatcaagggcatcttagggccggttattggcgtctgccggggagatggggaacatagtgatagggaaatcctgctctctctctgaagtcgagtttctcctaaaatctggtttctccctccctctgttcctctctccctccctcgggtttgcgtttgtgttttaagtctttgagctgcctgtggtccccgctatttggaaaatccattaaagcgcaaggc

SEQ ID NO: 114650 - DNA, 1050 bp, Homo sapiens
ccatcgctttatctgcttctttgccaatactctaaccgtcctatcttttttcctttagttgcccccacccaacaaattctctacacaaaataagttcaaccactggcattttctgcccctatgtgctagctgctaagcatttctatgaaagaaaaaataatcacccagctgtttggattggtgcaatcgcagaataatggtctctaagctcatcagatccacaggctggcagacaggtggacggacagtcttcagggccccagtcaccccagggtctattctaactcttcccctccccttcaaactttgacctccctgtctcctccctccctctcagcaaggaatcttcatattttcttcacagaggatgatcagcggaaactccgttcatcctgttccctcacttacaaaggatctatttccacctccagcctgcgctctttccttcctgcttctgagaaaatttccctccttttatcaaagatttccccaggagctcaggagcgtgtctcctctcttgcctgtaacgatcatatttgatcagtatactttcttttctgccgttaacctctctgtgtctgtgtttcctctccaccatgtttaaacctcccccttctttaactaatacctctttgtctttatatccttaacaaccccatgatttgaaaatttggtctatgtgggctgttttcacttttttttttttttgagacggagtctcactctgtcgcccaggctggagtgcagtggcgcagtctcgtctcactgcaacctctgcctcctgggttcaagcgattctcctgtcccagcctcctgagtagctgggattacaggcacacgccaccacgcccagctaagtttttgtatctttagtagagacggggtttcaccatgttggccaggctggtcttgaattcctgacctcgtgatccgcccgcctcatcatcccaaagtgctgggattacaggcgtgagccaccacgcctggcctgttttcacttcttaaatctctcattaattccacaatggatggtgtagtttgattttgctc

SEQ ID NO: 114651 - DNA, 1012 bp, Homo sapiens
gagtttactccaactaaatatattgtagtggcatagcttagattccttaccagaagcggaaaatgcatagtataggaccaaaagagggctgtaattttttttggaacatcgcattctttcttctccctaagacgcatagatagatataattatatgattggaaaattagacccaagtggcgagtttaaaggaactggggctggttaaactagaggcgagagcgagggtagcaatgatggtctgaagcagctgctgtgtgtttcctggaggacccacggggagggggagagctactacacaagcttcgcagaggggcttaggcaggggtcagtgtttgaattggacactctcgtgtctgtggtctgttttaagtttgggtgtgcaaggccaatatgaacagttttctttctttcaagtccgtggttagggcaaactgtcccccgggagaatgtcggtgccttagttgatagctttgtgtttccggaagcctggcttccaataaaggtggttaattgggagaagtggaatggtacattcttgctttccaattaagaacaaggcttcattacaacaaataaggccagcacaatccaatactattaactttgtatttaaataagagtgtaattttaaaggttaaagaaatgtgaaaataagcactaatccccatttaaagttcttaataatggtttaattgaactctgttaattttctcctccaagattaaatagaactagcgcattctcagtctttcggctgtgtgtgtgtgtgtgtgtgtgtgtgtgtgtgtgtgtgtgtgtgtgtgtacatggtttacacattttgggatttcaggacagctaaccctcaaaagccctgcaggtgaatttttacgtagaccaagacgctccatttccaccacaagctaccttgtaccttttgtatcctccacccctccctttcccctgactttccagccataagcttacgcagaaagaccccttctcccgatcatggggagtgtgcacaccag

SEQ ID NO: 114652 - DNA, 1051 bp, Homo sapiens
accatccttttaggacaaatttcatggagtgaaggtattaaatcaaaggacatttttgccaaattgttttatacaaattattttaccaaattacacccctaccaataatgtatgaatgccagagtgccagaagcatttccaggttgggtattataatttaaatttatgttttcttaattgaaatatggctcattttgtagttttaatttgcacttatttgatcaggaagtttggccattttgccctaatttttttttttctattttattttacttgtcatctaaacaatctattcatgtcctttgtccattatctcttggggccctcatctgcagcactggatatgcatttaaatattatagatcttaatctttttaccccatgtggttaaaattctccttaatcttttaaatgttgttattactatatggaagttttaactgtctctgaggcaagtctgatttttttcttttataatcatcttttcacttcttcagatcttaggatgatgtcattttcccaaagacccacaactctcttctaccaattttagtgattacatttttaaatttatctttaaaatttaaatttaaatttaatgggcatttattttgatggaaattataaatctaattttttgtaaattactatctgattatctaaataccatgtaatcattaatttttctcagtttgtgaggtttgagttattattattattttttttttttgagatggagtctcactctgtcgcaaggctgaagtgcaatggcgcgatcttggctcactgcaacctccgtctcccaggttcaagtgattttcctgcctcagcctcctgagtagctgggactacaggcgtgcaccaccacactcagctaatttttgtatttttagtagagacggggtttcaccatgttggccaggatggtctcgatcttttgacctcgtgatctacccgcctcggcctcccaaagtgctggggttacaggcgtgagccactgtgcccggccatgatttttttttattacactttaagttctgggatatgggtg

SEQ ID NO: 114653 - DNA, 1043 bp, Homo sapiens
tttgtaacttacatctgagatatgctagaagaccttgatgtttccatttagattaatcctatggtgaagaccttttgtagaacaaataattttttaaaaaaagtcataagacatttgtcccaaatacataacagatatatatatgcatgtgagcgtaacttacagttgtgtatgtgttgtcatttcttcccccgcccccaattcattctctttcttcctctgtactaagaggattgtgtctgtgaactgcagcatctggactccttgctttttctgtttctggttgggttcagccaatgggaggcactggcaggggatcagaggaggaggaaagagcatctgggtatttatctccctagcagtccccctaaccttgctgggcttctgacgatggctgatttcttctaagcgcttgaggcactttcctagctccagctcctgcatagtctgataatgctgcttccttcccatgctcttcagacctagaggtcctagcagtttcccttctgttgttgctagccccagggtgctgcactctgcctgtctccggtctgcacctctgtaaacagtccctgcctaaaacagtctccagcgaaaccttttttagtgtgccttctgtttcctgctggactctgactgatagtctatgtccatttctttctcatatataatcttaattgtcatgcttggctctaaaatgccagttacgtttactacatctgaatttgaattgcatccttttttttttttggagacggagtttcgctcttgtcgcccaggctggagtgcaatggcacaatctcagctcactgcaacctctgcctcccaggttcaagtgattctcctgcatcagcctcccgagtagctgggattacaggcatgaaccaccacgcctggctaatttttgtattagtagacacagggtttcaccatattggccaggctggtctcaaactcctgacctcaggtgatctcacctcagactaccaaagtgctgggattataggcatgagccacagtgcccagtcgaattgtatcttgta

SEQ ID NO: 114654 - DNA, 1024 bp, Homo sapiens
acctcaggtgagccaccgtgcccggccaggcttctgcttctggggaggcctcaggacacttacagtcatggcagaaggtgaaggggaagcaggcacatcttaaatggccggaacaggagccagagagcaaggggagaggtgcctcacacttttaaacaaccagatttcatgagaactcactatcatgagaagagcaagggggagatccacccccatgatcctgtcacctcccaccaggtccctcctccaacaatggggattaaaatttacataagatttgggcggggacacaaatccaaaccatatcaagactgaagaggagtcccttggggaaaggaaaggcactgagctgggtgaaaggtcactggcatgttccattggaaatgtcaattccttacatatgacacagaaccaactagggtgaacagagttcctgggattgaaaagtgaagatagagaaagaaccatctggaaatcattcatgggcatcattttgggcatttcagaattctcctttgaggtttattatagtcagcaaatggaaaggacagaaaaagacacctggtgttctgactgtctcagggataacctttctttttaagtagtatggttaatcatgctagtttaagcttctcttttgatttttagggtagccttaatcattacaattcttttatcttccattagacttggctcatccctagccaggaaataatttggaaaataaaaaagatgaaggttacagtgctcctgaggagggaagtgcagttccctcctgagtggacccccaagatctcattgatggcaccggcacttagccagcaagatgaccaggaggcttttctgtgctactccaagagtgggtgttttgtgtagcttttccaggggaatcctgggtggcatgtggttcctggcttcctgctcttgtcaagtaactagtggcctgattggagctggcagcccctttgggaaccgctgagtgctgacttctgagtctttcaccacggctgtgcactgagctctc

SEQ ID NO: 114655 - DNA, 1050 bp, Homo sapiens
gcgcttgcaggccgggcgtggtggctcatgcctgaaatcccagcactttgggaggccgaggcaggtggatcacctgaggtcaggagttcaagaccagcctggccaacatggtgaaacccccgtctatactaaaaatgcaaaaaattagccaggcttggtggtgggcacctgtaatcccagctactcagggggcagaggttgcagtgagctgagatcgtgccattgcactccagcctgggcaacaagagtgaaactccatctcaataaataaatagataagtaaaaataaaaataacttctccctttcggattcccgatgcggtggttgctgtaaggggtcctccctgtgccacacggccatcgccatggtgaagctgagcaaagaggccaagcagagactgcagcagctcttcaacgggggccagtttgccatccacttgggctttatccctcttgtgatttacctgggatttaagaggggtgcagatcctggaatgtctgaaccaactgttctgagcctactttggggataaaggattatttggtcttctggatttggaggcaatcagtggacagcatgaaagatgtgtgctctggctcggataagagatgggacatcattcagtcactagttggatggcacaaggctcttcacagatgaacctgtagcagagtggaacttgtactaacttatgatagaatgtatcagaataaatgtttttaacaatgttaaaaaaataaaaataaaatacacttgcagtaagtcacagtggcatggggtatttgttgaatgcacactctgtacaggtgcctggacaagcacaacatcagtgactgcccttgaccacttcggcacactggtgagagtcaagcttcaagcttattcccctgtcaaatgagaagaacactagagtcgtgtctcctgcttctgacccacctgggctgcacctccacactcggtggcgttaagatgcaccacactcaggggagtcattagggaggaaacagccacatcgccttgagtttctgaaaaccaaatgaatggcagtg

SEQ ID NO: 114656 - DNA, 1050 bp, Homo sapiens
tttatgttttgaagagttgaagaaacaaagaagaatataggacagagatagtgacccacaaagcctatccgatctttagaaaaaaacatttgctggtttgctggttggtctgttgatttccgcccccatttagagacagagtttcactctgttggccagattggtgtcaaacttttgacctcaagtgatctgcccacctcggcctcccaaagtgctaggattacaggtgtgagccactgctcccagcactccaccttgacctgttgattttttaatatcattggtgaataatgtgatcagtgggttgatgcagcaagttaagccctcagcaatttgaatgggctcttgtttgggaaactgattttagtttcttagtctgtattggtgccatcgcctccaaatgggtagattcaggagttaggaagttgaagcttttctgcagggtcccaacaatagtaaagaaatattagatgaactatgtgcctgtggttggattttcaccctctttcctggtttatgaacctgctggaaaagacacctatgagtccagccatgtattgactgtgtgccctactggaagaacccattggggaccaaaactctggtaattcacacaagtcattcacttctttctcttttgcatactgaatgctggctagacttccacaatctgagagcatttggtgttgccactttggaaaaaaaaaagatgttttttgcaattataaaaaaaagacagctgaataccatgttttctcatatttagaacaatgtttctttattgccctctaagaaagcttactgtaggccctccaaccttacctctgaacatgcagtgctcctctacccagcacagtatttcattgttatgtcatttctaataaaggaagaggaaaatctggtgaccttgttcatgtttaacttgtgtcgaaacttcaggcctcggtatggagccatcttgtgtaagtagctttttgtccattgcagaaacacaggaaagcatctcacaggagattgttgtttactaccgggacatttcaaccatctttc

SEQ ID NO: 114657 - DNA, 1018 bp, Homo sapiens
ttttttcgttttgtttttttgtttttttgttttttgtttttttttggagttgggggatggagtctcactgttgcccaggctggagtgcagtggcatgatctctgctcagtgcaacctctacctcccgggttcaagcaattctcctgcctcagcctcccaagtagctgggactacaggcgcacaccgccactcacagctaatttttttttttttttgtattttagtagagatggggtttcaccatgttgcccaggctgatctcgaactcctgagctcaggcaatctgcctgcctcggcctcccaaagtgctgggattataggtatgagcccccgcacccagccatttctgtacttttcatagtccccttttcagcataatgaatcctcaaggagccatgtgcaatactgacctagagaagagatctgattccttctggggatcagtaggggttcaatggatgggtggcatttgactattccataggacttccacaggaacacctgcagaaactgatgacattctggaacagaaaaataacatgtacagtggtcctcaaataggaaattttgaagtctgtccagaaatccacaaagtctattgagcaaaatgttcagcccatgcttctagtttcagactatggaattttgacttcttttgcaaggaaagtgactcactgatggcttttcagttgagtgacagggtcagagtttttaagattactcaagcagcgtggcagaggaggagtgggattgaagaaaggcaggatggaggtgaaaagatggatttggaggcctttgctgtacctagtcccattgagaggtaaccagagcctgtgctgcaggagtgatggtcatgaggatggagaggcgggaagccgtgtgagtgacaggcaatgggaggtcacctgccagtcggggtgctggcttctgggagcaagggccccttggcatggagggagaggatgaaaagtttccttcccttttttcctgaaggcagggctggccctatgcaatattt

SEQ ID NO: 114658 - DNA, 1133 bp, Homo sapiens
atgattgccaaaaaaccctatgctttccttttcctctgacaactaataacttatgtctcagttccttttcctcccaggtagcaatctgaacgtcagtataatctcaagctcagaaatgtgtgaagagtccctttaggcttccatgctaaaggaaactttatttttaagacttgatatgtttcatattttaaattcatatgaaattcctactatctcaagccttctctgcctgaagttttccacttgagcgaaatcatgatttttgctacctctattacccttttgaatggaaactttttaattcatgtaaagaaatctcaggctttttggtagataatactctgcatctaccaaactactgaaattctgggtatcgtttccctttcatctttagcattttgaatgaatcaagcatatatacatgcaacacttctaacttacctttgcaaattatttgtaagtactataagaagcatgcatgattagatctttaatgaagcacattaaataactgcagaaatcaaaactaacagccaagagaaagcatagactgtctttgacagctacttttgccaaacctgataattaccaagaatccaataatactgcactggggagtgcctgtgggtgaacttaatgagaaactcttctgaatgttgaatgaaaatgtgagattacagtacctaagccaggagaggaattggcctctttgctctcctgataagtgctgcgtgctatgacttcatccatttcctgctcggaaacctgattttcagcagaaagcaaagattagatggttttatttatttatttctcccaatgaaagtacctaggaccagagtcagagtcaagtgcagataaagaggcaaaccacagggccaaggattatgaccatcctccgaagctgtaactcagagcatgtaagaagtccagcaacacacacataacaagacttttcaactggtgcccaagttcattaagcaaagcattcagtgctatgattaccaacaacacagctgatatctgcctctccggaaaactcacttcaatttttttttttttttttttttgagacagagtctctctgttacccaagctggagtgcagcgtcttgatcttggctcgctgcaacc

SEQ ID NO: 114659 - DNA, 1076 bp, Homo sapiens
caggagaggttgtaggggagataaaagggataatataagaaagcagcccctcaattattaaaaactagaaaattataaacaacctcaaatatttttttctttttcagaaagctgggcgtggtggcgcatgcttgtaatcccagcactttgggaggcggaggcgggtggatcacctgaggtcaggagttcgagaccagcctggccaacatggtgaaaccccatctctactaaaaaaaaaaaaaaaaaaaaaaaaattagctgggcatgggggtgggcacctgtaatcccagctacttgggaggctgaggcaggagaattgcttgaacctgggaggtggaggttgcagtgagccgagaatgtgccattgcactgcagcctgggcaaaaagagcgaaactccgtctcagaaaacaacaacaacaacaacaacaacaaaacggcgttctgtggcctaaatggaggcccttcttgtcttcctggttttctctctaaaattatagagtacccacatctaacaaataccaccctgctttagacgctctaagagaactcagattagccggcagaagaaacatttacatctgcccatttttctctcttttggtatttctatgatggcagatgttcctaccacaaagaaatgatacatttgatgtgatggatatgctgattaccctgatttaatcattgcacacttgggtctctttatgccattcaccctctgatggcaaagccgcaagcgtcaggctcttgttctatttggttccctactcctgcgtggatgcagcagggccctcatggacctctcagtcccagtatctggccagtggtgtgtgggtttggctcacactgggggatgtgaatgatgtacttcagtgtaaaacagtccaagtgccgagctcaagaggcttcctttttagtgcaggggctgaggctaactagggaaaacatacagaatacgaaagctgggatacaggtctacaccgagctctggctgtcttgacgaattcagaggagtgggagagtgagaagccagattatcccaggaagacttgacagaggaggtggggacatgaa

SEQ ID NO: 114660 - DNA, 1114 bp, Homo sapiens
tgcctgtgatcccaactactcgggaggctgaggcacgagaatagcttgaacccaggaggtagaggttgcagtgagctgagatcgtgccactgcactccagcctgggtgacagagctagactccatctcaataaaaataaaaatatttcacttgaacatatgtattgaatattttaaaacatgtcagaagtgtcctgttaagctccagcattggtcccataacttcttgaggggatctctgaattcatagcagttccccttgccattggcagtgaatgacatttctgttcagcactcaggatttattcttccattagtttggaatggaagttttgaccaaaagagagcagaaaatacctgttctcttttgtatagtagaaaggagatcattttaaatgcattcttataaaatgaagaaattgcttttttctttaatgttcttcaaatatatttatattatttagtttggatcaacttctagtctcagcgggggaccagcaaagattacagtctgttttatcgtcagtgggatcgaaatctaccatcctaactctcattcaggaagcgaaagcacaatcagaggtgagtgaaacacagaaagctcaggaacatgaattgcggccgcgtgagtgcccaggtatgtgctgcctgcccagacagccgaggagagcccgccccgagtcctggagagggaggactgccttgggttgcgagtttcacagctcagtctgactttggcctcacgtgctgctagccagcttcagaagctagaccttgtcttgaatgttcaggtgccagatgggtgtcactgctgttttcatcccccaagtagcaactagttaccattctcctaactcctatgtgtggagtttgtttgcagagagtcctcaaagcagagctagtcatctcggaaatacctctcgccacctaactgtggacataaactagtcaagggagccacctgctggtgagagaagagttacattggtgtagtcccgccgttgccctgaaatatggtggacccctgaacaacatgagggttggggcactgaccttcgagcagtggaaaatccacatataacttttaactctcccaaaaacttaactactaacaa

SEQ ID NO: 114661 - DNA, 1054 bp, Homo sapiens
gttagccagggtggtctcaatctcctgacctcgtgatccgcctgtctcagcctcccaaaaagtgctgggattacaggcatgggccgccacgcctggccaagtagatgctttttattgagctctgtgaggtaggatcccagatcatccaagtaggagggggaaggtgaatgggtagggtttttgagaaaaagaacattattgtgaaaaatgagaggaaaaactgacaaggaaacaagtgctgagtggcagcgagggtccagttaaggctggaaactgtgaatttacagcagcagcgttctgtctagttgtgggattttcctctaggaatacggttataggaaccaagatgctggctatttggaagggtccagaatcgcctggtaagacacaacagtggggcaagggatctaagcctgtgggctgggcagagtttgctgtgctacgctagggttctggtctgagaagggaatggaagggtggagttctgatagggagaaaactgtcaagggctttttgaaagtgaagacgtgggaggaagtgaccaggaggctgggagcgtgtggtaaaagagtaggatgttcaattgtaagaaagatttagaggtggaaaagttttggattgtgtcaagattgtgagtgtggcctggaaaagggtggctaatttgagttctattgcctttgtacctctgatgcatttaggtgacaataaacatttctcatctcaatattactctattattaacaaacaaacagccaaaagagaaaaaaaaaatcaagtagtaagcagagtgtttattttttttaaaattacttaaaaaaggttgtttacagagatgtggatttatataacttggtgacaacatttttaaaatgtacaggctatttcatattattgcacttactctttaatatataaggcattttactttacataaataaaggttaatgtataatatcatacaaagttatggtgccaattaagtcaaccatcaaattcaatgagatgtgtgggaagatggaaatgaaacccagcctactttaatcttcatggtata

SEQ ID NO: 114662 - DNA, 2818 bp, Homo sapiens
tgaaaatttgtatccttccagaattagctttatattgttatcaaataatagcatggcctaaacaggctttcctacctctataggctgtatatgtgtagcagtttcaggaataacatattaatcaggaagcttttttttttagtctattagttgcagactggtgtttaatagaaaacttatttggctattggctgctttttgacttcagctggaaggaagctcaaacataatatttggctcatttccacataagactaagggttactgactctggtctgaagactgcttgcagtttagtcgtctgagtgactcctgtggctgaggatgtgctgggtgcttagaatccaaaggtctggctaggcttaaggggttcatggtctagttagggagaaaaacatggcagattttcttctgtttttcttggggcaaaatcagattttactgtttaatagtacaaaatttttgcaaaattagcagataatactcatcatttctaacttctgaaatcttttgtttaggtgagacatggaatccattaaaattgcattatcagttaagaaatgtacgggaacgattagctaaaaacctggtggaaaagggtgtattgacaacagagaaacagaacttcctactttttgacatgacaacacatcccctcaccaataacaacattaagcagcgcctcatcaagaaagtacaggaagccgttcttgacaaatgggtgaatgaccctcaccgcatggacaggcgcttgctggccctcatttacctggctcatgcctcggacgtcctggagaatgcttttgctcctcttctggacgagcagtatgatttggctaccaagagagtgcggcagcttctcgacttagaccctgaagtggaatgtctgaaggccaacaccaatgaggttctgtgggcggtggtggcggcgttcaccaagtaactctgctcggggtgaaccattctcctttctctcaagtaaaccagtagtttttcttctgttgacttctggttttctgtaatttgtactttcccacactataattggcttctgttttacaaaatggtgggtggctttttcttttttgtacgtgtacaggattctgctggtacgagaggccttcctctttctgtttttaaaaaaagttttactgccatattggcattccattccctgttgccatcctcactgttacctgttttgggtttctggtctactttgactttcaaagtacctccagcctcctcatacgcacagcttttggatgacctcagcttgagtttctccatatgtgcatgtacatctagcattctgcctacagttcagacagaagtcacaaaaaggccttcaactcaccaaaggtaaatatctgtatctattaggacattttttacatagacttcagttgagatgtatacttagcaaaattatttttaaattgaaacagcacagtaaatacttaatataaaatgtcccttggattttgcttcccatgtaaatctattgtattattacacttgttataattttaactataaaggtccaattgtttcacagagccagtttgggatgggctgcattccatttatgctgtatatagtttgaattatatataaattaccccttcttctggccacccctgctcccatcttagtattttgcaagatctaatcagttgtacacctggtgcccctcgcttgcttcaatcatggttatttgatggcaaaatcgacctcttgtcgctgaaggagagagaaaagatgtgtgtctgattggtcctgggattttttgagctgtgccatttatggtactctttgcctatgcatccccttgttagattttttttaaattttatcttactgtttttataatttctattgggaagaggcttgtgaccagtaccaatcttgagtttctttttctgtccacaagtaaattaatatctgctctgaaatgtcatttatctactcacacattcttggggaaaaaaatcaaatgtcagtcctagcagatgttgcatgtaaattggtagcaagtaatgattacaacccagaggattaagaattttgtaacagaaagctctatgttttaattttttatatacaattaggataattagcattgtcagactataaacctttgctttttaaagtttatttttactatttctttatcactttattgtatcatcaccattggtttcataatgtaaatactatatgttgaacaaattaaatgtcaaaattttttattaccatagtccatgttaatagtggggctttcaggtgtttagagattttttttgttgttgttaacattcattgcaaaagtactagatggtgtataactctagagttgaattttaagggattccctaatatgtatactatctttttatctgaagtaataaataaacaatgatcttgaaagtgcctgaatcagagcaagcatgtcatttgtgtttttgtattctcatttagttttctttcaaatgaaatgttacttactgtagcattgtaatattttaatgcagggcttgggtttcttaaagggccagatagtagatattttaggctttgtgagccgccagctgtgtcagttgcaactactgaactttactgaatgaaaactgttatagataatacaaataaataggttagactgtgttccaataaaactttatttgcaaaaacggggctggtcaaggccccagttttaatgcatggaaaaaagacagatttttctatccattggagtaaccttctttaccttcaaaaatgatactgctggtggtaactacatgtaggaactattaaa

SEQ ID NO: 114663 - DNA, 1027 bp, Homo sapiens
agaaatttgggtaaaatgtgaaactaatacttagcaaggttttttaaaaaacaatgtcctgtgagttttagattggctgttgatgccagaacattgcctgtagcacttgagttgcttgctcttgacatacattgggaatgctgctgcttcagaataaaggaagggaatccagagtgggagaaggaggaaaaaggactttttttaaagttaaaaaaattaaaaaaaatctcctggcaaataacatgtaaaaagaagaaaataaaaaatatctatttcccacctaattgaaagtatcaagataccagcttgctgattttttaattgtagtaaaatatatataatgtaacttttaccatttttaccatttttaagcatacagttctttggctagcttgctgatttttagatttttaaaaattttctgttgcttcaatataatatgtggtatcaaacaccagttattgcaccaataatgacatatgtgctatgaaatttaaaatgtgctctcagactgaaagaatcttaaaatccatttggggaacagttttatacatctaataatttgatagaacagatgagagtttgacagtatggttctctgaaagttcagtagttcagagaaaagaaaaatccttgggaactttagtagttacaagaggaagtggagcttagattaggcctttgaagggtaagaatgagatgcaaagaaagaaatatacttgttcagagggattccttgccgtgaagccaaggaatgttttaataaagaacagtttctttacctggggtggaggatacccaggggctcattttattattatttatactgtacatgtatacatgttaaaactcttgataaattttaaacattttctaataatttaaaattagtatacataagtttgaggcaagtcgagagactacgtattttgtttgttttgttttgtctttgggacaaagtctcgccatcacccaggctgtagtgcagtggtgcagtcacagctcactgcagtcttgacctcccagg

SEQ ID NO: 114664 - DNA, 1013 bp, Homo sapiens
tcccacctcagctacccgagtagctgggattacaggcgtgcaccaccacacctggctaatttttgtatttttagtagagacagggttttgccatgtgggccgggctggtatcgaattcctggcttcaagtgatctgcttgcctcagcctccccctgggattcaggcatgagctactgagtctagccaattttcattcattattatatctaatctggttaggttaaatattggatttccttaacataaaagtaatttaaaatctgaactttgatactacatgaaagcttgaggctttaagcataatgaattatttatataattgtttgtttttcatttaatgagatcaactcagaaaaggcattcgtggatcctttcattctttttgctttctttttaggtaatctgtaagtcagatgctccaacaggggatgttcttcttgatgaagctctgaagcatgttaaggaaactcagcctccagaaacggtccagaactggattgaattacttagtggtaagctgctgtgaataaaccaaaaaccaacttctgtttaaaagattgcgaagtttaaatccttttgaaaggaacctacacaaaatagccagaagcttgtttagttatttaggcaaacttgaaagttatcagtcatagagtggggaagtaatggtttttataaaatttcattctctttaacaatactgaacagatatagaatgcgaagataatactcttagagctcccatgttctttatcaaaattaccacatgctaccttaatctggataggctaggttaagctgtggtggtaacaaaccccaaaacctcagttgcttaaaacaaccatttatttctcattcaggctgtaagtcagtcacaggctacctcatcctcactctggcagccaggcagatggagccactgccacctggagcagtatcagtcactataataaaaggaggaataccatagcacatcactctggctcttaagtttctgcttagaaatgacatgtgg

SEQ ID NO: 114665 - DNA, 1017 bp, Homo sapiens
tacaaaattagccaggcgtggtggcacacacctgttattccagctacttggaaggctgaggcaggagaattgcttgtaccggggagggcagaggtttgcagtgagccgagattgcgccactgcactccagcctgggtgatgagcaaaactccatttccaaaaaagaaaaaaaagaaaccaagaaacctttcttacctctataatttgttagcaagttttaatgacatttgtttaaaaatttgtttcttcactgatgtgaaataccacctttataatataagattgagtatcctatatctgaaatgcttggtaacagaaatgtttaagattttggaattttctggattttggaatatttgtattatacttaagcattcctgacttcaaaatttaaaatccagaatgttccaatggatgcatgttggtgctcaaaaagtttcagattttgaaggagttcggattttcggattagggacgttcagcctgtactgaattcttaaatataatttagtcttatttctgggactaataataatgcttaaatgaatttctggatcacatagtccaaggttcggtgatgagtcagtgagtataaactgtcctagtatgttgctttactaattattgcacagtagcttttttttttttttttaagtcggagttttgctcttgttgcccagtctggaatgcagtggcacaatctcggcccgctgcaacctctgcctcctgggttcaagcaattctcctgcctcagcctccagagtagctgggattacaggcacctgccaccacgcccagctaattgtttgtatttttagtagagatggggtttcatcattttggccaggctggtcttgaactcctgacctcaggtgatccacccgcctcggcctcccaaggtgctgggattacaggagtgagccaccatgcccggccagtagcttgcttttcttttctctttgagatagtctcactctttcgtccagggtggagtgcagcggcgtgatcttggcttcc

SEQ ID NO: 114666 - DNA, 1065 bp, Homo sapiens
cctcgggaggccgaggctggcggatcactcgcggttaggagctggagaccagcccggccaacacagcgaatccccgtctccaccaaaaaaatacgaaaaccagtcaggcgtggcggcgcgcgcctgcaatcgcaggcactcggctagctgaggcaggagaatcaggcagggaggttgcagtgagccgagatggcagcagtaccgtccagctttggctcggcatcagagggagaccgtggaaagagagggagaggagggagaccgtggggagagggagagggagagggagagtcatttgcagcttttaaaagccataattttgaaagacttgacattaaaaactcagaagtgttattgtgcaatttacgcataggctattgatcttttcatcagattatgaatacttttcagatacctgtctgttgaaggtctgtgtaggtgcttctcttaatagaggtaatattggctagtttttagaaatttaacttcaacctcaatctcaaatatttaatactgtttttcttccagtttgttgttgtgtttcttgagcatggtgtttcaaaactagtttttttcctaaatcagtgtcctaatgaatctaaaagttttagatcagagcggaatgcatcttgattaataagctatagagaataatagttctgtaggaaagaacaccattcatgtatcttttttttttttttttttgagactgagtcttgctctgtcacccaggctggagtgcagtggcgtgatctcggctcactgcaacctctgcttccctggttcaagtgatttacgtgcctcagcctcccaagtagctggtactacaggcgtgtgctgccacacccagctaatttttgtatgttttgtagagatggggttttgctatgttgcctgggctgctctcgaactcctgggctcaagtgatccgctcgccttgggcctcccaaagtgcaaggattacaggcgtgagctatcatgcccagcccactgttttctagtatacagagttgcggtaaagtctggtgcccttctgattttcttttccttttttttttttttttt

SEQ ID NO: 114667 - DNA, 1118 bp, Homo sapiens
ctcaagccatcgtcttggctcagcctcccaaagtgctcggattaaccttgtggttttatcctaaacagcaataaatgaatggtattctaattctctgtgaagctaacttggctaggttgtctttgcctgagcttcttaacttgtccacataaataaatcactataatctggggttaactgagtattccttggagtttgcagggttctgaaagaacctaataaacacacagcttggtgaaatgtgagttatgtttctaaacttatgacctctaaagttatttgttgtttgtatgtaagaataagtggtggaaagataagcccccgaaaattctcgattagtaatttatgttaattgtattttttcagtatattattatagaaagacaggaaaggtaaaaggcaccaaatatgactttggctgataatatttctgttttttactctgaattcaaggtaaattagctattttgttttatttcttcttctttttttaatagggttacacatcattttggaatgactgtatatcatctggattacgtggctgtatgttaattgaattagcattgagaggaaggttacaactagaggcttgtggaatgagacgtaaaagtctattaacaagaaaggtaagaggagtgctgagtaacattctttttaaagaggttgtactgcttaaaatgtatgtttttactagtagccttcaaaaattaaagtggaagttgatattaaagttgtctttcttcaattgtatttccatatcttttttgcattcttggtttcctggttctttcacctacaatgagtaatgtaattgattgttaaggtaaccggccactggatcttacaaattcagaaagattctagacttcatttgcagcttttatttatttatttatttttaattttattttattattattattttttattgatcattcttgggtgtttctcgcagagggggatttggcagggtcacaggacaatagtggagggaaggtcagcagataaacaagtgaacaaaggtctctggttttcctaggcagaggaccctgcggccttccgcagtgtttgtgtccctgggtacttgagattagggagtggtgatgactcttaag

SEQ ID NO: 114668 - DNA, 1050 bp, Homo sapiens
gtaggtgtatttatctctacctttgttctgaacctctggtcagtttcctttttgtaattcctggcaaaactggtttgggaaatttggaaacttgaagtaccacttgacttctgatttttatttttttattttttatttatttatttttcttttttgagacggagtctcgctctgtcgcccaggctggagtgcagttgtgcgatctcggctcactgcaagctctgcctcccgggttcacgccattctcctgcctcagcctcccgagtagctaggactacaggcgcccgtcaccatgccctgctaattttttgtatttttagtagaggcggggtctcaccgtgttagccaggatggttttgatctcctgacctcgtggtccgcccgcctctgcctcccaaagtgctgggattacaggcgtgagccaccgtgcctggcccgacttctgatttttaggtcaagcccagagtcttccttaaagaatccttgggattggttccatgattcctcttttccagatactgcttagcctccagacgtatcagtagcctccaagcctccaaaatgactccagtcacaattaaataaaatagcacatgtaaagtgcctgatagttggtgcacaataaatattaagtttcattacgccttgatgctccaaatcagaaaactcaaaaggccttgacctcttccagcccttgtggtcagcagttctctccacctttccatattctcagctttggttttttttttttttttcctcagctttggttttttttttttgagacaaggtatgctctgtcacccagggtggagtccagtggtgtgatctctgctcactgcagcctcaaacttgctgggctcaggtgatcctcccacctcagccttccaagtagccgggactacaggcgtgcgccactatacctggctactttttgtattttttgtagagatggggttttgctgtgttgcccaagttggtctcaaattcctgggctcaagtgatcctccctcctcgtcctcccaaagtgctgggattacagatgtgaaccac

SEQ ID NO: 114669 - DNA, 1521 bp, Homo sapiens
ataccatgttgtgtagctaaagtgaaattagaggttatttagtatttatatgttccgtttaatccaagtattgaacagcttctctgtgccattcattccctttgccagatgctggggttacaaagaaaaaaaatatatatatatatgtatatatttttgagaccaagtcatgctctgtcgccagactggagtgcagtggcatgatcttggctcatgcaacctcctcctcctgggttcaagcaatccttgtgtctcagcctcccaagtagctgggattacaggcacatgccaccatgcccagctaatttttgtacttttagtaaagacggggtttcaccatgttggccaagctggtcttgaactcctggcctcccaaagtgctgggatcacagatgtgagccgctgtgcccccggccacaaagaaaaattttttgcttttaaggagcattcagtctgcatagaagacagatttgcgaatgatttcaataaagtgaattattaactttatcctgcctgcctcttctgagttactaacttttatgggagtatgtgttaggtgcagtaaggatgtacatagggaggatgctttggatcaggacctgcaagactgctgtgttcttgacacctagccttgcccttgagtagttgaaagaattagaataaatattttgaattttagaaccttagttttctcctgggcaaaatgggcctacttttttattttttatttttgagacggagtctcgctctgtcacccaggctggagtgcagtggtgcaatcttggctcactgcaagctctgcctcccgggttcacgccattctcctgcctcagcctcccgagtagctgggactacaggcgcctgccaccacacccggctaattttttgtatttttggtagagacggggtttcactgtgttagccagtataatcttgatctcctgacctcgtgatccgcccgcctctgcctcccaaagtgctgggattacaggcgtgagccaccgcgcccggccatgggcctacttttgtgttctgtccgaaagcctctaagttgtagggatccaatgtgttggcatatgtgagtgctttgaaaaccacatggtgctgaacaaatgcaaatgggtaattacctagcctagagaagtaagttaaagtttatagtggtcttgacaagtgacaagtatttaatatttccattatttttactatttcttgattctcttgcactttatatgctgggcttactgaacgttttactcaaattcagatgctcatctatgcgtgtatttttttaaaaattttaattttttttttttttgagacggagtcttgctctgttgcctaggctggagtgcagtggcccaatctctgctcaccgcaagctccgcctcccgggttcatgccattctcctgcctcagcctcctgagtagctgggactacaggcgcctgccaccacgcctggctaaatttttgtatttttagttgagacggggtttcatcgtgttagccaggatggtctc

SEQ ID NO: 114670 - DNA, 1069 bp, Homo sapiens
gtgcagttccttgttctttggatgaaaaagtaaactaggggtatagcgtcctagtaatgtaatttttagaaaatattcaactttaggtttcaaaattggaaatcttgattataaacatttgtctttttttttttctttttttagacggaatctcgctctgtcgcccaggcctggagtgcagtggcgccatctgggctcactgcaacctccccctcccgggttcaagcgattctcctgcctcagcctcccaagtagctgggattacaggcatgcaccaccacgccctgctaatgtttttatttttagtagagacggggtttcaccatgtttgtcaggctgcttttgaactcctgacctcaagtgatccacttgcctcggcctcccaaagtgctgagattacaggtttgagccaccacgcccggccataaacatttttctttttggacaaaaataacattattatagacattttagaaaatacaaaaaaaaagaaaagcaaaattaaaacatattcctgagtgaacattttggtttatagtttttgagagttttccgtgtggataaaactcggtggaaaacaaaaacctgaaaaaaaaaaaactaaaaaataagcttttggtgttctgagtcacactgagaaattatagtgaggaaatacctatttgttttttcaagtacatgttactctaaatcaagcttttccaacccgcgggccaaatgtggcccaggatggctttaaatgcggcccaacataaattggtaaattttcttaaaacattatgaaattttttttgcaattttttttttttaaagctcatcagctattgctagtgttagtgtattttatatatggcccaagacagttcttccagtgtggcccagggaagccaaaaggttggacacccttgctctaaatgtttaaggtgaagcatattaacatgctgtttttcggtgattgggtcttaagaagataatctaaataatttgttgaagtttaaccatactcacataatttaaacaatttaaagttatttggcgggtaattgaaaccatgtgttctgtttatttt

SEQ ID NO: 114671 - DNA, 1576 bp, Homo sapiens
gccgccgacaaggagcgggcggcgggcggcggcgccggcagcagcgaggacgacgcgcagagccgccgcgacgagcaggacgacgacgacaagggcgactccaaggaaacgcggctgaccctgatggaggaagtgctcctgctgggcctcaaggaccgcgaggtgcgggcgcggcgggctgggcggggggcggcggcgcggggcccgggcgccaggtgagctccaggtaggtgccaggtgagcgcccgaggcttccggcccgcgcacctgccctcgctccgaagtccgcgcctggtggcgcccagctgacgccgagcggtgtcggagttggttgaccccctggcgcggctggtgctttctggatcctccccgtagagatggcttggatttttccttacccctttcacagtcgctcctttcatttcgacaccctggcagtttgtatttcttcgtcgccttttttccgcgtttttaacccgtgtagaccccagggtgcaaatccaacccggagactgcccgggaaactaacagctggagccaccagcgccacgaactctttgggtttttgcaggctttaggacctgggaggggtgcccggatctgcttgctggggatgttttttttttcttcttcttcagttaaagcttactgttgggaattacgaaaaacgtaggcgaagtggtaatagagggaaaagctcttttactgagtaaagttaagttaagtttctcatgaaacctcctggtaaatgactttctaggtgaacttacattaggtgagagattatttttagtatcgcttttatattttatcagttgatgaatctcaaagtcttgccgtcttaagaaagggctttttcatcgagtgcttgaaatgtaggtttgtgagttgatcagaggcctcaaagcttcaggtgggttgaagttgcaatagataattctttgtattctgactttgaaagcgtttattttcacttcagtgtccaaaattttcacacacagaaaagttgaaaaagtgatagatacatatgcatatatactctttctagattctatgacgttttgctgtatttgttatatttgcctacaaaaatgattatttatttatgtggagacggagtttcgctcttgttgcccaggctggagtgcaatgccgcgatctcggcttaccgaaatctccgcctcccgggttcaagcgattctcctgcctcagcctcctgaggcaggcatgcgccaccatgcccggctaattttgtgtttttgttttgttttgtttttgagacggagcctcagtttgtcgcccaggctggagtgcagtggcgcgatctccactcactgcaaactccgcctcccgggttcaagcgattttcctgcctcagcctcccgagtagccgggactacagacgtgcgccgccatgcccagctaattttcatacctttagtagagacggggtttcaccatgttggccaggatggtctcgatctcttgacctagtgatccgcctgcctcggcctcccaaagtgctgaaattacaagcttgagccaccgcgcccaggcctgattttaagaaagtttt

SEQ ID NO: 114672 - DNA, 1396 bp, Homo sapiens
cggactgcagggttagctggtcctgctgtctcgtagcatctttttgtttttgttttgaaacagggtcttactctgtcacccaggctggagtgcagtggcacagtcatggctcactgcaacctccgcctcccaggctcaagtgatcctcccacctcagcctccctggtggctgggactacaggggcgtgctactgtgcccggctaatttttgtatttttagtagagacagggttttgccatattgcccaggctggtctgtaactcctgggctcaagtgatccacctgcctcagccttccaaagtgctaggattacaggtgtgagccaccacgcccagcctgtatctaacttaagagtaaaactttcatgcaaggtattgtgtggaggcctgaggacacagagtgggaatcctccacaaagtctaagaacaggaaatacgactatttttttttcttttgaatttttaatgaccaaaacaaagcatctaaaaccgcagcttctggaagaaccacttgttcttgcctgtcttatatctctcttcaaacttgaccttggcttctcgtggggccttgcgtttaagagcagggtctctaaagacatccttattgatgacagttttgtctaagggaataagatacccacagaataccttgtggccattaggtgattgtagttataaactttcacaaaagacttgatctttgacctcttggagatcttcttcttgcccatggcagctgtcactttgaggggatagcggtcaattccagccaccagagcatggctgaaggggctatctgaggtgccatcatcattgttcttcacaatgatggctttgcgtccagcgtagcctccagccaggacaagcaccaccttcccaggtttcatgaatttgcccattttggcagcaatcactcgggcctacagcaaaaaggcggaaattttgggctgttaacaaaagtccaaggctcccgctgtcattgtaaaacaccactgctggggaggtggtggtgatggaagcagggagctatagctctgcctgcctctaactgccagaagctactgacaccagaaggacatcaccattgccgaatggccaagttgacttaggtcaatctatgacatcctaccagatttactggaaattctatcataattacattatagttgatttactggatattcatggttatatctgggggcctccttgctcattccttagagctgtgcgggagcccagggcatatgaattctgctggtggccttctgtccaccatggctgctgcctaggagctctttgcctgaggtctatatgtgttagtttggattcccccagaagcaggctctggatcaaggatttgggtgcaagtggtttatctgggcagtgttcccaggta

SEQ ID NO: 114673 - DNA, 1027 bp, Homo sapiens
atgttccgtcttgattgccttaagagttactagcgaggtcagtgttaggcttgcaatagggattttaaaatacactaactagttccttagctaccttcacatacattctataggccttcttaaattagcactaacctccacttccttctctgccccattgcctcccaaatatgctatggagctatttttgttaccacgttataacgtgaatatttatacagtagcctcttcaggctttgtaattttcattccaaaaatgcccggtgtgatgctttacactctacaaagtatggtttaaaggcacaaggtcatggcctttgtcatagcagttgaatgtgcattgacatatttttctatgattttttaaaattacaatagaaaaataagctgttgtaacgtgtaaggtcatgacaatttttgtatttatatttgaaatcagatttctataactcgtatttgtgtacagaattctcaatggatttatatattgtgaaatttttatctgagattgggatgtggattatgcttaacagtgagagctgaaatgagaccatttactttgtttaaaatgctgtactgtgcaagtttggaaatgtaaattaatttactgtatataatatcttgagtttgtttatacctccaagtttttacactgaagataaactagctttaattcaaaactttttttttctttataagggaataagctgttgagctaaacctgtatacttgtgctttttattttctggatgcacaatgaaagtttatacttgtatctcactgcatcatatctgattgcagaaattaaagcacaatttacaagcaatactgtacttggtgtggttggtataacacatggagtaatccgtttcattctttcaggaaatattgagcatgtactgggtacttggcagggccagtggggacagcagggaagagtgcagtttgcgttcttgtggggcacagggaggtttggtggtgggaaccgataaccaaacaaatatttataataggtgatttgcagtta

SEQ ID NO: 114674 - DNA, 1067 bp, Homo sapiens
catgaatgggcctgacccacaagttcccctaaatcattaaactatcttaagttaaacagctttttcagaagtgctttgtgtcctgtggtgcccctgtgacagaggaggagggcaccaaaagctcctttctctgtgtcccagcatgcctttctgcacagctgccacgtgcacctgcttccccatttgtttctggtacagtgtgcaccatggcaatacacaggaataccccacctctggatgtcacagcgtgttaatgagtgtgcattcacatggcaacactgatgtctcttggaacttgttaaagcagggttatgctctttttgttatggtaacagctgttaactgtgcctgttatgttaaccagtgatttttatttgtgttttctctcaaagcatcaacgacaactttctttgccacttacacaatctaagtcatctcccaaaagaggatttttcagggaagaaacagatcatttaattaaaaaccttctgggcaagagaattagcaaacttattaattcttctgatgagctccaagacaactttcgagagttctatgacagctggcatagcaagtccactgactaccatggtttgttgttaccgcatatcgaggggcccgaaatcaaagtctgggcccagcgctacctacgttggattccagaagcccaaatcctaggtggtggccaagtggccactctgagcaaactcttggaaatgatggaggaagtccagagtttacaagagaagatcgacgagagacaccacagccagcaggccccccaggctgaggccccctgcctgctgaggaactctgcccgcctctcgtctttgtttcctttcgctctgctccagcgacattcctctaagcccgtcttacccaccagtggctggaaagctttgggagatgaagacgatttggccaaacgagaagatgagttcgtggacctaggggatgtgtgacctgtttgttgagtgattgtgaaagaggaatgtgggagattgggacagctgatccctggatttgtgtcacgctacagctcatgctggctgggtccttagcccggc

SEQ ID NO: 114675 - DNA, 1222 bp, Homo sapiens
gataatctcagtgcttctgagcagcctcctgagggctacaggctttgcttgagctgggaggattaccaaatcccccagtgaagtaggagcaacagccctgctttcagagctcagccttgtgactcaccagctttgtgaccttgggcagttcagttttctgagccttggtttcctcaaatgtaaaattggaaaaacaacagttgcctcgcgaggctgtggaagcacccagcacagcggctggcgtgtagactgctggaaaggaagtgtccttgttcttgccctcctcccacaccaaaagcttgtagtgaataaccacaggtagcctcagccttaaatgcccatgattattcattctcagggcagagcaggagcatgcttcctggtgcctgtgtccagaagtatgtgtttgccttcctcagccctccctggaaaacagcatgacctgtgcttgttttggcagggtagagaaggccaggatacacaaagcaagcctttgaatctgctcaccgtgtgggattggtcggtgcagtttgaacccaaagcccagacattgctcaaaaaccctctttatgtggaaaagccaaaactggacaaaggccaacggaaaggaatgcgcttcaaagtaagatgtccacatgtctaaacccccttcagctgcccagaccccgtgcatgtaatgataaaaggtacttacggattctgtctgccagcattttctacccctcgaagcagtctgcagagttgagacttgtgatggtcaaattgtcaagggccattagaatcctttgctttcagcaaatcacctttgccctggtacaacagggccatttgccagatgtcactgtggatgctgccaccctggtcatactccatggaatcgtgcctcttgtcctgcctgtgtgtgtgtgtgtgtgtgtgtgtttgtgtgtgtgtgtgtgttagtagagtaaaaggaacattgattgtgtgggttttacttggccgataccagttcatttattataataaatagtaagacttttcttaatgagctgtgcctgtaaaccacaggttgcaaaactctgtcaagggctgcaaagtctctgtcacaactacccctctactgttgtagtacaaaagaagccttagtctgctctgcccttggagtagccattctttattcctttacttgaaaaaaaaaaaaggagccttagtaggtgaacaagtaggcatagctgtgttc

SEQ ID NO: 114676 - DNA, 1203 bp, Homo sapiens
ggctggagtgcaatggtgcgatctcagctcacggcaacctctgtctccctggttcaagcgattcttctgcctcagcctcctgagtagctgggattacaggcgtgcaccaccatgcccagctaatttttgtatttttagtagagacggggtttcaccatgttggtcagactggtctcgaactcctgacatcgtgatccacccgcctcggcctcccaaagtgctgggattacaggcatgagccaccgcgcccggcctacaattcattcttaagtttctctaacaccaatgatactagcaccatcctcctcatggacattttttaaaaacaactcgagttgcacctatttttgtgaaagggaaactatggggatgtagaccctgacttttaggatcttaaaactcttaagacaaatgcacggataaagatatgtggttcttttgctctaagtcatgaatgttaaacaagtatgtgagtggacttttcatcaaatgagttttggaaagtgcatggcaggtgggcatgtagaagtagaccaaggagagtttgtctcctaggataggcaggagaagcaggcacctctgtgcccctcaaacagaaaaggacagagccttagagctgaaaatagaaataattttgctacagtcaagaaatattaaactttctccaaagtagagttagtggaggacttaggagtggaggaagggatgtctgaggtgagtttgagaagcagctgagccatgaaatagtgagttcagtgacggaggcgtccacaccccaggaggagttcagtgacggaggcttccacaccctaggagggaagagctttagtcttggcctgcggagcctggcaggtcatcattatgtgggtgattctcctgtctctgtgtggcacacctagacccccacaagctgaaagtagctttgcagtgctgcatttatttattcagtatgcaaatccacatttagtaccagcgtatgccagaacctgtactagacatgctagagcagttcatgtctcagtctgaaaacataaccctttgttattggcccttgcctttagggaataagaacatgactgttaatagtagaccttggtgttgggaatcctacttttaactgtgcaagtgagagcattctgaaactttttaacattttatgccctccttcctctttgcactgctgctggggcctctcctagagga

SEQ ID NO: 114677 - DNA, 1138 bp, Homo sapiens
cagtttctaatgggcaggaatatatcccagtatctaaataatgtaaatggaagttcgtttcttttctagaggattttagcgtggaaaaaaaaaaaataagagagaagactgaagatcaagtcagactctctctcaactacgtagtgtttgtgttaccaagctcatgaactaatgcccctttttcttgtctctttcctattcagacgttgcctgaaaaaagcaatagagattacagaatgtatggaagcacaaaacatgaatgttcttcttttaggtaatatataggaagcacaaaggatgatttccattttccttcacttgagattcaatttttgtatatgtagctttatgtatttggaaacaaaaggagtgagttagtgtagaaatccttcctattcctttctccctaaccttggaatcctttgccttggatttcagtgttagagtttaaaacaaaattctttcactttgcacttggcagacctattcacagtccacaaaggaattgttggtatctttaccaaagctcacatttcttaatgttttggattttgttttatattaactgagcttggttaaatttaaaatctttttagaatccctcttatataaagagatccatggatgacttggttgttatttttatatctttgtggttgacaactttattcagttaccatagaaacttggtggcctgtgagttccttttcctcagtgggcttaactcgctgtacatgatgcaaacattcagaatgtgcgaaagcaagtgtgaaccaccatgcaaggaagattggtgctgtaactagttacatatgagctaaaatattacctgctgtttagaaatactatgtttcgtttagccccacactataaattaagtagattgtctcatgctttatacccccaagcttttatcattctctgaaactctgtaactgttggccctgggttctaagggcagcctggaaaatgtatctttctgtggcttctgtccatctgatattggctgaccgacttagatttgaatacatttattgagcctctgccatgtgcagggctctgttccgccttcaagaagtttgcaacctaatgagagagttgccttaagtgtgctattgaaaaagacctaaccagccgt

SEQ ID NO: 114678 - DNA, 1638 bp, Homo sapiens
acctgacatgtaataagctgcacttgaatgatagctactatcctaataataataatgttgttgttgtcatcatctgggttaccagctgatgataagtcaaaaggtatatgttagaccataagtctgtgtctgactacctagacctgttttattttttaaaactaaatcattctttttcattgtgactaaatactcccaggcttaataaagttaagtatgtccagccatttcatactgaagttacagatttccctgtatgcatttaaatgctaagcttatgtgtcccctgttgggttgtgtttattgtatctggtaaagctttatttgtttctacagatatggtgttggtcctgccacaatggaagtgcccttttgaaaatgtcagcactgcccaaagaacaggatgacggcattttacaaatccaaaagagcttcttagatgggtcagtactagttctacattttgttcttgttcagttcttgttttccaagaagcagggaacagctcttagtagtatgtctatttctgtttacctactggtagcttaatgctaggggaatacaacttaacagtgatcattttgagttaatttgaaaggagtcagtataacataataattaagagtgtcacctgcgtcgtttttagaggtgcacgctaaagtcttcagtggggaggtgacatgatgtctgtaatgttaacagttgtcaaatttaggtcatggtacatgtcacaatactattctactttctacatgtttcaaattaaacaaaacaaagcaaaaaaaacccaaagtagatgaatttaaaacaaaaaagaaggaatagactcagagttacattgccttggtccaaatcatggttctatcagtttataaattggatgatcttgggccaggcagttttactttatgcacctccatttccacacccattgactgggaacaggagtcctgcagcaattgcctggtaggtgaagattaaatgggagaatgcctactgagcccttaacacagattgtggcacgtagtaaatccttaagcaaaatttgagtttgctcttctaatctcatattcctttttgatacctagaatttacaagaccatccacaggccaccctatgaaattgttaaaacggaagacctgtcaagcaacttcctgtccctgcaggaaatccagactgcatactctaaatttaaacagctatttctgataggtgagaagaatactgagcaaaaacttttgtgttatatggggaaagacatgccatgcagatcaggtgaaagttggtgccttttccctgggttccttacgttagtacgcagagcccagggctgtgatgtcatggagccaggggtctggctgccattaccacacttccctctccatctctctccaggctttccctccccgcctccttattgtggcagtgatcacacggccaccctcctcttctccccttcctcagcataccatttgcccagtggtgagcattttggtttcttcctttaaaagtttttgaactatgtagtatttatatttgttgacttgcagtaatttataaagtgaataatgttcgttttcctctgtagactttttcccaaagtggaaatactttaattttttcccctgattgggaat

SEQ ID NO: 114679 - DNA, 1157 bp, Homo sapiens
ggggacctgcgtcagtttgggtaagaacaaggaactgtctacttcactttcccacaaggtcagagctggctattctggtaccacaggtctcttccttctctttttcattctcctcctaacaaacctttctcccatcccacttccctgtaaacgcataggatggtatgtggccctgtggagtgtgtaccacacagagggacctaggagctgttgctggcacaggaagacattgctgttctgggaggttgtgcctgagtagatacacaattttccatgagtaaagtcatctggtatttgcaggaactgtttactttgtgttctaagctcatcttaatgactgaaatgactgctttccaaggagggaggattgattgcttgtgtccaatgggaatgtcacagtggggactccatggaatccacctggaattaagtggtcaggagaggacaccctccacacctctcactgactgcagtgctcttcgtctctgtacagccttctctgctcggtgatggatgggatatttgccaatacatttggttctgacttttttttttttttttttttttgtgaaagaccatctataagaaaactcaccgatgaactaacagtgtaaaatattcaacctcactagttggggaagacatggaaattttttaaaaccatggggccccagtccagctttatagcatgagccactgaggaaggagctcaggatctggtttaaacaactgcacagatgactgtcctgaaaaggttgagaaacagtggcctgtttgtaagctaccatctagagcagtgcgtctccatttaatgtgtgtctaatcgctggaggctcttgtctaatattcagaatctgactcagtaggttgggggaggctagagcgtctgcagtcctcatcagcttccaggtcatgctgctgaaactgtgagtagcaggatcttctggaacaacagtgttcatcccaactgcttacctggagagcttttaagcttctgatttaatagttcttggatggagcctggacattggtaatcttttaatcttcccacttgatttgaatgagcagcctgagtttaagagcagttgatctgcggagaggtttttacttcaatgactacacctgaaaaagggatgccttaccagtcacccattcag

SEQ ID NO: 114680 - DNA, 1142 bp, Homo sapiens
gatctttttgtgttatataaattaactcatggtcagatgactagaaatggagctataaattacttttccaaggaatggaactcagttcctacaatgtaaaaagacagctggcctggcgcgatggctcactcctgtaatcccagcactttgggcacctgaggcaggtggatcacttgaggtcaggagtttgaggccaacctggccaacatggtgaaaccccgtctctactaaaaatacaaaaattagccatatgtggtggtgcgttcctgtagtcccagctactcatgaggctaaggcgggagaatcactttaacctggcaggcggaggttgcagtaagccaagatggcaccactggccactgcactccagcaggggcagtagagcaagactccatctcaaaaaaaaaaaaaaaagagactcagtcataattttggattaatgacaaaaaatggaacaaggttaggattaagcaatcaattcattctgcttggataaaaatgggcttagtggaggaaaccaaaacctaaggagggactttcacataataaaagcaccagtgcttcatggaaagattttattgtcttttacattttgttctcttagtcactgatcccaagaaccataccgtaatgtttgacacacttaaggactggtgttgggaactggaacggaccaaaggcaacatgaagtacaaagcagtgagtgtcaacgaaggctataaagtctgtgagaggtaagctttccatgctgggcacatgctgtacaattcacccattaaaagtgtacagtgttttttagtatattcacagggttgtgcagtcatcaccacagtcaatttagaacattttcatcctcccaaaaagaaactccatacccattggctgtcactccccattttccccgaatacctctctttcttccccagtcctagacaaccactaatctactttctatcactatagacttgcctgttgtgaacatttcatataaatggaatcatatcatatgtgatcttttatgacttggttctttcacttagcatgatgttttcaaagtctgtttattttgcagcttgtatcagaatctcattcttttttattgccaagtaatgttccataatgtggatatagcacatttaatt

SEQ ID NO: 114681 - DNA, 1051 bp, Homo sapiens
ggctgggcaggatggttcatgcctgtaattccagcactttgggaggctgaggcaggtagatcagttgaggtcaggagttcaagaccagcctggccaacatagcgaaaccccgtctctactagaaatacaaagattagtcaggcgtgatgatgcaggcctgtaatcccagctactctggaggctgaggcaggagaatcgcttgaacccaggaggcaaaggttgcagtgagccaagatcatgccactgcactgcagcctgggcagcagagagagctgtctcagaaaaaaaaaaaagttaaaaataataaaaatttttaaaaaagaaagaaaacctcacaaaatggttagcatcctgttgatttgccattattccaaaaagctaatgtcatagatacagatctcaaatgagaattaatatgttgtccattggaacccctttggcatgactaagaacttagacaccttgactcttgtctttgttagtgtttatctgtcaaaaccataactatatccattgttcgattcttttttagattgtcagtggcataattcatcatacccaggctcctaaactgcttaaacgattatttctgttttcctatgcgactgctgcacaaaacaatacaggtaaatatcttctgggttctaatttgagggtaagcagaagccttccaattcccacctgaagccagtgggggagaacacatctatgggttgttttgttttttcctgtctcctctaccaattggtcaccccttgcttgagtgattcatttagatatctacattttctttcctgtgatcttttttttttttttttaaagatggagtctcgctttgtagcccaggctgaagtgcaatggcatgattttggcccactgcaatttccgcctcccgggttcaagcaattctcatgcctcagcctcctgaataactgggattacaggtgcccaccaccatgcctgactaatttttgtatttttggtagagatgaggtttctccatgttggtcaggctggttccaaactcctgacctcaagtgatccatccacc

SEQ ID NO: 114682 - DNA, 1026 bp, Homo sapiens
ctgggacagtagggggtctcagcaggggtcctagctgtaaacccaggagttgactgtcatgaaagcatgtctctagtcatttccctttcatcttttataagctcaactttcagagtgggttttctttgggccactggaatcagttctgccaacagtggccagtctgttcttgtgcttactccagaggagtgaagcacgctgactgctctcagagagccagggcccctgctggaagagattgggcttcctttggcagtcacttaaaagtcaggcagcacctttcctctcattcttgggaagtatccctagaagttgatcatctacttcatttctttagcattcacttattgctgtgtaacataatttcccttcctgatttcattgctgatctgtagtgtttgatgagaaaaagaaaactctctttggacaactgaagaaataccctgagaagctcatcatccactgcaaagaccttcgagtgttccagttttgtctgaggtacacaaaggaagaggaagtcaaaagggtaactagttgcatgtgtttttaggttttatttcccatcaggttttccccactagctctagtttttgcttacgttgcatgaaggttgaggggaggctttcactctgtgaacttgaaattggttgtaatcccatattctttgattagaacgtgaaaagtaatttgataaagcatgcgtgtgtatcatcttggcacatgctacctttaatacttcaattcataatgtttttattcctggagccactaaatggtgggaggtggtaaaccaggtcagtaggcggtaggggaaaatgaagaaaggatgagacagctaaaagtttatccctattctcccacctctgacagtctttccaaaagacagtagtgttggagaattccaacttctatgagtaaatgagtttacctctgggaggtagtagttgtgcatggaaaggaggaagtacacaggtcagatgagcaaagccaaataatcagacatgcttttagagactaaataaacat

SEQ ID NO: 114683 - DNA, 1217 bp, Homo sapiens
taaacaaataaaaagtagccataacattggagtaaatgttgaagtaaggaattaacagtggcggggcagggggctcacacctataatcccagcactttgggaggccaaggcagaaggatcacttgaggctgtcatgcttctgttccctctttttttttttttttttgaaatggaatctcgctctgtcacccaggctgaagtgcagtggcacattcttggctcactgcaacctccgtctcccaggttcaaggaattctcctgcctcagcctcccaagtagctgggattactggtgtgtgccaccacacccggctaatttttgtatttttagtagagacggggtttcaccatgttggccaggctggtctcaaactcctgacctcaagtgatccacctacctcggcctcccaaagtgctgggattacaggcgtgagccactgtgcctggcccatgcttctgttctaattgaatttaagccccactgagatattctagtttagaaaacctggacgtgctgtgatcctggtgccagcagtttttgcctttcctttgtgccataatggcaagctttgttcaaattcaaatggagcagcaagaggtggtatacaaagcacaaagaccatttttaactgatgcatttgttgaaaatttccataattttcagagttagttttttaagaaaagtctgtcagcctaaccagtagaaccagttctgcttgagtattaaagaactataccttttctacctttttgctgcacattgaacatgatagttagtggaataagtgaggaatgttacctcgtgtttcacagctgcagaagtaaggttgtcaacatctactaactaggtagttggtagggagtgtcagagttaaaggcgcagaggcttaagggcaactctagacccttctgtaaaactagtttatggtttaagaagctcccaccaccccaaagaatagggatagtacacaggcagctctcactggatgctgattgaattggctgttagatcctgggatgtgctgggcctatctactgctctctctgaaaaggcttcacaagtaatagtctttccattaagctttagaggaatcctccgtttttcagtatattgcaatatgagtagagcatttggtgatgccatccatattagtggctaagcctagctattgtttcttttctattctttttttttttttttttttttgagacagggtc

SEQ ID NO: 114684 - DNA, 2199 bp, Homo sapiens
ggacatagtaaactcctatgacatatttttatgtgtttaatttaggcatatatcattgtggataatagattcgtagtctgaaatgctctgttgagtttccaagtagccctctgaaatgaatacaggttgagtatttctaatctgaaaatccaaaatcccttgagtgtcatgtttggattaagaatactcagcttgtccattttagggctgagaactgatttgcataacgcgtaaacagcagaatactgaaagaccaggtaccaggttgaatttgtgtatgtggtttgttaccttgagaccagacgttgtcagttagcctcttactgcatgtctgcctccctggcttcagatgctgttctcttggtttgttgtcagagtaattgttgcttgtaactgccgaaagtatatagctagtggaatagagctgtggtcagcagcaaagctgcctcctgtcatgctttcagaagcatggggaatgagcctgctagtcaggcctgctcggagggagccaagccttctggccaggagtggggtaccagcagccttgggaatcagcttcaggaaacaaatcctgttttggtttttagcttcctacagctggatagtagatggattcattcagtctttagtctgtattctcagtgagaaagctccaaattaaaagtctgaccttggctatgcccctactctattagtgagaccagaatgtgtttctggaagccagctaagggaagaatgtgacaatagttcggtgatacttggcactaatacacttaggtaggaatttttaatagagcaattttgttaatttcacaagagctatgcataggattgaagaatattatccggatcaagaattattgtctctatgtatgttttcatgtgtccattctttcagcagacttactgacaatttactgtcttgtcaggaattatatgctagaagttgaggctaaaaatccataaaggtacagcctcagccctcagtttgtatcattggttggcaagacagacaaggtaagagactcttgcagttcagcgtgaaaagtgctatgcttggccaggtgcggtggctcacacctgtaatctcagcactttgggaggccaaggtgggcagattactggaggtaaggagttcaagaccagcctagccaacgtggtgaaaccctgtctctactaaaaaaaaaaattaaccagatgtgatggtgggcaccagtaatcccagctactaaggaggctgaggaatgagactcttttgaacctgggaggcagaagttgcagtgagccaagattgtgccactgaactcctgcatgggggatagagggagactctgtctttaaaaaaaaaaaggaaaaaaggaaaagtgctgttctggaggcatatacagagtgtggtttgggtatctagcaaaggggcacctcagtgttctgatggagagagttttgaccacagaaagcctcacaggacctgaactgtgtggacagtggatttgacagtgagttggatggacaggagtggagacagtgggttgggtggtcccagaggatgcagtaggggccagttggaggcagtgcgactggcagtcgggagcatgcgagctaggaaatgatggtggcccaaagtcagagcgacaacaggaatggatagacgtgggcaatatggagcagagcacaggctgtgagaggcagggagtaggtaagagtgactctcaggtttctggtgtggccagctggatggctggtcctgaaccagagctcagagcattagatttggcaaggggtggcgatgagctgattttgaaatgtcaatttgaaggatatgagggacattctggtgcaggtggccaggaggctgttgaggtgtccaggcctacagctctgaaggcagatctggagtgaagtaccacttggggatcatcagcctatactgttgaaacacctttgagtgagagagctcatccagggaacacagggtttgtgaggaagtaagaggaccctgcccagaagggagacttgaccaagaagagcccgagaaagtgagtgttagcctgtattaggattccctagagggatagaactaataggatatatatctcctatatatatctggagtttattaagtattaacttacatgatcacagggtcccacaacaggctgtctgcaagtctgaggagcaaggagagccagtcagagtctc

SEQ ID NO: 114685 - DNA, 1036 bp, Homo sapiens
gattttgcaaagttctgatccaggctcagccacttggtggtgaccttagacatgtaacttcacctatccgagacttccttttcttacctgtaacgtgaataggtgtcttccctgcaggctgatttagaggatgagaagaaataaaccatataaacccagctaaggacttgacacatggcagatactcaacaactgctaggtgctgttattattaataacttgaactggaagatttgttatttaagcaacatttttatgtatctaccatttgctaagcactattaaaattaggaatgcaaagaaacagtctgtgcactcaggagcttcaccttctcttggggagatggctggtcaccagagttctctgcacagaggtcggagctgcctacttatgagggaggcatgcccaagtgctctgggggcacagagcaagacccactgcagaacccaaggcagcatctggtcttatgcaaaagctgtgtaggacttggaaaggtcgacattaaagcgggatttggtgtggggaggagggggataatgtagcaagcaggcaagaggggtgtgaaaggctcatagctgtgttaggactgggtgacatctttccccatctcttatgtaaggtgtgtgcacacatgtgtgatggtgagagagaagtcttgaggaatagaatccaagggtcgctgctcggacctgcaggagtatctccaagattctatgaggattccttctttctgtgacatgctgctgtaccatagatcagtctggcccttagtgagcctgtgggcacctctcatctgtccctggttcctcttgccttcttcctgctccaagccttttaacttctcccagctcttcccctaacttaatgtttatagagcagttttggaggcggtggtagaaggggaggcacagatggcaatgccatgtgtctctgcagctgctgtcagtcacatccgttagcttaaatcataaagcagtgacagccccataactgccacctgacaccttttttctggcacttgtacatatcccagca

SEQ ID NO: 114686 - DNA, 1594 bp, Homo sapiens
cttttaatctctaatctcctgttggctttgggaggaggaataggggaggtggaaatagagagggattctgggggggagtacagtgctgggagagatggaaaggcctcagggcctcacccttcctttattcccctttgcttacctcccgtatcgcaactctaaggaaagcaagagcttgtcagtagctcttcatactagctgtaatgccagttcctttaagcttcagttatatttctacctcgaaaatgggaataatgatatgtccatgttatataatagacatgtatgaacatttattaatatcaaatgccattatgcatgtaaagcccctagcacaggatacttagatgtagttaacctttaagagatgtgggccattattgttgttattcagaagtttcgtcagagccacttggatggcttcagaaagtgcttaatcattaatcttaagagtgcataaatctttcccagctaaggtattaataaaaggggagtattttgttgtgattgttgccatgttgtcatgccaggaaagttccttgtgtggtaactctttcttagaaaattttttgctatctctaaaagtttcttttccttgttcctttatacatttgcgaatgatttggttatatttaaaattccaatgtaatgagaacacttagttattgacttttttcattattaacatttggcctttgacattttgctagtttcattgtgtggacttatttttcttccctcttccctaattttttttttttttttatacggagtcttgctctgtcgcctgggctggagtgcagagtgcattggcatgatcttggctcactgcaacctccgcctgccgggttcaagcgattcgcctgcctcagcctcccaagtagctgggattacaggctcgtgccaccatgcctggctaatttttgtatttttggtggagacggggtttcaccatgttggtcaggctggtctcgaactcctgaccttgtgatctacccacctcggcttcccaaagtgctgggattacaggcgtgagccaccgtacccagcccctctttcctaatttctaatggtctctcttcaaaggttaaattttgtccatttatcacatctctttagtggttcatttaagatatgagtaaatcaaatcaagtaaaatcataactagcataaataaaatcaaattgtctctgaaactaatactctctttatttcaaaggcagttgtaaaaccatgctgttttgatttcatatttaaatgcttttcctaaaataatagccatcacttttccctctcgtaccctgtccttcatttcctataggcctggctggtgcacaggctttcagaggtggcatgcaaaacctcagttgttttgggaagggagggatttcagccgtaagatagggcttatgtataagtgggggcaagggaagccctggccacagtgatgaaatatgttgaagatgaccttcctcttgtgacagattgccagctcctgtttcagacaatgttttttgttttttgtttttgtttttgtttttttgcttttgctaagagtttttttgtttgttttttattttttgtttatttttat

SEQ ID NO: 114687 - DNA, 1044 bp, Homo sapiens
agcttcttacatattcttgttatcccctgtcagatagatggtttgtaaatattttctctcattcagtgggttatctcttcattttgttgatagtttcctttgctgtgaggaagctttttaacttgatgtgatcccatttgtccatttttgctttggttgcctatgcttgtcgggtattctttatgtctttttttgatagaaccctggttgaagtgcaactgatctttaaacttttctcttcagggaaattaaactacaagtggaaagtcttctgaaatgtggccagagttcaagaatgttcaaattcttcgtccaccaagtgcacatgttgtaattagacatgtttccctctttgcccacagtgcctgatgtatttcctttgagggataattagggaaggggagtggttcagtctaaaataagcctgaagtggtcacatttttcagatccttatagttggcagctttgttttcttgcattaaaataatgctgtgcagacactatgcctcgttgttgtagtctgactctaaacatgttttgtaacagaggataaggctctgtcctaaattgtggatggttttttaaaagataagggtaaggccgggcgtggtggctcacgcctgtaatcccagcactttgggaggccgaggtgggtggatcatgaggccaagagatccagactatcctggccaacatggtgaaaccccgtctctactaaaaatacaaaaattacctgggcgtggtggtgtgtgcctgtagttagtcccagttactcgggaggctcaggcaggagaatcccttgaacccaggaggcagaggttgcagtgagccaagatcacgccactgcatttcagcctggcgacagagtgagactccatctcaaaaaaaaaaagaagataaaggtaggaaggggtgagaaggcaatgtatttttaagtatataggttttgccaggtaatcatattacgggaaatgcaggtgagcaacatcgaggcatggcttatgtgcttctgagagccctgggtctggtaaccttctcttggct

SEQ ID NO: 114688 - DNA, 1080 bp, Homo sapiens
ggaggggtagggccgtgggtcggagcccccaacggggcctgctcggagcccgcgtgggtccgtcctgcctctggactttctcagtgagcccagaagcccgccggcctccgctgcctgcgtctgagtgcctcgggtgcggctggcgggatgccctgcacctacgtccgcctcccgtcagcgctgcggggagaaaagggggtcggcctggcctcagccagtctctgcttgtctctcccttgggaattctccgctgtcgcttctttctcctcatcccctcaccatcatcctttccacccacttcttactcttctgaatcttcaggtcaagaaatttgttcattcattcagaaaatacttctcgagctcctactgtgtgtcaggcactaagtgcttgtgatagacatcagtgaacaggacagagatctctgcattcctggagcttatttgagggggaaaggagaaacggggtgaattatagataattaagtaaattatacggtgtagtaggaggtgataaatatcatgggaaagaaaagaaatctttttcctcctcgcaaaggtggcatttgagccgagacttgaagatacgagaggtctgagagaagagtcgtccaggtagagggaacagcccccgggaaggtcgtgaggtgggagtgtgtctgaagggttggcggagcgtcaaggaagccagcatggcagaggcccatggacaagggggacagtcataggagaggaggttagagagatcagaacttgtaggccttgctcagggcttcttgagcaatagttcttaatccaaatgcctaatgagaagccttcttgttttgcatctgtaaaggtttttttctgcccttctctccagcagaagtgcagaagcaccgccaaatttgttgcagatgtcttcccacctctgtaatgcagaagcacgtgggctgtggatgagagatctgatcagggactgcttccgtaaagaccacctggggcctgaggcatttgcatatgtatctttaaattcaagatatgtgtgttttctccaggggaaagtgctcttaaaatgggtcttatttttagtcctagttgt

SEQ ID NO: 114689 - DNA, 1039 bp, Homo sapiens
gcaggagaatcgcttgaaccagggaggcagaggttgcagtgagccgagatcacgccactgcactccagcctgggtgacagaacaagactccatctcaaaaaaaaaaaaaaaaaaaaaaaaaagaattcagaaagagggcagggcgtggtggctcatgcctgtaatcccagcactttgggaggctgtggcgggtggatagcttgaggccaggagttcgagaccagcctggccaacatggcgaaaccctgtgtctactaaaaatacaaaaattagccaggtatggtggtacacatctgtaatcccagctacctgggaggctgaggtgggaggatcgcttaaacctgggaggcggaggttgcagtgagccgagaacacgccactgcactctaacctgggcaacagagcaaggctctgtctccaaaaaaaaaaaagaattcagaaagagtctaactctagaccacttccaacagtctctaaggaagatattaaaagagctggtagcactgagagtagacatttggatgggatgacttggcgacccacgccaagacaggcagaaacagaaaatggtaaagttcttggtaaaggctcatgttttaatgttaaaatttagattattttaattcctactataaaatggctaatattatcttatacaactttcacctcagttaaaaaaagctacactgagacagcaaaaaaaattaatttatttactgttggggctaggaaataattctcatggctcaaaatccaaaagtttaaaaagggcattttttttccaataatttctccaaacacccagtttccttttgtttgtttgtttgtttgtttgtttgtttgtttgtttgttttgagagagaggcctactccgtcacccaggctggagtgcagtagtgtgatctaagttcattgcaacctccacctcctgggctcaagcaatcctcctgccccagcctcccaagtagctaggactacaggcatgtgccaccacgccaggctaatttttgtattttttgtagagatagggtttcacaat

SEQ ID NO: 114690 - DNA, 1869 bp, Homo sapiens
tatttcagttgtgaaagtaattcctttaaatgtttctttcattacacatgcttttttaggttgcatttggagggaggtaaatgtagtaagtattactacttggggtttttcaattaactcaaaattctgactctctttgttgcagtttgcattgagactccttgcattccgccagatacacaaagttctaggcatggatccattaccgcaaatgagccaacgttttaacatccacaacaacaggaaacgaagaagagatagtgatggagttgatggatttgaagctgaggggaaaaaagacaaaaaagattatgataacttttaaaaagtgtctgtaaatcttcagtgttaaaaaaacagatgcccatttgttggctgtttttcattcataataatgtctacattgaaaaatttatcaagaatttaaaggatttcatggaagaaccaagtttttctatgatattaaaaaatgtacagtgttaggtattatttgaatggaaagacacccaaaaaaaaaaatgtgctccgactagggggaaaacagtagttccgattttttcccattatttttattttattttctggttgccctagcttccccccctatttttgtgtcttttattaactagtgcattgtcttattaaatcttcactgtatttaatgcaggatgtgtgcttcagttgctctgtgtattttgatattttaatttagaggttttgtttgctttttgacactagttgtaagttactttgttatagatggtatcctttaccccttcttaatattttacagcagtacgtttttttgtaacgtgagactgcagagtttgtttttctatatgtgaaggattacaacacaaaaagttatcctgccattcgagtgctcagaactgaatgtttctgcagatcttgtggcatttgtctctagtgtgatatataaaggtgtaattaagacagagttctgttaatctaatcaagtttgctgttagttgtgcattagcagtataaaagctaatatatactatatggtcttgcaacagttttaaagcctctgcataattgataataaaaatgcatgacattcttgtttttaatagacttttaaaatcataattttaggtttaacacgtagatctttgtacagttgactttttgacatagcaaggccaaaaataactttctgaatatttttttcttgtgtataagtggaaagggcatttttcacatataagtgggctaaccaatattttcaaaagaacttcatcattgtacaactaacaacagtaactagcccttaattatggtgacagttccttattggtgtgtgtgagattactctagcaactattacagtataacacagatgatcttctccacacaccccatcacccagataatttacagttctgttaacagtgaggttgataaagtattactgataaaaaattatctaaggaaaaaaacagaaaattatttggtgtggccatcttacctgcttatgtctcctacacaaagctaaatattctagcagtgatgtaatgaaaaattacatcttactgttgatatatgtatgctctggtacacagatgtcattttgttgtcacagcactacagtgaaatacacaaaaaatgaaattcatataatgacttaaatgtattatatgttagaattgacaacataaactacttttgctttgaaatgatgtatgcttcagtaaaatcatattcaaatttattgagtactgcatcttgttattcctgacaaatgtttgttgtctaagcacataattttcagaaaattttgtaattcaatactatattggcttaatttctttctagggtcagaatctacccccaaagtcttagagg

SEQ ID NO: 114691 - DNA, 1614 bp, Homo sapiens
ttgctcacctggtcaaacacccattcctcactgcattttgccaattcaatccattttagatgtaacctcgggtatggtgaaagacccaccggacgtcttggacaggcaaaaatgccttgacgctctggctgctctacgccacgctaagtggttccaggttcggaacatcattttacttttttcttgtagccttatgagagaagtagttcagtacaacatgtttaactgtgcttaaacatttcaaaagactgcccaagcaatactattttaaattaaatatcagaaaatatgttaacatagaaagctgggtatgatgatctgcatattgcagttattattaatttgacaatgaacttaggtttggggagtgttttgtagttggggtttttttattttttatttttagtggctatatttaaagttgacttgtttaggaacatcacatgtttgtgtatatatattatattccataaggctgcagattaactttgctttaaataatggaatatgtgtttaaagctttgtgtatagttttaagatttttttccccctctttctctaagttaataagtgtagggagtgaaaggtgaggaagcagctgtttggtttagtgactttgcagtcatgcaaaggcacagaagggaaaccaaacagatttccttaacctttcagtccctagacaaactttttagctctttactttttcttttatttctaatgtaggcagactttttttttttaagtttactgttttaaatgaacacaggtcaaggttcacaggggatcaagaaatattattcttgtataatctgtttactttgacctaaataccagcttttaaatactaaccctggcataaaatactgctgtaaatggcagctcattgaatccaattttaagtgtgattgtttttgtttttatctgagcttccattgaacggtggtattttaactttttttcatcaagggatatattcagtatttctaagattaattcaattggtttttatgttgctctcaaggctagagctaatggtctgcagtcctgtgtgattatcatacgcattcttcgagacctctgtcagcgagttccaacttggtctgattttccaagctgggtaagtagtacgtaactgtatggtgtaaaaacatgtaggaaataattctgcagcttttatcctctcagtttacatgtaattatcagccttatttgcatttactaaatatagtttttcttttctgatgaaaaatcctgggggagtcttagaatgtttaattttctcagatgtgactaattaaagaattttcattgatgtttctctttgtgtgtttttttctttttgctgttttcacagtgttttttttttaatattacagcatttattagttggcttttacatataatatacaaatgtataaagaagactttgaagaactgttaatctccttatgcagggacattttttaaaataatgtatgtggttgggaactgtaaaaattcagaaatacatattattcaaaaataatacaaaaaaaataggagattcagtaacgcagaaagctacaaaataaccaaaagccttcttatttaaaggcagattatcttaacaatctg

SEQ ID NO: 114692 - DNA, 1048 bp, Homo sapiens
cacagttttccttgattatctgtctttcctctaaatgtgtcttctgaagaatctgtgtccatctgattactcgaggagtaaaaaactaagaaaaagaaaccttagagaatagaattctctatcagtttcaaaatatgttttttatatgtcatctactcaaaataagaacaagttatcctttaagatatctgaatgcttatgagatatgagtaacttgaccagaactgcagctagtactcttaagataattaactttttcatacttttatcatgtattttttcgtccatattcattttatatattcgattattaaactgtattctaaatgccccataatttccaaaggactattatatttaatagattatataatttttctatattgagaaaatattcatactatttaaatcactgagagctgtgaattagattggaataattgccatttgcttactaatagcttgattagcagatttgctgttaatatacacattttacagatgtttagatggatataaagatagccctttgtctacttttatgaatgatatattaatgtaaagttaacttcttgtcctggtttagtttcatatattctcaagttttgtgtagctcatttatgttttaatcagcttaaagaccctacacatctatcgtcacaggatcagcatcttttccactcttaattctgtttaaccatactagttcctattcgctgttctgcttgcctattgtttctcttttatcattttttgaaatactttatgggaactttaaattttaaagggcatttcatactctctgataactaaaattttcatgcggaagggagagcattaaacttttagaaatgcctgttttgggccgggcgcagtggctcacgcctgtaatcctagcactttgggaggccgaggcgggtgtatcacttgaggtcaggagttaaaaaccagcctggccaacatggtgaaacttcgtctctactaaaaatacaaaaaattagcctggtgtggtggtgcacacctgtaatcccagctacttgggaggctg

SEQ ID NO: 114693 - DNA, 3417 bp, Homo sapiens
gcaaatcctggtttttctggatattgactgagactttctgctccctgataaaatgtgtatttcacagaaaatgtacaatatgggaataaattgtagctcctattaaggtcaggtagctattttagcttcattcaaattatgcaaatatatgttataaatatggcagtgtttcttttatccaagaatttattatctaagagagatagacctatgtacaaataactcacaatacaaacaatggtaaatattagttcaacacagaattctgaaagtagggagtaagactaataatactggcatgtacggcagggcttcctagaaggagcagtatataatctggtcctcatatagaatggttagggtagtaagagagtgaaagagccataatgaaagtgcttttgtttgttaatacaacagatccaatttgtttcttatcatcttcattacacaggttataagccctgagaagtatgacataaaatgtgctgtatctgaagcggcaataattttgaattcatgtgtggaacccaaaatgcaagtcactatcacactgacatctccaattattcgagaagagaacatgagggaaggaggttggaaagccattaaactttctactttctattaactttttttttcatttatctactctttaagatggcattaagccctagaaggcaacatgctggcattacacgtgaatttgatagatttgacttatttagcaaccggttttgcctaagataatttcccacagagtaaatgctctttttagtgatgtatttttatataaaacactatggtatgattgattttcttgatttctttcttttcttgctaacctcagatttctggaaaaaaaacttcaaaattatttttactggcatagtcaatgcatgaaaaaatggttttaaaatgttgctagtgactagggggacacaactttaagttggattaagaagtttttgctcttgccttgtcttacaaaaaagacaagagttttcacaaacaaaattggctaagtattcgtaacacatttttaagaggcatttttatacatatatatataataatggatttggcttgtcctgtggtaaatatttctagttctctgaggttgctctttggcttggagcactttcataaatgcagaacatcctaaagcaggaggatttggacatttgaccctaatatcacacttaagatactgaaaaataaactgtgtaaatgtagatagtgagtcacagcacaattcagggtttttaaacttaatttacaactatagaatatgaaatcctgctggtgccagcaatgttgctttagggactattctgtaacattttcaaagcttcaaaagcttttaagctgaaaagcatgatcagtgtctgcagtatgttggttctgttgttttatgggtcagataaaatttactttgtttcctttcatgtttttatacatcttgttgagtatggaataacagtctacactaatatttctttgtgatacaggttgaggaggaagagggtactacatacttaatattaaaattcatttgtataaaatagcatcagtagtctctcaattactgtttctttaaatttgtttgcttataacaaagcaattttttaagacactgggcttttcacaacccaggaaaagaacattttaccaaaaatgtcattgggagctatgtctaattttacatactttgcatgtataccataatcagatgatatttatatcttaagctttgcatcttaaatgagttttgtgtaaagggttttcttatgtgaacgtgagtttctactcaaggtctggccatgggtgttgctggagaaacagttcctgagtcaatctggtcaggtcatatacagcatatgggatttgataaaactaatatgatacattataaatgttgctgtatttagtgtaaaatgataaccatttaactttatttcagaatacattttgttcagttatatttagacttaattaaatttatacagtatcaagccattttattatgttgtaaaagtctaaagtgaatagtgtcatatttgcagtaaattatttgataacctatcccttctaaaggaaacaaaattatatttttgtctgacccagacttgagttagaattattgttctgaatttcataaatattatgatgaggaaaatggtcagtccaaaatggaaagattttgcttcaagacactgagctgaaaagttggatgtgccaaagtgtagaaacactgatagtgttccttgctgcagataactgcagtaaaccatgtctttagcttcattatgaagattgcttctttcttgctgcagaataacggtatgtattctctctcactgcagctcccagtgctctgtgtcttaaaatcatttaaagcctatagcttgctttggggagttagtacaggggttaaggaaggctttgccggaagaacaattgtaaatcatgagagttactacttgcgcattgtgtggtagtctctttaatgcataatggtcctttttaataccaaaaattaattaataaaggaaatgattacattgtccaaataactgttaaacacatgacagatctgttttatgatactgtgtttgacagttaaacattaagtaaacatttaattgactttaagcttgaaatgttcagaatgctctaacccttgctacagaatcttttctgcagcaagttaagtattttgtgtgttttttcccacctgtagcttatcaggcccggtccaaagccttctagcagaggggattgatcctgtcaggggttgctgccaagacatcggaaggatttttgaccaaggttttcaaaagctcagtgtcacatctgccatttgataaaggagggattttggatgcagagcctggcatttattgtcctttgtgtggctgttttgtttgttttgtctttgtctcttctagaattgagcagtgttcacactagtttttaaatggttgagtgggttatatattttacatgaccatgttaatttgaattaatatattcccattaacgtttaatcttaaaatagtgtggacacagcatgtcttctaattggtgattaaccccttaaaatctatgaaatacattcacatagaataagaattagcattttgtttttataaattaactgatttttttttgctttgttaactgggtgttaggcaacaagtatgattttagcagaatataaggggttaatctacttgaaatagaaaatgggtacaaaaatccacactaaatttaacaaaaattttctacttatagctgtaatttgtttttaaattgcaataggtattagctgggcgtggtggtgagtgcctataatcccagctacttgggaggctgaggcaggagaattgcttgaacccagaaggtgtaggttgcagt

SEQ ID NO: 114694 - DNA, 1968 bp, Homo sapiens
ttccttaacctgttctctcatttatctttgctcagagggttggcagttgtaagacttgaattactgaaagcaaagaaagtttcagaatcactggtttctaaggttgagtaaagagcattttcatagctttaggtttatatgtattagaaatgttacttgttttgaggcaaagtgggtgtacatgcatgcatgcatgcatacatacatatagtcttgatggtataactttccatagtttgcattttcgtttttactgaaatggaaaaaagaagataaaggctttcttattgaaaagatacaacaaatatgtatagttgaaaaatataatttgcttttgctcaggaaacttttttttaaattgagcaactttgtttctctgtagcccttacgtcgtcctgactcatctgatgaccgttatgtaatgacaaaacatgccaccatttatccaactgaagaggagttacaggcagttcagaaaattgtttctattactgaacgtgctttaaaactcgtttcagacagtttgtctgaacatgagaagaacaagaacaaagagggagatgataagaaagagggaggtaaagacaggtgtgttttgaaagttatttaccatgtgtaattttggtttttcttatgtggacttcttacatttgaaatatagcttatgactggtaactctggtgtgagttctatgtgttttaaccatgcctgtgttcgatatttcatgtattctgcagctgcttgcaaaaatagaaatacacaagttccacggacacatgtagtgtctaacctcgtaattgtactcattttaagtttatataaactattttgagtctatttcaaagcagccattatagttttacagttgtactcagctgctgtttttctgttcttatttgtttgttgcttctgccccacactcagtctttgttttaataactatttccttaaagcactgactgtaaagcatgattaagcctaagctttagtaatgtctttatgtcaagtttgcattattagctgtaactttttattttccttttaccatttggaaatatttttgtattacattaaacataactcctattattctgacttgtgaaataagaaacagaagtgttaatgtccattgctttgcagttgtctttctgtaaagaacttagctctttattattttttttttttatccacattgcttaaatgaagtatagttctaaaaatgctggatgtctttctactgcggttgatggaaattttaatggcacaaaagttatttcacttactattgtatgtttacagaatatcatgcttctggttaagcagagaaatatcataatataattttattttactgcagagctttgaaaggagttttgcgagtgggagtattggcaaaaggattacttctccgaggagatagaaatgtcaaccttgttttgctgtgctcagagaaaccttcaaagacattattaagccgtattgcagaaaacctacccaaacagcttgctgtaagtattatggaaatgttcatttttaccccttgtctggttcagaagtttttggcgggactgactgtgcttcggtttaaacctaagccagcctttaaaattttggcttgactttctgtattgagtttttttgtttgattgtgcaaactgatgaaactattttctacttcatcttttttaggttttatagtgattatatttggcatgaagccatcttgctgatttatttaaaaatgtaaaattgcagcatatgccttccttctcttgttctttttccaagacttgaatcataagaaggcagttgttaggacaaagtgattttttaaaaaaaaaatcccatgtgtagcaaggttaaatttttttaattcatgaatctcttgcctatttagtttaatgcttttaataaaatgtagtaactaaaatagtgtttctgattttaatttccccagttttattgtga

SEQ ID NO: 114695 - DNA, 1053 bp, Homo sapiens
ttctttaccataattcccaacacccttaatgtgtccccaacagtaagactgactatgacttgccatttatcactgccttgcactgtttttcttcatagtagagacataggaaagagcatgtttctttgaggacatgaagaaaattcccaaatgttgatctgtgcacttcaggtcatttactcacagtgttggcctgcctcctttaggtggcattgggtttctaattcatacttaaagcaggagagaggtaagaaactgaggtttctgatgcctgttctttttactttttcctcaggctgaaattttctgcttttcatgctcttttctctttcatttacttcgcaatgaaagcaaacatggaaaatcagatacatttgggaagaaattttagctaggctgatgttggtggggttttttattgctttttatgtcactattgatgcaagttcttgggctgtatttttcctcatatgcttataatgtcattctttatgtttcagacgttatgaagaggacatgtactggaggagaatggaggaagaacaacatcattgggatgatcgccgccgaatgccagatggaggttatcctcatggtcctccaggcccattaggccttctgggagtccgaccaggcatgcctcctcagcctcaggggcctgcagtgagtgtccacgttggtgatacaaggggtgaaagtttgactggttcagcattagaagaaaacaattttggaggggctaatgtttagacttaataatcttgtaatcttggtagtttttttgagacagagtcttgctctgtcgcccaggctggagtgcagtggcgtgatctcggctcactgcacgtaacgtgcgcttcccaggttcaagcaattctcctgcctcagctttccaagtaactgggattacaggtgctcaccaacacacttggctaatttttgtattattagtagagatagagtttcgccacgttggccaggctggtcttgaactcctgacttcaggagatccgtccgcctgggcctcccaaaatgctgggattataggcatga

SEQ ID NO: 114696 - DNA, 1050 bp, Homo sapiens
aaatatttactattcattaagtggaagtgggtcatcatataaaggtcttcatcctcatcatcttcaagttgagtaggctgaggaagaagaggaggggttggtcttactctctcaggggtggcagagggagaagaaactcagcagcatagatgtaagtgtattcatatacttcaaacccctgttgttcaagggtcaaatgtaaagtaaaattaaatatccattagtttttctaaggatttcatgactttttgttggtcagcactaagttacatactttttacataatttttattaatgtattttgaatcttttctctgatttaccttaattatattgattttactctctagtgggaaacttgcaactaaaagcctccgtgattaaagaataagtgtaattgtatgattaaaaatacatgtagattgttttggggctgctgttttttaaatgtcttatttatattaatagaaaaaagtaaatccagatttgcaagtagaagtaaagcctagtattcgagcaagaaagattcaagaagagaaaatgaggaagcaaatgcagaaggaggagtactggcgaagacgagaagaagaggagcgttggagaatggaaatgaggtaatatctttaacttttaatagcctggtaagtggttcagcctttcttaaaaacttagccattctgagcatgtgactcccattcaaagcaatccagatttatttacttccaattttcactcttgaggaagatcctaggtctaggaaagacatgcattaaaattgttactggctatactaatattttactgtggccttggtattagagttatatgtttaagtggcatcttttataaattaaacatatgaagaaatagtttcatattataaataagtgcctcggtttcaaacaagcaaaatagacatacatttcctgatagaagtataagatttgatagattctacatgttaataatgtccataaagaaactttagtggctacagggaaggagaattgagaaaacatatttcaaatatttgtttatatatatataaag

SEQ ID NO: 114697 - DNA, 1209 bp, Homo sapiens
cttttactttttcaaagggggttaggtaaaggtaacttcaaagttcgaaaacttttaagtgcattataagccttgcttatgtgctaataatacataaaggtgacatcaaataatcattgctaaaagagggaaagactggagacctgtctttaaattgaactaaaccatttatttcactaactgggaattgtcatgtgatcatttttaatgtagccaagtctgttcatctttctctacctcagtttcctcacctaatagtagatggaatatgtatgcatatttgcttcacagagattatcttgaaagtaatgagttttgtatatgtgtgtatatacaaaaacatatagcagaaaaaatacaacaaagaaaagcatggtttagattttcattttataatgttccaggcagacttttcaaaatctatttgagtttcctgacaaataagtgtgcttttgttttataggtggttaagttacacacaaaacttggtaaacccattccatcaacagaaccaaatgttgttagccaagctacttcttcaacagctgtatctgcttcaaagccgactgcctctccttcaagcattgcagcaaacaattgtactgtgaatacgtcatcagttgcaacgtcttcaatgaagggtcttacgactacaggaaactcgtctcttaatagcacatctaacactaaagtatcagcagtgcctacaaatatggctgccaagaaaacatctacccccaaaataaattttgttggcaagtactgatattctctgtccctgctgactctgtcaaagtgttgtttcttctccattgcagcactaacccttctccctgtgttcttggacctgcctcctcccttctctctgggaccttgtttcttcacatatctgcctagtgtgtgtgtatttttaatttttattccatcgtctactggtttcttcccttcagccatacagatatatctgtgtcttcctctagtcatttaaaaaaaaaagatctgcacacacaaagacccttttcccatttctctaatcttaaggtaacctgattggttttttttgtttttttttttttcatttttgagacagagccccactctgtcaccgaggctggagtgcagtagcacgatcttggctcactgcagcctcaatttccagggctcaagcgatccgcccacctcagtctcctgagtagctgggactatagc

SEQ ID NO: 114698 - DNA, 2162 bp, Homo sapiens
tccaatattaagcctaactgaagtagactgactagtgcgcgcgcgcgcgcgcgcacacacacacacacacacacacacacacactccttttcagaaaagtttgtttagtggtagcactgctatttcagttagttgtaagttttgccaaaataatcattttggaaatacatagaaagcatttggcagaagatagtatatttatttgtatattctattcatattggtaataagagttttatgccttttgctaaggagaaattgctggcataaaatttatagttaatgatgtttgtacctattctttccagctttttaaggatactggtacagtaactatagtggcttactcttctaattttctgatgtctctttcctacttcagcccccaaagcaggttacagccaaggtgcaactcagtatactcaagcccagcaaactcgacaagtgacagccataaaaccagccacaccaagtccagctaccactactttctccatctatcctgtatcctccaccgtacagccagtagcagctgcggctactgtggtgccatcctatactcagagtgctacttacagtaccacagcagttacatattctggtaagactgataaactgtgtttaaatgagtaaacaaattaggaagagacttagtagaaactatcttgattgtctttgaaattaccttactcccaataataggaattaaattaattgatagacataaatataggtacataatgtgactgttctgtaaattgtatgcttttttgggggcgtggggaggagaagatcttagaagaatataatatgttcttgggggttttaaggctcattatgagtcttgggcttagcattgcaattaaaggaagtaacaccgagttttctacaggattgtttactttcctgcttttccaaatgaaattgaaaactcaaggttaatactcagggaataccacagacaaattatttctgtttattttggctctcgaagagctatttattatcagaaatagttcatcatggaaatgttgggtagccctttctaaacatccataagatggtggttatgtaacacaccttttttggaagaacagagtacctttattttccttaaataattatatatttctcccagagaggtacaatggctaaaacctttttgtgtccactgctgttgccaatttctagctgaggaagtttgcattttcacagtgattaagatcacacattgccttttttgtagagactcagcttttgtattcctcccagaagatatgctgtgaatgacactcttttatttctcagagatttcttatctcttactctagggtgctagggatacaatgatgaattaggaatgcacggagtgtttgagaactgcagttcattgtggctggaatacaggatacatggggtaaatgtcagtagatgaggctagaagtgccagagtatgtaaagccatgtgtgctctgctatggtgtgtgtctttatcttgtgggcagaaagggagctgcagaggctatattaagaaatggagcggtgtgagcagatttgtaagttaaccggacaaccaggtggaaatgaattgaatgaggagacattaacatctgagaactctggctggagtggtgaatgatgaggacctgctcatcattcaccagtatgaatgatggtagaaagacattttataatctattaaaggcatagtacaggagattccttatttaggaaagaaatcttttgttaagatctcaagaaaatactgaatttatgattcctagatctgtcatttaagatagataggactttactgtctctccctatttggttgactagctataattgtaactaggattatattacaatgaaatctgattagtcacattttttttaaatgtccacattagcttcaacaaaataggaagtaccagagtagcttttcctgttcattgtttctctcttatatgtgcttcctttcctttctctttctctggttgtctatacagtatgaagataatttttatttacatgagtaatatattattatttataaattagaaactatttttttagaaagagaaaaaaagttaaaccactagatttctactcctagacactaattgtcattaacattttagtgcacgtctctgtctactttt

SEQ ID NO: 114699 - DNA, 1106 bp, Homo sapiens
tgatgcttgaagtgtttcttggcttccttttttttttttttttttttttttgagacaggttttactctgtcatccaggctggagtgcagtggcacaatcatggttcaccgtagcctcaacctcctctgctcaagcgatcctcccacctcagcctcctgactagctgggactacaggcacacactaccatgtgtggctaatttttaaaaaattttctgtagagatgtggtctttctacgttgcccaggctggtctcaaactcctgacttcaagcagtcctgctgccttggcctcccaaagtgctgggattactggtgtgagccaccatgcccagccttcctcatgcttttggtagaagatatggttccagtccagatgatggttagagacctggctatacagagcagagttagacaatgccagggatgtgtaaatagcaattgctaaatctgctggcatctttttcatatttcatcttttcctgggactggtgactgtataatttattgttcaaactgagacatgtaggagagtgaaaagtactaaaagtaataattacaccggcagtaggcattaaccagaacatatggtcattccttcttgagtctcatggacatttagggtgacgatcagaggcagtataagttaaattggcttcctggttgactcaacattcccatcctattcccacctgctttttgtctaataggacatgttttggggacaaatactagataaggagcagtgggatgaatagaaacagtcttttatataaccaaaattactcttaggtggtttagtctggatgtatttaatcttatcctgttagtaaatgttaaatacaagtttcacagacctgttgtatttgtattttaaatagtatcttttttttcagttccaggaattttggaaaagtatgacctgttactggcattttcttacagatatggagttgttcctagaaaatgttattcccaaacaagtttttcactgttttaatgtaaacttttcctgtcatattggcatatatgtagaaaatgttagttttatatcaaaatatggaaacctcatccagatagaaattctatgagtttctttggactctgt

SEQ ID NO: 114700 - DNA, 1684 bp, Homo sapiens
tcatgcctttcttgagcagtttacatttcctgaattcattcattaccttttttctttttcttttttttttttttttgagacggagtctcgctctttcacccaggtgagactgcagtggcgcgcgatctcggctcactgcaagctccgccttctgggctcacgccattctcctgactcaacctcccgagtagccgggactacaggtgcccgccactgcgcccagctaatgttttgtatttttaatagagacgggctttcaccgtggtctctatctcctgacctcgtgatccacccacctcggcctcccaaagtgctgggattacaggcgtgagccaccacgcccagcctacctttttttcttaatcatgttgtcatttcttaaaatttgtctaggctccctgtctactggctctgtgccgagtcctctgtttttctggatatctttctctgagaggcttctgtccttcccctaattccaatctatactcacttctctctgggcctgctgccaccacagctgctgacctaggctttcatctgtttgcaggatcccatgttttcttggtttactttttgttttagctggaatatatcttcatgtagcttcctaagaaaaggttgtagtaggtaaactccttccatccttgagtggttaaaaaatctttattctgcctccatagtttggctgggtacaaaattctacattagtaatcattttcccttgaattttgaagataataccttatcttcttgctttagtgttaccagtaagaagtctagttttcatttagttgcaggtgcccagtttttccctctctggagacaggatctttttgtcttgaaaagtaaaatgctatgtctctaggtttgtttttttcactctgttttgctctctgtgagctttttgaatttgaaaacgtggttcacgtcaggagtgggaaattttatttcttaatttttttgatcttttttcttttctgtcattccttcaggcaggacattgggccttctagacttatcctttcttttgtatttttcatatatttatcttgtctatttctcaactttatcttctcttctaggtagtataaagttcttgttttatagatacaaattagagtttttgaaaattctcatctgtggccttcatatgttcatttcccacatggtcattcttacttgttttgcagtttatagtaggctttcttcagacatgtggtgatttgtgttgtctgttcattttttaaaaatttttttaaatttaaaaaaaattttttttgagacaggggtctcactctgttgctcaggcttgcagtggtatgatctcagctcactgcaacctctgcctcctgggctcaagtgatcctcctgtctcagccacccaaatacctgagactacagatgcatgccacgacacgcggctaatttttgtgttttttgtagtgatggagtctcactatgttgccaagtctggtctcaaactcaagatccagccttcttggcctcccaaagtgctgggattacaggtattccgtgcccagcttgactgttatttttttaagcagtaagattgcctggaagtcttgaaagtcttattttttgtagtgagtccctggctcactttttgttgttgttgataagtaggtaaggagctggccatttcttgagtaagaatatagagtgt

SEQ ID NO: 114701 - DNA, 1203 bp, Homo sapiens
ggtgcaatttcagctcactgcaccttcaacctcccgggctcaagcagtcctcccacctcagccccctgagtagctaggattacaggcacgccaccatgcctggctaatttttgtattttttagtagagacagagtttcactgtgatgcccaggctggtctcaaactcctggactcaagagatctgcctgcaatagcctcccaaagtgctgggattacaggtgtgaggcaccacaatcagcctgagagttttttgggttttttttcttcatcttaaaatatctttgattctacctccttgagtagtcatcacttaatctctgtaggcagttttttccctctggctgctcataagagtttttctttatctttcatgtttacagtttcacttagatatatcttactgtgaattcttctttactagggtttcttgggactcctgaatctgaacattgttatctttcattaattttagggaatctcttgacattttttttctatattctttcctagtctttctctccatttgtaattccaattagatgtaagttaaccactttttattttatcttccaagtattttaatctctttaatgtttttcatctcttcctctctctctgtgcattctgggtaatttttacagataattttctcattcaccagtttattgccagccatgtttaattagttatgcaataacctttctgagttcctgactataaatttgtcagatgatttagttttaaaagttcatttggttgtttttgacccatcttgttccttagtcttagttttgacaatctcttttacttcaagtgtgcttaaacattttgtatccaataattctaatgcctgtggtctcaaaaaaatttttttcttttaattctgtacacttttgcttatattagtgtatttcccttgggttttatcgtgattttttttttttttttttttttgaaatagggtctcactctgtcacccaggctacatcccaggcaacatcacccaggattgcggtggtgcagttgtagctcacagcagcctcaacctcctgggttcaagcagtcctcctgcctcagccttcaggaccccaccatacctggctaattaaaacaaaaaaaaatttttttttaaaggcagggcctccctttattacccagcctagtgtcaaactcctagcctcaagtgattctccccctttgac

SEQ ID NO: 114702 - DNA, 1054 bp, Homo sapiens
ataagtcctgtttatgtatagccaccaaatctattaagtaagcaggaataaaacaaatgaagtattcaaaacactttgaagagaaaatacaataggataaaaaagtcataaaagatgacaaagatggactgtgttcatgagtgaaaaaccaatgccatcaaattattatctcctatatatatttagcattactccaataaaaatctcataggatttttggtataacttgataaagggattttaatgtatatagtgaggagagtgttcagctaaaaatatcatgaaagtcttgcagaaatgataaggaaggacttgtaatatcagataccaaaatattattaatagaaaaatgtggtattggtacagggatagacagattattgagttaaaatagagatcccagagatagacatgcttatataagcagttggattagagtatatatctaatatatgtctgtttaaatagatgtatttgttaaaaaaaaaatcagctacatttttactcagagacatagatcatcaggttaatcagaagaccattcaggcttataaatgttgtaattgatgaagtatgttagtattatttggatggatctttagtctacttattaaaggttgcttgactattaattgtccatgacaccactctgtcagaatacaggattagagtgattgttctgagtatatcatttcttagtatttcatgaaagccatgtacagtacagcttttattcatacagagataaaatgaatgaaataaactttgggtttttttttgttttatttgaatattagtcttgtatacactttatattaaagtgcatttgtagggaataattcacttatttaatattttatgagcatctacaatatgcatagtccctgctttcagggagtttacacttctggggcatgagggtggagacagatgagtctacaaataactatgccattataattaagttttaatgaaatactaaaatgggaaattggaggattttgactatggagtttgaggtagacttcgtgttctttcattctgaaaatcaagg

SEQ ID NO: 114703 - DNA, 1047 bp, Homo sapiens
tgtcttgaattcaggaaagaataaaagtaacactagtaaggtagaaaaggattaaacactgagaaagtaaaaaaaccaggtgaacaggtttttgaaaccaaccttggtgatggaaatttactggctttacaagaaaaagaaatattgcaacgactaataacatcaatccttccattgttgaatcagagaccttaggatgtacactgcatggataagcttgaaataagataattttcattccaaaaggattgttgctattacactgatgataaaatggctattagtcttaatagagtagggtgagccagaatatccctgtatagaataggtatctgcttgagtatgcttttgtaaactgccttatagtacactatgaacaaaaggacataactttggaactatatagagtttgaatcccagctccatcccttcaggcaccctggccaagtatcagcttctctaagacttggtttcctcacctgacttgccttgaggtgaagtttaaatataaaattttctagcctagtgcctgattatcaataggcattcctatcaatgctgtttcctgtagagatttaagtaataatattataagggttttagaaggattccttggttaatatctatcatatatttatatagagagtttcataatctcacagtaaaatgttttaaaacatttggagtcctcattactaatagagaaagaaggaaagtttctatttacaggtaacatgattgttatgcttgtcaggcaagaatatgagaagtaataagagtacagcaagttttctggatctatgatcaggcaaaggccgggagcggtggctcatgcctgtaatccctgcactttgggaggccgaggtgggcagatcacttgaggttgggaattcgagaccagcctgaccaacatggagaaaccccgtctctactaaaactacaaaattagccaggcgtggtggtgcatgcctgtaatcccagctactcgggaggctgaggcaggagaatagcttgaatccaggaggtggaggttgcggtgagccaaga

SEQ ID NO: 114704 - DNA, 3650 bp, Homo sapiens
cgagcacaggcgcgcctgcgcagtgcggtcggaggcggcggtctgttctccgctgaggaggagcggggcagaggagggaggcagcgggtgagagttcagagttcagcagcagcagcccgagcccatgattcccatatgccctgtagtttctttcacctatggtgagtctaatgtggcccgcgaggcctctgcccggccccctccctggccccgggcagcggggagccgcgggggttggggcaggctccggggaggaggcggcggccgccacccgggcgtgcgagtgagtgagggagtgcgaggcgggagggggaggcggcgcggccgcggcctgggccccgccagggctgctctcacggcgcctctctctttctctccctgccctccctcggcgtctcggctcctctgtgtctcttgtcccgccatgggacccgactcttcgtgcccgccgcagtgcccagccggctgggggaagatgccaaaatggcgaccggcaactactttggattcacccacagcggggcggcggcggcggcggctgcggcccaatataggtaacggcatcctgccttctctctgttcgccccttgctctcccctcggtccggatcctgtcgatgcgacgcccccgcgcccgtccccagccatcccagagccccggcccgctgcaggcctggcccggcccagcccggcggcctctcccgccccgccccgccccgccccgccttgcccggcccggcccggcccgcggcggggagcggcccccagtaggggggaggtagagacggcggaggtgtagggacgtggaggcctcagggcccttcagcggccccttaactaaaatggcctcctgcggccgccgagcggagccgccaccgccgcccggcaggccccccagtccccgcctccgcgcgtccagcccccacctcccatcttcttcccacttgggggatggagagggtggctgaagggacctcacggggagtgccgtgtcgcaggtccactggcttctcgtgcgacgcctctctgcgtcgtcgcctggtgcttcaacccccggagcccagataacgtgtcgttgtctcgggtaccttttcctccgccgtggggcttcttccccagacgctccatcgctagcgagtcctgctgacaaactgcgggtgtcactgtgttcatcgggttcctttagtttttcctgcaaggagagagattcacataccaaccacctgtaaattgtgtagttcttagactggaaaagatgtgcgaagtttctagtgctgataaatgagtgcccagccttgtttgagctatggagtttaggccccaggtgggcctgtcattctccttgcgggggtctttcccctgcggggaatggtggggagggaagaagatgcaagtgagattgtactgagtcattgtaatgcaccggatgaaatccctgctttaagggaagctctcatttctgaagtctgtagttcattatacatcttaccaaagacaaacacaacagtggattgttaaattgttacttttgagtcaatctgagacttttgattcaggccataagcgcacacggctcctgcgtgatatgctttttatgtatgttagatgttggttaaacccaggcagtttttttcatttgatttacttcaggaggcacggtgtttaatggaaagggcatcattgggagccagaagacccgagttcagtctcttttgctcttgattttttttttttgaataaataatttttcttagagagaaaggacctatgttgcccaggctgatctcgaactcctgggcagagtcctgcctcggcctcccagagtgctaggattaccggcatgagccaccacacctggcctcttttgctcttgattttatgacgttgggaacatcatatagttgggttttcatgttcatcatctgtaaaatgagatgctgggcaaactatctttttgggctgaaacttgtggttttgagaaaccaagttactgttttccatggcatcctaagatgccatttgttgtaaaaggtaccattattgtatgtagcactaaaaaaaaatgctgccagttaagacactgcttaagactccattaagagatgtcaaaatgtataaatgtgcatcatattggtgaaactagattttactaattgttgaatgccatgtggcattttacaagtgttttttcatgaggcctgcattccagaaaaagcactgagatgacaaattattacagcaaaatcttgggggcatttcaagtattagcaaatcgtttgcttataatttttgataattagacaaaaaaagtttcagctactttgataaaactttttaggacttttaaaaaattcaacagctttttggggtacaagtggtttttggttacgtggactaattatatagtgaattctgagattttagtagggctaataattttcaaggagaggaaaaaaccatctttttctcagaagagatagctaatcagcatctgtgccataaatctgctggcaattactagtattccgtctagaaaagattgtgtttaaccattaaaattttacttgttttactcaggttttttctgttttcctcatatgggctgagtgataagatttgttgaattactaactttatttactgtaaagtggtgggttctttgtggcacttctgaaatgtttttcctaaatgcagacctacagatagaaatgaagaaaggaaatgctgatttaaagataattaataattttttgataaaatatttatgtgattgttttatcccagtatagggaactgtgacagaatttctgtttctaataattttttttttggccttgaaactgaaaagtttaaactgtaacaacaatccaggttactaaattgattaagtgtacatctgatgagaaaagactagtcttttgacattacttatattgctaaaacttaggcactcttgtacataaggccttgtatataaacatagtacatgaaaagtgtttgcatttaatggcaagaaatcaggcccaataatactgggaattttggcaaggaagatgaatgaataacattaataacaaaagcacatgcaaaaagtgtggtggtgatgctaatttttcttcctggctggaaataattataatggaacttttagagatggaagaccaaggtctactttactaatattttttcaaatttgaagatctcaaactcaggaaaatcttaagtacagttcacgcctgaaaacatatgcagtttttttttttttccaatcaaatttggatagaaaatagagtattcatggagggccaactttttgtattcgcaggttccacagggcctactgtgggactttatgtatggatttttgtatacgtagcggtcctggaaccaatcccctgcttatatggagggatgactgtatttatgtgtgaatgatgtgattgaattgcttcacctatcattgaatacagataaagtaaacatcctacacctaaatgtaattccagaggccaggcgtggtggctcacgcctgtaatcccagcacattgggaggctaaggcgggtgtatcacctgaggtcaggggtatgagatcagcctgaccaacatggcgaaacccggtctctactactaaaaatacaaaagttagctgg

SEQ ID NO: 114705 - DNA, 3987 bp, Homo sapiens
cactttctggaattaaacgctgtgactttagcttccttcctttggattttaggaggcagaggcatgtattgaggtgggtgaagtggggtaggaagaccatttctgggaaaatgggccagagtattgatctttttcattatgaccccttcgcttcattagagtaaacatttattgaacaaacgcaaagcttggcgcttgtcactcatgttttattggcgttttccttttttttaatttttttttaagctatctcctacaggaaggatattagctctttcattctctcaagggtcagatgtaatcttccaacatctgactttcgcgtcacccatttaggaagagacgcggtccctttaaggccctggaaagggtctaagtgttggtttctgtggggaggccacgccccatcacgtgaccgcagccccagcgcggcggggccggcgtctcctggctgccgtcacttccggttctctgtcagtcgcgagcgaacgaccaagagggtgttcgactgctagagccgagcgaagcgtgagtgcgcgggaccccctacccctactcctcggggcccccaccctcccagccgggccgtgagctgccttcggccctccactcctctcgccggcaatggccgcgggaaatggcggctctgccttacctcccccttcccctcggcgtccccggcccccttctccgtttctgactccacgcctgacgcgctgtgggcccttccgcggtagactcctgtccccggggagccgagtcgaggcggcgggcgctgcggcccggggcggtagattgagggcggccggggagtgaggagtcgcggggagagagtcgcggcgtccccgggacaatgcggcggcggcctgcctaggtggggcgcgtgcggttacctactcttcccccgcccctcgccctgagcggggcgctctggagactgggagagcggatgcgggcgggagggggccgggggaagaacggctgatgtgcagggggagggaacgcttcgagagaagaaaatggcgcttggtgcaaatcccgccccttcccacgccgtcttctccgcacttcgccgcctcccacgccccctccgaccaacctgtctcccctcgcccgagcggctgctagccacggggttctagcggcttgctggggccgcgcgaccccttccctggtcttgtgcttgtcaccttcctgttataccgaagtcgtgtgcccttcagtcctggttcattttcacctcgtttttttctgatctttccctcaatcagcaaaggctgaagatttcgtttctctttttaaagttgcgttttgtataaattctacaatagtggtttcagtatcagttacttgaattacaagctgcttctccccccacccccacattggaacaggctcattaaggtaaatatatatttgttaaaagtttagaggctggttttagttaccgttacctttcttctccagtggacttctttgggttgagtaccaggtggttctttgaaaaattcttaggcccccaggcagtttttgataacagacggtagttatgatcgacagtttcaaagtgaaaaattatgttcaatttaattacctttttaaaaaatatctttttgtcgtattaattagcataaaaaacttaactaaattgattttagagatgaggttgcaaaatggagcagaaacaggaaaaacggataaaacgtggtcatgaacattgcttttcccttctgaatttacccttgaagacattaccagttaaaatcagattgagctttttgaatttaatggctaggattggggtggcccacttctttttccttgacctcctattttggaacatatgcaatgtcagtgctaatgcaagtttcatctagagagctagattatttatgatttttttttaaggaggaattttaagtctttttttcttgtattaaacaaatacagtgtgtgatgtgtttattaggccctttaacgcatacagaaattagctaatttatgcctagtgttccattattggaacgctaagcatgtgggagttatttatgtgctactgctcaagatcatcgccaaggtctgcttgcataaattcaaaaaattgcaacctctggcataaatgggttaataggacctaatctcttctgagatggggagagcaaaagatattttgataatcagcgttttatgacctggtgttataagtgccttgaatagaggtatccacgtatcttggaattccttgaaatttggggcttaggcttactgatagtttgctttctgcaaacttgcactcaggcactcagtaaacacccacttgtaagcaaggcactaagttatctatgtctctggggggacctgggaagttaccagcatggtaggaatttgcgggaaggttttgcacctcccataaataggttttgcacctcccataaataggttcttcaaattttaattatgttccagagtagaaaaatctgtgtaaaatgtaatgaattgctgtgaattgtgtaagatttttttttttttttgagatggagtcttgctttgttgcccaggccggagtgcaatgatgtgaccttgtgtcactgcaacctctgcctccggtgttgaagcgattctcctgcctcagtctcccgaattgctgggactacaggtgtgccaccgtgccctgttaatttttgtatttttagtggagatagggtttcaccatgttggccaggctggtctcgaactcctgacctcaggtgatccgcctgctttggcctcctaaagttttgggattacaggcgtgaaccatcgttcccggcctgaattgcgtataattttgtgtactcttgaattagtacctgtcgttattttggtgatacggccaaaaagtcaaaatatgaataaaatattatgtaaaaattaattagatgtcacatttgcatagtacagctagttccctgttgtgtaaatgttggggtcagttccccatagtgaataattttacgttagttccaatctcgttgatgagaagtctaaagcagtaatagtagaattacatttcttctggttttaatagtaattgttgtctgctgccttcttgcagtttaccctacccatagtgtgtaatgccattaaaacgaagtatagaaagatccattggcctggagaaaggttagaggtgtaggagtgtatgacatttagttcattgttcttactgggttcagcacattgcaccctgcgtgttatttgcaacttaaaagggtatagattaaaacttgtgctcagtgtaacaactcagtaccacaaaaatggtagaatgaaccgtggaacttgtccttgatttttttctttgattgggggagagctaagttgaaagtagtagagtaccttattaattatttttgtaatgtatttttctttcaggatgcctaaatcaaaggaacttgtttcttcaagctcttctggcagtgattctgacagtgaggttgacaaaaaggtgactactgctgcaccaagtcattttggtgatactcaacaatattgtccatatcccattctgaaggatagtaaaaggtgtattaacatcttaaaatgaggatctagctgggcgcggtggctcatgcctgttatcctacttctttgggaggccgaggtggcaggattgcttgaggccaagagttcaagaccaaccaggctaacatagcaagaacctgtctctttaaaaaaataaataaataaaaaataaaaaataagaatgtgaatgggtatttctggaggtacggttggtctctggaccacttgactagaagtgcctaggatgctttttgcacattcatactcataggccctaaatcagacttaacaagtcttctgttgagcatcattaggaaccctaaagttgcagaaacactgccttgcatcctagggtcatagaattctaagtaggccaaagtcactatttgccgttatttagaaatttaccagatttttttttgt

SEQ ID NO: 114706 - DNA, 1047 bp, Homo sapiens
ctcactctgcggtcaagtcttccgtgcagaattgtcttttatcgcatagaactttacatatctgaagagatatttatatcctagaaatagaataagttggtcgtgtttttcctaattagtatatatcctttgtaaaatagtaagtaatgactagcactggtagacctgtgatttccgaaagtttattcaaaagaagcaggctccctatcttttttttttcctcctgaagcttagcaattttagctaaaagaaaaggggagagcgtatgggagattggagaagttgcaaccttaaagtataaatatagaatataacaacacatggaagggtaaaataaggcttcaaagactatacttgagtaaatttcttaattttaaaatttgcaccctatatagtatttgagtatgttgatgtaacacatgtgtattgagcttttatttgccagacatgcactattccacagggaatacttagagcctgatttatagaataattgctttctgcatattgagctaactttttgtttgtcccaaatagtaatattactcttgtaaacacttaaccttgtataccacatttttcatttcatgttttacatgtatataatatttttcctagcttcatctaatttggtaacattcaattaatttagtaacattaaaatatttatactattccatcaagaaggaacatgactgccctcttctgtttgggttgggtattgtagtggtttttatgggttagctctttttgagaatgcgactttctaataagcttttaaaataatgctgtttttaaaacaacgttgtgatttttgaaagctagtctaacacatagctgtctacaatgattttttttttttttgtaatgaggaagttcttgagttgctggctgtcagtgcccagtgcaaaatagctctctaaagatttgcctaattgtaaattcctttttttttaattttttattttgagatgaagttttgcttttgttgcccaggctggagtgtaatggcgcgatctcggctcactgcaaccttcgcgtcccggg

SEQ ID NO: 114707 - DNA, 2140 bp, Homo sapiens
ccggcccataaattccttaagccagcataaattccttttggaataggcaggacataaataaacatatcctggaaatggaataagttggttatattctttttaattagtatatctgcttcgtaaaataagtaactgactagccttagtagactgtggtttccaggtttattcagaagtagcaagatccctccatttttttttctaccaaagaaatcgtatgtgggatcccaaaccacaaaataaccgttcctgtggttaatactactataatgcctgaagtgtcttttgggatcctgagaacagagtttgaaaacattactagacagaaggattggttagattcatagttttgttgttgagtgaaacttgcttatgtatatatttatgatattttggatgtagtcttttgattgtttaaatcttaaaaagtaatgggatcttttgacactggggtatgttttatttttatgtgtgcaaattttaaccatattcttttctagttaaagaggaaaaagcaagttgctccagaaaaacctgtaaagaaacaaaagacaggtgagacttcgagagccctgtcatcttctaaacagagcagcagcagcagagatgataacatgtttcaggtaaagttggctattttttttttttttttttttgacatggagtcatgctctgtcacccaggctggagtgcagtggcgccatctcggctcactgcaacctcagcctcctgagttcaagcagttctctgcctcagcctcccgagtagctaggattacaggcatccgccaccagacctggctaatttttgtatttttagtagagatggggtttcaccatcttggccaggctggtcttgaactcctgaccttgtgatccaactgcctcagcctccaaaagtgctgggtttacaggtgtgagccaccatgccttgccaaagttggctgtttctttagattcagaggaattattatctggcttgatctgaagaatgttaaaagtactatgatctgataattgcctaatatgtatgttacaatcttcttaactagggacatttattaaaatagaacaaactagtaaaagtattttgtacgatgctggattattgttaaagtctctaaagtctagttttgctgtatttaaaccaatgcaaatttaattgagaactgcacattttgaaagcaacttggaggaggcaggtcaagtgttgggacagtaaagtatgaatagattattatgggacaggaagcagcaatgtgacatgcctaattttggcctgatgagcaacagaaaaggggaatgggttgaatagataaagtgaaggaagttcattagagggacttgatgaaatcacctagagaggactcgtatagctttttctcttgggtttcctgtcttgttttagggagacttgacactggcatctttgtacaagaaggatttgtgaggaagggatgttggggaataaatgaatgcaggtgagattgcttaggtaattgtaggctttaatctgtatgtgaggtgataagggcttagatggtttttcctaaagaagaaattatgccaattacaagatacaggttaggaagaatggaccagaggaattaggcagtcagtgaagatgtggacttgattgtggatgtgattgaaaaaaaaaatggtgttgcttctgtagcacctgaagggcttagttgggaaatgttcatgtgggattatcagcatggttgactaaagctgcctactgaagtattaaacagaggaagaacaggaagcagatgaggggatgtcttgggttatattcagatagagaatggaaggaaaaagaggatgtaggttaagagagagggtgaaggaaaattagaagagtgcagtaatgggagcaagaaaaggatgagtgtttccaggagctataagtattagttgaaaccaaaaagttgggtggaacgagactacaattttttttttgagacagggtctctgctctgtcacccaggctggagtgcagtggtgtgatctctgctcactgcaacttccgcttcctgggctcaaatgatcctcctgcctcagcctcctgagtaactgggactacaggcaatgctccatgacgcctggcaaattttctttgttgttggtagaaa

SEQ ID NO: 114708 - DNA, 1050 bp, Homo sapiens
atttgagtacactgagataacaggaagtggctatgaagttaacactagtacactactgtagttaattttatgcagttatgaattaatactccatctttgtttacatttctctctaacttcatataatagatttgtatgttttatgatagtaagtgataaaataacctcatatctaggtatgttttatgcattcatgacatacctaactttttcttaatgttttcgttatttctaggctatgcagttgttctgtgagttttttcaaattgtcaagtctgcaaaaatttttccagtatatttattgaaaaaaatatgcatataagtgggacctgcacagttcagagccatgttgttcaagggtcagcagtagtcattttcatgattagatgtagagtgagcatgcagcaagttgtgaatatgaatacaattgaaacagataccactcttgaaaggagcacctctttttatgtttgtttcttttgcagattgggaaaatgaggtacgttagtgttcgcgattttaaaggcaaagtgctaattgatattagagaatattggatggatcctgaaggtgaaatgaaaccaggaagaaaaggtgaggtctaattacttgaattttattacagtgttaggactaaacgacaacttttctgagtagcttacttgaaatgttggcaggacacacggggcaaggaagagtcttactcaattgattctctatcttctgtagttattttggacatgatacttaacatttttttaatgagatgtcttaatacagcttttgggaataaaacccagaaaagtaacacccctaatatcacttcagttggctgctaatttacttgaacaatttttaaaaaggtttatgcaattctgaagcagattaggcactatctgggaacttgtaaaatcaggaatggaaaatcttggtttacaatgcttccttttgattcagctcctaaaagctattctttagggcattactcttcaagcggatctctgctttccttccatttgtgcttcatccagtcccaagcctcttagcatt

SEQ ID NO: 114709 - DNA, 2977 bp, Homo sapiens
tgagattgataatgctcagtaaattgtgatgatatgtaattaacaaatgtaagagatatgattttcagtattgtagcattgtgtccaagtggcaattttttttttttttttagatggagtcttgctctcttgcccaggctggagtgcagtggcatgatcttggctcactgtaacttccacctcccaggttcgagcaattctcctgtctcagcctcttgagtagctgggattacaggtgcccaccaccatgcccggctaatttttgtatttttagtagagatggggtttcaccatgttgggccaggctggtcttgaactcctgacctcaagtgatccacccgccttggcctcccaaagtgctgggattacaggtgtgagccaccgcgcccagcctaaagtggcaattttgataaaacagtattctagttggaagtatgaaaatcctcaacgcttaaatagattttcacctttgaatttttaaactttgttttaggtatttctttaaatccagaacaatggagccagctgaaggaacagatttctgacattgatgatgcagtaagaaaactgtaaaattcgagccatataaataaaacctgtactgttctagttgttttaatctgtctttttacattggcttttgttttctaaatgttctccaagctattgtatgtttggattgcagaagaatttgtaagatgaatacttttttttaatgtgcattattaaaaatattgagtgaagctaattgtcaactttattaaggattactttgtctgcccaccacctagtgtaaaataaaatcaagtaatacaatcttaactgttgtggccttttttgatcataagagttggtactgtttaaggccaaaagtaacagtttttatagatcttttagtttcaactcagcttttacaataaaaaggatttgtattgcattgagtttataaacttttggtttgtgaacttcatatttgatcttttctcttccaatcaaatgtctaggcttgtttgacttccacccccaatggtttttcactctttttatttacttcattttcctttaataacttaatctcttcatgttcagtttttacttcactctttattcttttctttgattatggtatgcttatttggaaagtcagtgaaactgtcaaaatgttatctcaataagatacttatatgagaactacaatcaccgaatctactgtattcaatattagcagatctaatttgataaacaacatggcttgtgtgaaaactgagcaggtgtttgtttacccatagtgttctgtgtagttattgcttagtctgcagaaaataatgacttagatgagatgtctgacttgctttcacttattaaacatgttcaccatgggatgatgtctgtaacatcagatattgttcaactagactaggatttaataaaaattgtgaaagcttactggcctaacattttattttataatattgggtatgaattatatgtagccagagatgtcattaagctttactgttatagtaggtaatatggttagtttgtagggaaaagagcatatgagcacatgcttgtgtattttggcctttgccccagtagaacagaccaatggcattctagacttgatgatactaagttttagcagacactagtaagtggtttgtatttaaccatactgatgaagcagacagattgaggcacagattttagtggctttgtggcaataaatagggcatggtgtgccttaggaaaagaatgtttataaagggaattataactgaaattaaaggaggcggcagtgaagaggaaataattctcttctatctaaatgatatacatatgatattttgagatttttataacagcagtggaacacaattctaggtagagtagaaaaaggaaagttttaaagacatataaaagattcttgttgacaaattatttttggtagcaaatctcaaatggttacctgctattaaggtctgccatattagagttttgcactattttgctaccaagtttgattcatacatctaaaacattttgtagttacttgtcaaggacttaatttgaaaatcatttgccaggccacatagttatcaatttttttttctatcagctattctgttgtatttctaaaacattttttagatgactttttaaagtatatttagcagtaaccttatgaggttcaaattggtaaatctcttgtaatttagccttcatcgaataataggtaccagtgtattaaaaatgtgtattttttgcagccccttgaaccagagtaggttcagagaaactcccaaagtttgtactttagacacatcatgcttgattggtaacttccctccttttttggggaacatgtttgtgtcctattaacttaattggatagatttttaaatatttcttatttttggcacacggaaagggtagttcgagtacagaactttgatttttggtgtagatgcagagggaatgatgggtaaatttcctaggtttatgtgaatttagggggtgtatgcattttgaaacaatctactaacagatggtgctgaaatctattacctacatgttttctagttgttcagcattatgttaatgaagcctccatataaggagtgtttctctggcacagttggtaagttgactgctaacttcatttaaatgtgttactggatatgcagtatactgaaattattaatcagtttgtgtataggaaaagagaactgggttaaaagcaaattaacttgttctgaaaagaaagtatagattaattttgttttctgtttaaattttatctccttggtaaagatttttttttcctgggcagaaaacttggcatttttaggcgtagataccttaccttacaatgccaaaatgaatttaattccagtactcaggtttttccctttaacagactctatgtgtatcagggctttctaatgggtttttcctcttcgtttttaaaatgtga

SEQ ID NO: 114710 - DNA, 1079 bp, Homo sapiens
cttaccaagtgtaaatcacaacataggctaccaaaatatttcttatttgctaggagaacaaagctgtcacggtgcatgatagttggacagagatggctaaaaaagaggcaaattcagatttggaaacagggtggcctcttcattatttattgccaagatctgaaaatcttcaacatcttataagacaacaatgaagtagcccctgaacagcatggagttgctgtgagtttgttcgttgcagacctttgtgttgggtcctgggaatctgagctttgttccctgtgcatggtggataattgaaaccaagaggacatgggatagaccttgtgacagaccaattctgtgacccctgtcttctgggtcacattattcattgttgatttaaatacaggactaccaaacagtacaaatctatcatgagtctggtagaaaagtaaaagtaaaagctgcacacgttacatactgtttattgttctaatgtacaactaactatttgcatataatgtgatttaatttattgctgttttgtgtagaaaaggagaactaatgactgtggatataacccatgttttgtataatatattttatttcttgtgcgaactggtcatttaaaatatctacttcatttgatgtttggatataaatgtgtatgtgtccttgtaaatgtttctatcaagcaagaatgccacgtactcagagtataacaatgtgttctcattaaaaaatacatcccacggaaacctcttcctgtttataattcaaccagcatgcactgcacatatccatattctttgagggcttttgttctcctgggacttgtttaagtcaaagagcaataggtgggtccgatgaattgtaatatttgaatgatacccatgaaaaaacccaagaatttctgcctagcaaaggcaaatcgacagaattttaaaatgaggggcaaaccttgaatcagctggtaagggaaagaatcttcatgaagaataaccgtcatcttgagtcactacagctcgagagcacttcatggttgacttcatcgactcatgttattaagtcctttgccactttaaagaggtcctaag

SEQ ID NO: 114711 - DNA, 1096 bp, Homo sapiens
tataaaacctctaaaagaaaatatggcagaaaaatttaaaaatcatgaattaggcaaagatttattaagtaaaacacaagaagcataaactagaaaagaaaaaaattaatgttaccttttatcaaatttaataattttggttcttcaaaacattgttacaaaattaaaagccaatctaaatattggagaaaatatttgcaaaatatttacagatgctccttcacttacagttgagttacatcttgataaacccgtcataagtcaagaatattataagtcaaaagtgcatttaataccttggcaaacccactgtaacatgaaaaaatcataagtcaagccattataaggctagatgctccttgacttatgataggtttatatcttgataaaccaatcatcaactcaaaaaaatcttttttttgggggggggggaacaaaacaataaacacctttattacatgggtgaagacaaaacaaggatttatttgcctttccgggccttgattttcctaagatagaactccaaccctttgccctctagcacatagccatctgctcggccacactgtcccggccttgaagcgatgcatgcaagaagcttgccctgctggaactgctcttccaggagactgctgattttggcattctttttcctttcatcatatttcttctgaatttgtttaaatcgttttttgtttaaaatctcttcttcctcaggagtcagcttggctcccttcttgcggcccaggggcagcacgtagtgggacatcttaccactgtcggcacggtgtgctgtcgatgagcacgatgcaattcttcaccagggtcttggtacgaaccagctcattattagatgcattgtagacaacatcgatgatccttgttttacgagtacaacactctgagccccaggagaaattcccccacgtccaacctcagggcacggtatttcttgttacttccctgcacacggactgtgtggatgcggcgggggccaatcttggtgttggcagctgggcgctccaactcatacttccgcttcttgtggtagggctttctcttgcccccggttttgcggcgctggtgccagttgtcc

SEQ ID NO: 114712 - DNA, 1034 bp, Homo sapiens
atgccttactttccctggagagactaggtttacacatggtagggattgggccttatgtttgcttcttccatggcttttgttagcactggtggaattcatgggcacactttgcattcagtttttttttttttcccctggaaatatgcttactgaatcaactgcgtgcttccttgtggccatatgtttggtatgtggtccaagtaaacctgaagcgagagtcacaagaatagttaaaataaaataaatgaaatttgaggagttaaacatcgttagtaactccttcctactttttaaagacttgcctttattgtaagttgttaacctgtctttgccagtgatgaaattgttcagtctttcaatatcagatttccattttttttaaattaaataacaaatactaaaataacattctcaacacttcctggggcatcacaggatggaggtgtcacattagattaaaatataaaacgttttttgcttatttagattggtgctggtgaagagaagcaaaaggaaggaggcaaaaagaagaacaaagaaggatctggagatggaggtcgagctgaggtaaaagttatcatcacagagggctctgttatcagaggttggcaaatcgcagggaactttctgagactttcctaatgtgtaagggttctaatggtttacatggtagtgtaagatggtactggttggaaaaatcaggaagaagaattaggaaagggtaatctgagaggggaaaaaagactttcagttgttactgtaaaaggaagcaactggcgtatgattgtataagatgatctgattgtagggttgaatataaaaatcagagaacaaaagttgaagaggagactggtaattattcagttgccagatgtgatgccagctctgacatttcattaaatgagatgttagggaatagagacttggtgtttgggcttacactgaatacaatgaaaaccaaagaaagccagttttttgaccccctccttgccctttccatctggacctgccctagggttggcttctaagccagg

SEQ ID NO: 114713 - DNA, 1321 bp, Homo sapiens
aacctctagaaacctaagtgggtgttttatatagaatatttttgttaattttatctgctatagaaagtagtagtgtgttgttttatatagttgctaattacatactccaagctgatcatggcatctttgaattcagtaaatactttccttgaaggggagaccttaagtcaaagaaatttgtgattggttgtgagtggacatataggctgacccgctgcacagaccatcacctggacatgaatgaaacaaaatagaaaagccagtttattgtttttatttccagtattgtttatagctctatttgtaaaataatttagttagaaaagatcctaagaagacatcttaaaagagaaaagaccacttgctgtaaatagtagcaaaatggtaattgtcgattcagcataagaatagggcatttaattccttcttttaccttcatttagaaccaaattgaggtaatgccgggtgattttggcagtgtttatttaccacattgaatcaatagtcctgggtttctgtattgtttttattatttctttcccatttctaaataggaaagcaatatttactgatcatttatttcctgatttgtttgttgtcttgcagttgaatccttggcctgaatatatttacacacgtcttgagatgtataatatactaaaagcagaacatgattccattctggcagaaaaggcagaaaaagatagcaagccaattaaagtcactttgcctgatggtaaacaggttgatgcggaatcttggaaaactacaccatatcaaattgcctgtggaattaggtataagctacacccatcatgaccttccatagtttgtggtctaactaaacttccttttattatcttgccatgttttattcttataatatttttatgttaccattcagtgtttttaatctgtttaatttgcctacttgagattttttaaaaatcaaaatgatacagagctttgtagtcaaaattcaaagttaatttctgaaagagtttactttggtcttatcttttggggcattgtatatttttagtcttactatgattataaatgttacaaaaccgactagacagtgtttacctatttcgacttaaatgtcttggttttgaagttaaaaatgaagctacataatctcacatggaaaggttaagaaacttcatataacacatgaaaaaaatgtactatttttataaattcaatgaaagactattcctagtcttaaaacttttattggggtgggaagaagttatttcaattaactgagaattagatgcatattttgtaataggggagaggctttcttaatctgata

SEQ ID NO: 114714 - DNA, 1037 bp, Homo sapiens
ttaaaaccaagtactgccatttgatttcagtgtacagatgtttgtcctcgtgttttgtcattgtgttgtggggtcgggttgtaccacctttgttttgggccagtaacaacatgtaatttctaagtgatgttccatagccagctaaaggccagatcacagtgtctgagacatggtgctgtgggcacattgactcaaaagaacctgggccattgcaatcaatgagttagtcacattgtgagtagcagttgttttcagagaacaaagtctatgtcatttaattagtgatgccaagtttagtttaatttgtttgaaaacagctaaaccagatgatttccaaaataaaaatacactagtaattggaagccttttgaattactttggctatggatagaaacagtagtttatagatttagaaatttaggattttatatattgggtttacttgtagtaaatattatcatctgtctctttcagacaaccacattaattggcaacttgtatgccaagactcagaccatgccatttttctttaaattttcaggtgtattggcactctagtgctcacataatgggtgaagccatggaaagagtctatggtggatgtttatgctacggtccgccaatagaaaatggattctattatgacatgtacctcgaagaagggtaagccatcaactagataaagaaaactgaagtcaatgactatggatccataagttattcttaagagttctcagtaagggaggaatgatatagatctcactgcttcttcatcaggtatgcccattatcagtacttgaagtgttgcaatttacctgaagtaatagaggatttgatgagacctctgttctagattgatggaggtagagtcctaaggtattttgggaaattcagggagactggtcctcccctctcctttaaaacctggtgatagagttgcgggaaggggtcactagtgagaaaggtctccatggatgaccaaggtagaagctactgaaaatataaaatgtaaaaattacttatgaaaaatgttttgt

SEQ ID NO: 114715 - DNA, 1032 bp, Homo sapiens
aaatgaacatttttcgaagccatggtgtgattcgaatggaatgaaaagattatactttcttctccttcaggggtgtgtctagcaatgatttctcttctctggaggctttgtgtaagaaaatcattaaagaaaaacaagcttttgaaagactggaagttaagaaagaaactttactggcaatgtttaaggtaaattgaaccatagtgcgtggcccccactgttaatatcatttattcatgttagttgaagtgacaccactggcgttccgtgtactaagctgaagtctaattggttctttagcaaaaattaagtgtttttattatttttttaatttcatttttttcctagcaaaccattccttcaacatgtttttaaaacatgaagtatcaacatttatattcatacagtgctacgttttagctatagtacttagaagtaaaaattaaaggacagttttttaaaataataatttttcctgttttcagtacaacaagttcaaatgccggatattgaatgaaaaggtgaatactccaactaccacagtctataggtaagaatattagatgtcattaaatgtatctggtatgtatgtcattttgtctttgttaaaattcctttcattttatctttagatgtggccctttgatagatctctgccggggtcctcatgttagacacacgggcaaaattaaggctttaaaaatacacaaagtaagtaatgtaactttaaagactgtgaatgtatctgtctagaatagatatatgtttaaactttcactgatttctctttaccattttctgttgcacatgaaaggatggtattttctcatgctctctattaactgggagctgtatgccatcaggattttataattgaaatccctcaaggggtgactgacttgctgtcattgccagagcaatcacaggggatggagattttacaaaatcatacagcatgggccatcctggctctataaaagctttgagactcactgggagtatgtgcttttgccctttatatgtctaaattaa

SEQ ID NO: 114716 - DNA, 1031 bp, Homo sapiens
ctgagggcttttgggcacttggggaggcggatgttggcaaggaggtaggagggtgtgtttctttcaccatgacccaaagtcagccaactttaccatcatctatttcattatcagtgtctttttcccagtctccttcctgatactcttactaagaaaataaatacatacataaataaaatgaaaaaagatccagatcttggagctttaaggaatttaagaaccatgagaggtactgcagtggatagttaaagaactgaagggacccttattccctgccactgttggggaaacttgactggattgaggaatataacaggcagggcatgtgttacacgtctgccaaattgtaaatcagctgcaattctataacatcagaaacactgacatggtttctttgattcaggagtggcactgattgaaatatgggacatcatgaccatattctgagctcaagaacactgaaatttatgtatatatacacacacgtatacgtgacgtacataaacattcttttgcttttcttttacccaggaccaagaactatatttctttcatgaactcagccctggaagttgcttttttctgccaaaaggagcctacatttataatgcacttattgaattcattagggtaagtcatatttattgctttcttctttagatttaggatatgtgatcattttattaaataaggtctactaaaaggaaagataatctgtatttgagaagaaatatataagacgataagtaaaagtagaagtctgtggcctcataaatcatccctaatagttgattttgcccatatacacatagaaactggtgagcttgaagggggacctgtggtccttgacataggagctctgtgccctctttgactttgatcatttatttgtattttctttgaaaaaacggtttttacattgcttttttcctttgtaaattatgaaatgtttcaagtataagtttatagagaatagtatatccaatatcttgtacttaactacccacatttaacaaatattcacattgggc

SEQ ID NO: 114717 - DNA, 1008 bp, Homo sapiens
acccgggtacgaagattccaacaggatgatgctcacatattctgtgccatggagcaggtatgagaccctgggaataaaatacttagaaagaagagtcaagaaagtcaaggaaaataactactgtttctttttttgttttttaatttgaagattgaagatgaaataaaaggttgtttggattttctacgtacggtatatagcgtatttggattttcttttaaactaaacctttctactcgcccggaaaaattccttggagatatcgaagtatgggatcaagctgagaaagtaagtggtgtttttcagcgtgcttttgaatactgtttgaaattggcttgttctgagatgtaagaaagccaagcctctttaaatggataaaagcaaaatgaaattggaaatggttcctaggtttgtgtaagctagtttttttctttatgattgtgtatttttgaaatggttgaatgttttcatgacttttttcagttatcaagctataagctttaaaaaggggttggtatgagcatatgttcaggtggacaaaattctaaagcagagaatattgatctatgaaagtaattactgtatttttagtctcaaattaggctaaaagaagggaaattgcgatgaaaaaaataaaaatcattttgctttatcctcagcaacttgaaaacagtctgaatgaatttggtgaaaagtgggagttaaactctggagatggagctttctatggcccaaaggtgagcactaaagtacatttgggtaatatgattttcacttgtggatgaagaagatacgacttcgaaaaaagttggaaaaaagaaaatcagccctaatccaactattgagctccactttagtatcactggcattttataataacccagtctttgcttcttagattgacatacagattaaagatgcgattgggcggtaccaccagtgtgcaaccatccagctggatttccagttgcccatcagatttaatcttacttatgtaaggtgagtttc

SEQ ID NO: 114718 - DNA, 1777 bp, Homo sapiens
ctgataacctgattaaaaaaaaaaactttctgatactcagaagttaagatttattcagttgaagatcatttctttcaggtgttgatcgtgtgatatttttcacatctgtaatctgaggttcatatgaaatgatagtgaaataaaattgttcatttaggtctttttgtcatgttaatatgttatcaggttaatgggaagtttaatctagttaatgtaaaattaataaattgtaatctagtttattgcttttttggaaaagaatactgaaaacattgtttacttaatacacatgacctgaggtaataaagaggagctggcctttttgaggggggaataatggcagtgaataatattatctaagacagttttgccagctttaaattcctggaagttcatccaagaagtcctgatccctgtgttcagtaaaatcatgtgagatcaaaatataattctgattttagatctgacaaattctgtatctctgttacaataggtacgacaacaattccacgatgccaaattcatggcagacattgatctggatccaggctgtacattgaataaaaagattcgaaatgcacagttagcacagtataacttcattttaggtaagaatggaaacttaccaaagaaaatttgccacacctcaggaaaatctactgaaaccttgagacaggtttaagtgaattgtaatcaagaatttatttagttccttccagtcctgattttttttctattatatattttaatatataataactataaaaataggctcatgcatacatactgggtttttttttttttcacttaaatcatggatgtctgtgagaaaatattttgctattataacaagaatgaagacgcattgcttttaaacacatctattggattactttctcaagataatgccttatgtgggattacttgaaaaaagatattcatgatgtttggggttttattatttggttgttacgttgtctagattgactccataagcacagtagttttagatattgcaaagagtttcttttaaatatcaacacatggtcacttgtaccttttaatgtatcagaagctatggggtaggttttgggtcctaggatcatttcttttcagatgttcagtgtgaattcttccatatctttagattaagtctgacaaagctttgtgtgtttgttttagttgttggtgaaaaagagaaaatcagtggcactgttaatatccgcacaagagacaataaggtccacggggaacgcaccatttctgaaactatcgagcggctacagcagctcaaagagttccgcagcaaacaggcagaagaagaattttaatgaaaaaattacccagattggctccatggaaaaggaggaacagcgtttccgtaaaattgactttgtactctgaaaacgtcaatttatattgaacttggaggagtttggcaaagtctgaataggtcaacctgcaggcgtaactatttttgacctagtcagtttttaaacaatgtgcatttgaaggagttaattaaaagagagccaataaaatgattttactcattcagtatctgagtactggaagtgaaacatgaggaatgctttagtgtaatgtgggagaacttttttgtaaatttaatgcaattgaaaaagttttcaaattcaattaagataactagaattggattatggtgtaaaaataaaaaaaaaatttattcacataagtttcaagactgctctgtccctcacatgtacacatacatgcctgagacagataatgtggttca

SEQ ID NO: 114719 - DNA, 1009 bp, Homo sapiens
ggtgtattagtttcctagggctgctttcacaaatcaccacaaagtgacataaaacaacacacatttattctcttccaatcctgggggtcagaagtcaaaaatcaaatgttgccatggctaccttccttttggagagtccaggggagaatctgttttcttgcctttttcattttctagaggtcaccttggctcctggctccttcatcacatcactccagcctcttgcccctgtcacttcatctcctacttgtgcagatcctcttgccttcctcttataagggcccttctgattacataggtcaactctgatggtgcaggacagtttccccatctcaagatttttaatgtaatcacatctgcaaactcccttctgctaagtaaagtaagatattggcaggttccagggattaggacgttgacagctttgggggactatattcagcctaccacaccaggcttgctttacaaattctgaatgctcaaacttcaacagtcccctttctgaccaccacttcctctgcatttgccttctttgtcatttcccttgacttgcttttcacaatatcagctaagccttcaacctggctgcataaaagatcagctccttctcccattcctcagagcagtttcccaaatgcccatctacttgccttaagcagatgatcttacctcctacttaaagagaaaaagaggttcctggtgtgtattgcttcagctcccgtcctctcttttctccctgtgctatcctggaaggagaacacagcactgctagtcactctgaagtaccagagaacaatgaatagtttactgaagatgtcataggtaaaaatggtaaagtagattatgttgtacatttcctatcatgctccagggaagaatccccattttcttcctgcaaatctttcactttggccaccagctgctgtatctccctccatggatttttcccttctggccttgtcatctccaggtcacccctttctctgtacgtgggttatttccaggcctc

SEQ ID NO: 114720 - DNA, 1053 bp, Homo sapiens
tatatatattgctatgcaatacatatatatatattgctatgcaatacatatatatatattgctatgcaatacatatatatattgctatgcaatacatatatatattgctatgcaatacatatatatatattgctatgcaatacatatatatattgctatgcaatacatatatatattgctatgcaatacatatatatatattgctatgcaatacatatatatatattgctatgcaatacatatatatatattgctatgcaatacatatatatatattgctatgcaatacatatatatagatgtctcttctcaacagcttagatgaaaacaccacgatatatatatatcatgtgtgtgtataatatatacacattaaagctacttaggtgattctggtgcagccaggtttgtaagctaataatctacgttctagattcatattttctcttctgcttctccaaggcctgccctcccacttctctttttcagtgctaatacttgcaatcaccctaggtgatagacactcaaaatacttctgctaagaatagaagcctgcttgcattttccctaggcaagttgtcattggggcaactgattcagaatacatctcaacaattccaacaacctcaagtaacctgtataaaagataggactctctgaagtccagttttgcaactaataccaatgagggaaacacaaatttgacttctcaggattggagagaaacatttctcatgatgtagacatgtgtatcataggaaacatcctacagacagttttcttaaaatcttgtatagatcttgttcttgtcttcaacatttcacattcacattcacagaagcttctgaaatccctccatctttcacctcactatgtcgcttgtttgtctatcctctgccctcatgttgacttcctgttgggtgacaactggcacttcaggttctggattctggctgagctgagacactccaaggtggctggtggtggtctgggcaactccaggtactcaggcatttccttgcttcacttttttttttttttaaacagagtctt

SEQ ID NO: 114721 - DNA, 1043 bp, Homo sapiens
ctggggtgctggagacattaggctcataaaaggcataaaggtcagaacatcatcttcttcaaatagtccagtgccttcagcctttgagtttgagccttgtgataattgtactttattgtgtaattacttcaggactcagtgggaaggtggcgtgatgagatgactttaggactcagtgggaaggtggcattcccaaaccagtttgcctggactcagaaaatgcacatacctgccatccatattgttagtttattttataactttctagtgattatgaaatacattaaatactcaaatacagttttcttgggattggaatcaagccagaataagccaaattttactcttatgtgatttacctttaaaatgtggtatggtttatacatctgtgtgtgtttataggtatggagatcagaagatggatttttaaaagctcttttaatttttaactttttatcttggcagtttttaacattataaaaagtagagagaatagtatagtgaccttccatgtaccctcacctagctaaatcactagcattttgccaatcttatttgaaatggaaagcaaaggtcatttcttctaagtcttatagtatttttggaactgaatagtgcagccaattgttattttaacacaaactgctctaactcactttctggaaataccagagaagttgtgtaattaggtagaatcttcgtatactctaagataagaatttttacgcaaattttttttaacttgaatgggaggaattattcatgctttgacacttgagttatctggatttgtcttgtattctgttttctcaaaggtggaaggaacagcatatttaagttcttttctgtggaaaactcagaaattgagtctgtgggaagcacctcgaggacagaacatgttggatggtggagcacctttctatacgacttacaggacagcagatggggaattcatggctgttggagcaatagaaccccagttctacgagctgctgatcaaaggtaagtgaacttcacgcgtctcccccagttccccttttgct

SEQ ID NO: 114722 - DNA, 1046 bp, Homo sapiens
agagggagaagttgaggctggctcccaggtttctggcttagatgacctgctagtgtcttgagggaagactgctgaacacagtggtcagagcatagagtggcagctgactacctccgtcccagctctgccatttactagctctgtgatcttgggcaagttacttaacctctctgtgctgtagtttcctttgtaaaatggagataataatgacatccacctcatagcattgttagttgctatgagaattcaatgagttcatccattgttcagtgtgggaacagtgcctggcgtacagtgggccctctgtaaaagtttgtcattgtggttatttttactagaagaaaaggaactcagttttggtcttttcagttttaaagtgcctttcagatatccaggtgggatacttgaggttagggactagaaacagatttcggagttatttgggagccatatgagactatgtgatccactaggaaaggggatagaacaccggcatttaaggaatgcgtgggcagaaaagagaagcaagggctgaggacagctaaggagagaagcagaatggagtgttgtcatggaaaccaaagaaaggagtggtcagagggtcaaatgttggtggatacctcaagagtttagagactgagagtgtcaactggattgggtcctggctgatcttcacaaaatccattttctaccagaaaccccctcatctccaaagcttcagcctgcgcttccttctcctgttcatggtgaatcatgaccagccctgtactgagtgtgtgcctgtgggacactgtcatcagggcacatctcacactttccagtgtgccctctctgaagtgtgtaccagcagcaggggagtgtggtttatcttttgtgggccagctcttggcgtactcatggcatagtcgctgcatgagatagcagcaccggatttataccagtacccgccaaactcaagaccggtaccttccacagggcttctgtgatccacacagttccctgagggagacgtgctactatcattggcattgaagacttgaaggctt

SEQ ID NO: 114723 - DNA, 1047 bp, Homo sapiens
ctgtgaaaatgtgcttgactatactgtgacatgccagaacatggaaccagaaaagaggagagggatggaactgtgggagtcagggagaccgctgtgaaaatattccttccacatgaatagcattccttctaaatgattagagtttagagtggaaggtcccagaagccaccagaagcaggaagagaggccatgcgacttccacttgtggattcctggaaggctgagaacacaaaagccaagaagacatactgacttcaggataatagaccacaaaagtggggagggaagattctggtgttaaggatatccaggtcacttttggccaaccagagggaagtttgtcctttcagattatgtaacagggaagggaattttggaagcccttggagagaaccagaaaacaaagtaaggtggcaccgagtgagcctgggaaacttgccaccaaaagactcagggatcaaggtcaaagagagggttgtagaggtctgagtgggtctcgtgtttgctttgtgggtttctgggaagcattttgaaatatttttacttaaactgtgtgtcttaagaggacgctctccatttacatccaacataacatgctcatatgaacaaatgtaaattatgagaacatcctgtgtgctccttctcatctggattctcccttcctgaccacactgccttctgctccaagtctggccaagctgatttgcatgtttgtttgagagggatggaaaatcattagagtttagagtggtattttggataaatttttgaatggtgtgagtgagaccagttctgcagatggtcagtgagaacaaagaaggcacacccaggcaggggttctcctagcatggcctcaagagtgggcttctacacccccaagcagttgtcagctactgggcagcattcatggtgaaaatcacttttattttctctttttaaaaatattgtatttatttattagtattgttattatttaccttgtgggactttgtttgtttgtttctatagagatagggtctcactttgttgcccaggcttatctcgaac

SEQ ID NO: 114724 - DNA, 1068 bp, Homo sapiens
atgccatgtatatattaactatgatgactgtctacttaattgtctaatctgggacaattttgagagtgaaagaggatgggtaacttctaagccagccagaacactaggactaaaggcagaaactggaactgtcctaagcaaactgggatgtcaggtcgtcctaatgttaggtcatttaatcatgacatcagccctgtaggtataattatccctttggggcacaagagggaactggagcacagagagattaagtaacttgcccaaagccactcagctagtgagtagcaatgctgggatttaaacgagggtaagctgactccagaggcatcattcttaactgctgtgcaacactctctgctaagagctaacataggattgaaattttagtaggtgggagatttttcttaatcctcacagcaacttggatgtagtattaccctgttttcacaggtgcagaaactgagtttcaagtagatccagcaacttgcccaagtcgtaaaaccagaaagagtggagccgagaatcaaagcttggatgcctgaccagagtggacctttgaaacactcctctgtatattgtcttcaggctgcctgtatttacaaactctgatattgacctcattacttctccccgttctgcaggcagaagactgctatgagagcacttaggacccaagcgacatcagccttggaacaggcaaataaaaatggaaagctaatcttggtggccttctcttcttcaaaaggacatttttaagatccaaatagccatcagtatggccaagttggttgttcggctatgcatatcagaaattccataaaatattctccaattacggtgctggaggagggtattatgaggagttcatgaacatcaagaaggcagttaatgggttatcagaagactaagagaagtggtttccacaaagcacagagtcagaagcaataatgtggtgtttggagccacaagtacaccaggtgcagcttttcttgcttcctctacagtggatcacaatcttggcagcccatttagaatcacctgcttttaaaagtcaccaactgccttggc

SEQ ID NO: 114725 - DNA, 1062 bp, Homo sapiens
gccggcccaagggcgggggcgagacccctctgggcctgcccctgccccctaccttgttttccccgccgcagctcggggagaacggatgctggagttggggcagactcggggccgccgggacttcgggagtaaggaggacgtggagccaccagaaaggcgcccgccatctcccgcgacccctgcctggtggggggtggggggtggggtgtcgtcctcaaccaccttcgctgccttcttgggcaggttggtgtcggtttagtttctgcggtttgcagggttgacatcctaactcctttgagtttcgcatcccccttttgtggagggggctcagagcctggagaagcaacagacggggaattaaggcagatgcagcccagcacagcgtggaggggtccgaagtggcctcacgggggcctgagcatggctgtctttccaggctcctctttatttgccaggagcccagctaagcccaactttactcccagaaatgttgaggggaatctgcggactcgaggcccctcgcctcgggaccagcggcttctcttcgccgcagctcacgcatgatcggggtgggattccgtcttccttccgggagaggagaatgcccagctgcctgggatggggaaacgttgccggatctctggggaatgtggtctcaaggctgcaggggcctggcagagaggaactgtccatcactaggacatagccgaagctcgccttagcgaagagagtctcacctcctcgggctttgcacagagttggagaagaggtcgggaatcacagggaggctggattttggctgctctgtccccagcctgcaggtccctgttcgccctgtggctcggaattttattactgatgtatataatctgataatcttttcttaatgatgcctaacaagtgtgatttttttcccccttgggtttgtaagacagttgattttatgtgaggagattgatccagttcttatattttagccagtgcttgtctaacagagattgggagagctatcccgtgctgggctgttgcacagttttcatctccattcactgagatgcttca

SEQ ID NO: 114726 - DNA, 1049 bp, Homo sapiens
cctgtaatcccagcactttgggaggccgaggcaggcggatcatgaggtcaggagatcgagaccatcctggccaacacagtgaaaccccgtctctactaaaaatacaaaaaataaaaattagctgggcgtggtggcacgcacttgtaatcccagctacttgagaggctgaggcaggagaatcgcttgaacccgggaggtggaggttgcagtgagctgggattgcgccactgcactccaacctggcgacagagcaagactctgtctcaaataaataaataaataaataagtatgaaatatttctaacatacataaaaacagagtatagtaagccattttgtcttctacttcctaggtttaatagttgctaatattttcatatttgatccatacctctccccccccggaaaaataaactataacttaaatatttgatctattcctactcctttgcctccatcctcaggtaacctctaatgtgaagttagcgcacacagttctcaagcatgtttggaactacactgtatccacaaaaaaatacatgtgagtttgtgtttaacattttacataaatggcataattctacctatgtatagcttgcatttttaacttactatgtttttgagatacatgtgttaatagatctttattcactttagctgttacagagaatcccagtgtatgaaaaaagtatagtatatttactcccttgccaagagtaagttagggtttctggtttttcactgttttttgtttgagctgcggtctcgctctgtcacccaggctggagtgcagtatcgtgatcactgctcactacagcctcaatctcctgggctcaagcagtcctcctgcctcatcctccaaagtggctgggaccacaggcacatgccaccatgcctggctaatttttttcatttttgtagagacagggtcttactatgttgctcaggctggccttgaactctcagcctcaagtgagccttctacctcagccttccacagtgcatgagccactgtgcctggcctagtttttcactgttacactttttct

SEQ ID NO: 114727 - DNA, 1025 bp, Homo sapiens
ctgtcttgatggggacctgaagaagacagggccacacttttagttgaggaactgaccctcagctggaagcctgctcttctggaggaaaacatgcttctgtgggaagtattgtgcatgggggaagggactgccacgtcagctgtactcagaactgctaatatcagcattcaccttgggtgacgtcctcaagccatttcagtcaaaaaccaagcaaaaagggctgtggatctgcctgtaacaggctgcctgcctgacctgacagaagctcttcagatgggtcattgtaattgacttgagcaccttctctgccataggcactttgctgctggactgtcctcgaataaggtcagggctggccgtagtcattgtcaggtttcccattaccagtatgtgttgatgggataattgggtattagaagatctctggatgaatgacaagccctgccctcggggacttaagagttttagccaggttagatatggtcgcaatctgccacagtacaaggcgactgttagtggtgggaatggggtggcggtggtgggagggaattcttttcacagatgaggctgaggcctagagaaatggccccttggaaagggacagttaatgagaggcagagatggatgagaccctggtactggctgctcagcactgcacttctacacattatacttttctgtttctctcacaggtcaacagtgaccttgagactcctgtatgtagctaattataattgttatttggaattgatatcatttttctattttgagaaaatgttcacgtttctctttttttctgagacaggatctcgctctgtcccttaggctggagtgcagtggtgcaatcttagctcaccgcagccttgacctcctgggctcaagcagtcctcccaccttagcctccctggagctggcactacaggtgtgtaccaccactcctggtgaatttttgtatttttgtagagacagggtttcatcatgttacccgggctggtctcaaactcctgagctcaagcaatccgcct

SEQ ID NO: 114728 - DNA, 2475 bp, Homo sapiens
tacaccattgcactccagcctaggcaacagagcgagactctgtctcaaaaaaaaaaaaaaaaggtgggccccacgaagggttcagtgtcctttatttaacatgttaggaggccatagcaccaggcaaggtgctgagtatttcatctttctgtctccaagcacaggcccacttcagacccagtttctatttatcatgggtgcaagttgattcaaatgctctcacaaccttcttgggtctttgtttaaagaaataaaaaaatttcttagattttctttggagttgatatcatttttctcttttgagaaaaacatttcacattttttatgagcttttttaaattgggaaaaaaaaactatttaaaatatcggcatggaaactgtcatcaatatccatatacttaccatccaagattttcttggagtgtgttttttgaggaaaaactcatgtctgccgctaacttcatgatgtatacagccactcagcaatcttgataaattcctaggtaattaggttcttttttttttcttgagatagagtctcgctctgtccccaggccagagtgcaatggcatcatctcggctcactgcaacctctgcctctcaggtttaagcgattctcctgcttcagcctcctgagtagctgggactacaggcgtgtgccaccacgtccagctaatttttgtattttcagtagagacggggtttcactatgttggccaggatggtcttgatctcctgaactcgtgatcctcccgccttggcctcccaaagtgctgggattacaggcgtgagccaccacacccagccagtaattaggttctttctgtgctatacaacttttcacagtgttgggtgtgctatttgtttccttttgcaactgcttttcttctacagtctctaaaagcctaatgagacaggcacacgatgcactgatttcctccaggtgatacctatctcaagcctgtctcccggccaatctgttgatggctttgttactgtttgtgccttgtttggcaacaggctttctttctgtctcttgtttaaaccaacccctgattatttttaagtgcatagtccctacaacaaagggtatttgattctatgcctctttgaccaaataaattgaaagtaggtgtttatatccactgtggcaaaagaaacaaggagcagctcaccctgtcctggtgataagtgctacaggctcgggtggcaggccgctggctgtgggcgcttttgtgtgtggcttcccgaacagtagcactgtgcacctctgccccattcttgtctcactgggtgatgtttttcaggattccatttgtataatatcagtgtttagattgtcctgaagaattgcagtattttcttttttatagggtagagagagttgtgcaggatggaataatttcttaaggaacagaaatgtcctaatgttagagaagtacataagtatctaaacgttctgcttttccaaattgttgccaagacatggaaacctccatctcagtctgctgtcagcccaggcgaacgtaaaaatagccacttcacttgtctataattctctttatattttctctgttattgactttgtatctttagcaaagctatatggaagaggatttgttgactccgtgaatttaataaagttattccttaagcatatgctctacatgtgagaacaaagaaataaagatgctactccattccagtgaggcaggggtgcgtgaggacacacagccagaaggaatggaatgccttttgcaaattggtccattcgtatttcctagagggacctctatgtgccagcagtaattctgaggactcgttccgtctttgaaggcaactgaattttttctattaagtactaaaaagattggtcagttggccagacttttaaaaattactggtgttgtctcacgtgcagcccagtgtcacgtgttgggcttggaacttgaaccttagtttaatctagcctcctctatttataagctatgcccctttggctaaataaactttctctgctgcaatttcctagtctggaagctgagaataataacagtagaatttaattctgaagtgcttgtgggcattaaatgagatgacattcatttataataaaataatttaaaaaataaaattttgcaaagtaatctttaaggatagctattgtggctgttattatcattgctaatgtcatcatgctctttatcaccctgcctttaaggaactgctgatatattggccaacatgattattcctgccattataatctatagcaataaagagaggttgccccatatgttattgttaacacatctgccttgcatcttctgttcaatttgcaactgtttctctgtattagcattctccctatttacctttctattattatgtcattgtgtaatgtgaacgatgtaaagatgtagttcttttattagtccccagtcttatcttattccagattgcattaacaaggtc

SEQ ID NO: 114729 - DNA, 1595 bp, Homo sapiens
gatctcagctcactgcaacctccacctcctgggttcaagtgattctcctgcctcagcttcccaagtagctgggactacaggcatgtaccaccacacccagctaatttttgtatttttagtagagatggggtttcaccatgttggccaggatggtctccatctcttgaccttgtgatccacccacccctgcctcccaaagtgctgggattataggcgtgagcctcccgtgcccaggccactggatctttttaagaacaacttcactgagttagaacttactttctgtaaaattcactaattttagtatacaattcaacaacttttagtaaattaacagaattttactgtcatcaccaccatctagttttagaacatttccctcaccccagaaagatcctttatggcatttgcaattacttcctgttagcgttcccagccctggacaaccaccaatctactttttgtctttataaatttaccttttctggatgtgtcttagaaatagaatcctggccaggcgtggtggctcatgcctgtaatcccagcactttgggaggcacaggccggaggaacgtttgaggccagcagtgcaagaccagcctgggcaacacagagactctgtttctacaagaaatacaaaaattagttgggtgtggtgatgcacacctgtagtcccagctactcaggaggctgaggtgggaggatcacttgagcccaggagtttgaggctgcagagagctatgatggtgccactacactccagcctgggcaacagagaaagactctgtctcttaaaaaaaagaaaaaaaaaaaggaatggaatcatataatgtgtggtcttttctgtctgactttcacttaacaaaatgtgtttgagcttcatccatgcttcaccatggatcagcttgctattcctttttattgctgggtagtattccattatatggaattgccacagattatttacctagttgacaaacatttctgttttactttttccacaattacaaatgctacttctataaatattcggtctttgtgtggacatatgttttcatttctctcgtaggtgggaatagcattgctgagtcatgtggtaaatgtacatttaactttgtaagaaattgtcacactgcatttcacaatgactataccattttacattttcaccaataatgtttgaggattggatctctatgtttaaacttgatgggcccttttgggtttcaagataggtgaaacttaaggaatggactttggaggaagatgtgaaggggcttacccatacacggtcacttggggtcagttgctgggcactctgtgaggtggtttttctcttcagaggtgaacacggtggtgtgtttagacggtggtattgtaatgaacatcaaaagataagtaacacagaacaggacaagcattttagagatcatcttaaaaataacctcgatttaagggataattgcatggagtttcttagtcctagagtgatttttatattccagaggtagcttgttttgattaagccatgctttttaaattgaatggagttagggcaggaggtaaccttgggacttttctttggtaggcttatt

SEQ ID NO: 114730 - DNA, 1040 bp, Homo sapiens
ttttgacgtgaaaaaaacaacccaactttggtttatgaaccagcccaactctgacaagtgtgttcctgttccgcctacatcagttctaggttctctaacttcagtgtgcagaagattcaaccaaggaagttcctgggctctaccccttgagattcagttttaataggacaggggctaaaagattgcatttagtccccaggtccttctgatgtggattaactaggggctgactttgagaaacactgccctggaatgtgcacttgctattcaggtaccagcccagccttttctgtgactaaatgcttggcagttaacaatgtataattatggtgtgtgtcgtttccaaggcaacatgcatctgtcactcccgctgaggctgggaagattgaaaggggccatggagaggctgcagtcacaatgaggcctccagattcatgtcatcaaagtgcttcatgatgactggattttcacaccatttatccaagggccctagtcaatggcagcagcaagaatgaaagtagacacattggaagctagagagtcactgggtgacttttggaggtagcaacaagctcatgaagaaggcattcagtggcttgcactccccacccatcctctcaagtcagttttgtttagaataattaggatgtgggggaatgtgagaggacctggcaaggcttctgaaaacagtggttaactgtggtaaacgtgtgcctgctattcctcagttctcctctgggatggtgctgttaaaggtcacctgttctcacttgcagtgggcttgacgtgacatttatttagcacttactatgtgatggaaactttcacatagattatcttgcctttttgacctaagtgtattttcatttttttttagctacatgcgaagttttcacatcttgtacatttccaaatttaatgaaaaaggtagagtctgtacatgtttgctgggcacagtggctcatgcctgtaatcccagcttttagggagggagaggccagaggatagcttgagcccaggaattcgtgacctgcctgggc

SEQ ID NO: 114731 - DNA, 1061 bp, Homo sapiens
ttggtcaaaggatgcagcgtttcagttaagaggaatagatgaagagatctattgtacaacatggtaattatagttagtgtattgtatacttgaaaaattcctgagagtagatttagagtgttctcatcacagtgaaataataagtatgtgaggcaatgcatatgttaattagctcaatttagccattctacaatatatgcatatttcaaaagtcatgttttacaccataaaagtatatacaatttttatttgtcaattaaaataaatattaataagaaggaaaaaattaaggttttggttaatttgaaaatgtcagaagcttctaggaagtatatcgtaagtggaaatatgttatttaccactcctcagctgttaactgaccaccttcccaacgcaaccctgctctgtctccttcccatgacccaagttgtaatccaatcaggagagaataccttatttggaaacctacatatgtcctttttttctctgcttaggtgttgaaaagtctcctctagagctttggaaggctgaatgcactaaacatgaagagcttgaaagcgaagttcaggaagagtgacgtgagtatgcggtgactcacagtctggctgttccttcttctccatggagctgcagaaacgctcctccccaccttgataaggcgctgttgggttaataaactacagacactcaagtgctcttggccccagctcagggtagcttctgtagatggcatgctctaggttccttgctgtttgtgtgcatagctttcaaaaacaatgtttttttatttttatttttaattttggggatctgtgccttgtagagaaaggaaccgtcacattaaacatcttcaaaggaagaatcagtaaaaacctcaacatttctaaagttgccagaaatcctgattcagaatgtcgtttttagaagaagctagtctctctcatgcgggtggtttaggaatgacatattagcatggttcatctttggctttaggaaacgtgttcaactctctgttaagggttttgtggtaaaatggtatctactgctgcccgtacctttcc

SEQ ID NO: 114732 - DNA, 1038 bp, Homo sapiens
gagtagctttaaaagcgacttaaactcggacctaggtttgtggctctggacaagtctcttactcttctgaacctcagattcctcactagaaaagtggaggaaatgatattagccccgtaagactggggtgacagttaaatgcattaaatgaatgttggccgggtgtggtgactcacacctgtaatcccagctacttgggaggctgaggcagaaggatcacctgaggttgagagtttgagaccaccctggccaacatggagaaaccccgtctgtactaaaaatacaaaattagccgggtgtggtggtgcatgcctgtaatcccagctacttgggaggctgaggcaggagaatagcttgaacccagaaggcggaggttgtggtgagcaagagatcacgccattgcactccagcctgggcaacaagagtgaaactccatctcaaaacaaaacaaaacaaaaaaacaaacaaaaaaagaatgtcaaaaatcttatggcctggtgctcaggagatgcttagtaaatatttgtttcttcctcctaattagcaacccgtaataaaaagtaggattcaaaaagtttacacggtctggagggtagaatactctggtaacagttgctgctgccgaacagggaaactgagagctggggaagagaggcttgtttttcaatgtatgcctttgattttgaagtttttgatacacgtacatgtgtatcatgcatatatatgtattgttaaggaaaagcaagcttacaaacatttacattcagttgaatgaagcaaattataatttttttttaacctgaaatgtgtggtctgtctcaaaatattttaaaccattgggcatcatattcctgcttgtctttgtgtgagggaaaaggaagaagaaaggattctttgtatttctggggggtaggaagaagataatagcagatcaggttctcgcgcttgcataaagaagacaggtgacccactggtgtgatcgcatttcagccagcctgtgtctgggaggtctgtggccaaattggtttgtggccactg

SEQ ID NO: 114733 - DNA, 2966 bp, Homo sapiens
ccttcaggtcactctgtgacccgagaaccatcacttgggtaaagattgaatgggagtgtcgtttccggaagacttgacaactggcactgtgtcaaaggcagatgtgagtttggtagggaatgagcctgactctgcgggctgtggttagacagtgacattgtccggtggttttgattcttaaatctatttgggaccctgcagataacccacagagaataaacagcattatggaatttctatggtggataaccttttttacttcgcatttataactttattttgggagttcttaaacttgagttgttagatagtagataggatacaggagaaatgcaaatatggttgttgtctttaaaaggttgataaacctcggtgggaggagaaaaaaacatataggaaataactagagcaaaatacaagcagtatagaatatagatactcaaggtatctttaagatgatatagctaactagttgttaagttataaggcctggtgataaatgctgcagattttgagatggctgaatcactgggaatgggagaatttggggagctttatggaggtggagcttcatgcaggccttgagggataggtaggagttggaaggatggttgggaagagggggaaaggtcagaaggtcaatcaggggagacagcttgcagcacagcgggttaactcagtctcaaaaatggcccttgacatagaaaatagtaatattaatagttcaggagcccaggagagtacctgtggcatggccctgagtatttaaagaagaatactatataaagttttcatcctagttttaaaaatggatagattgacttttatgcttattaagcgagcgcagagttctcagtcatcattatttgtatcttttatgaccatagcttgaaaaagtggcttctttacctctttaaatatttgcagcagctagtatgtggttccacatggaaaaatgagctgtcgtcatgaaaaatgaggccaaaaaggctgggatttccctttgctaataaaatgctcaggcttctggaatttctttgtagatgccaatttttagtgacttgagtgaaatgggtggaggttgagggatgggaaatggggttgaaagatctttgtaacacatcttgagaaatgccactcaaacgtgatcgagggcttcacggtttactttgagggtgtgtgcttaattttacgaaagatttattcccaattatatatttcattgtaatagggaagtagcggacattccattaaaaaaatcaaaacagccagtttaaagtgacagtctccatgagagattaaattgatggtatacctttacatagcatctactaactactgtagctttcagccaaggaaatgcacacaccccatgaatcttaaagaaccaggcatatcctgctcagacagaggtttgagtttcttgcctattaagataacagttggcggtggggtgtggtggctcacacctgtaatcctagcactttgggaggccaaggtgggtggatcacctgatgtcaggagttcgagaccagcctggccaacatggcaaaaccccatctctactaaaaatacaaaaattagccaggcatggtggtgcatgctcgtaatcccagctactcgggaggctgaggcaggagaatcgcttgaacccagggggtggaggttgcagtgagctgagatcacaccacttcacttcagcctgggcgacagagcgaaactccgtctgttaaaaaaaaaataataataaaagataacagctctcatgaggatcaacaaccaactctaccaacgtatttttttcaaggagtttttagtcatttataataagtttttacaattgctcactcctcctttcgtcaccacacatacatgcacatacacacaatgggagtatttaaaatccaagtctctggcgtgaacctgggaagcggagcttgcagtgagccgagatcacgccactgcactccagcctgggcgatagagcgagactccatctcaaaaaatataaaataaaataaaatccaagtctctctgtagacataggaactatggccaaatctattttaagctaagccttttttttttttaatagacataattttaaaaaaatcagcaatgaccccactgggtggaggtaggagactttactaaagttctagagagaaatttggtcaaatttgtgccgtgctacgtgttttctaggtcttttcagcctgatttaaatggagaatctgctcactgcctgattttgcctggtattagtttgctaggactgccataacaaagggtaccacaaaccaggtggctgaaactaaagaaatgtattgtctcagagtttgggaggctagaagcccaagatccaggtactggcacggttggttccttgtgagggctgcgagggcgaatctgttccatgctctgacctagattctggtggttggctggcagtgtttttggcttgcagaagccttgccccgatctctgctttcatcttcaggtggcattctccctctgtgcatgtgtctgtgcccagattcctcctttacataaagacgccactcatactggattagggctcgctataatgacctcattttagcttgattacctctgtgaaaaccctatctccaaataaggtcaccttctgaggttagggggagaattaggactccaacgtatgaatttttgggaggacacaagtcaacccttaacacaactccatgcccttccatcctagaacagttacactgaagccctggcatccccccactgagctggcactgtcatagaccttagctccactgttcatccttgggactgttttcagcatctaagagagtgaggctggagcatcacagtttttcagtgggtgccactgcataatattaatagcaagagtgaacacgtatggatggctgaccttctattacaggaataaggagttctcatgtactgaatgctca

SEQ ID NO: 114734 - DNA, 1048 bp, Homo sapiens
gctgaggcaggagaattgcttgaacccgggaggcagaggttgtggtgacccaagatcgtgccattgcactccagcctgggcaacaagagtaaaactctgtctcaaaaaaaaaaaagaaaaaaaaaaaaagaaatggaaactgctcttgaatgttaacagctggtgacattaggtaaccagtcaggcttttccttttatgtcctgtaatatattggtgacctgatctgataaggtgtgggatgaacaagggtttgtttttaagtacaccattttaccgtcataatcttgaggttgcttacacagatagggactatcatgacctgatctcacagcttcattgaaaagtttgggaatggtgtcagcctgtaagtttatgttataagcttagctttaagttactctttaaagcagtgtattcagtcaatatgtaatttataaaattgtgcaatatgaggattcttcattatattgattagtttaatctgaacctacatgacatctgactctcaaattttaggcctagaattctgagcaaaactttagaacaaatctaaaagaatattaaaaatggtagaatgtccacttcctagacatgtaactttattaatataacctgtgatcttattcacatttttggttgccatattgtccttttggttcatattgggtttattgctgattcttttctcccagtgttgcttgtaaagcctcccttccccacccctcccctttctccctccctttcctcctcccctcctccccttccctccctttctcccccctcccctccccctcccctcccccctcccctctctgcctcccttcctccctcccctcctcccttcccctcctcccttcccctccctctctcccttcccctccatctcctcccctccctttagttttctcacctgtaaactgaggctgaggccagcacttccctttaaagcatcatcatgaggattaggataaaatctggcacaaagaaacttctcaataaatggcagctgctgatattggttacccctggtgcctagcacagtgcctg

SEQ ID NO: 114735 - DNA, 1786 bp, Homo sapiens
agaaatctggcgtggccttagcatttcattaggcaacttggtgggaagacacactagaaaacatgaaaggtgagatctctttgattaaacaagaatgtttgggtacaactatttaccactaaaatacacttagctactaggcatcattctaagcaacttaacaaactgtgatttatttatacctctcattagagaagtgctgtatgtattcccagtttacagatgagaaaactgcaacatggtatcttgctatgttggtttccaaaagtggctgtaacaaagtaccctaaagggagtggcttaaaccagaggtcagcagcctcagctccttctggggctgtgaggaagaatcagccgtgtctctccccagcttctggtggtttgctggcaatctttggtgtttcttggcttataggagcatcatcctgatctctgcctcatctttgtatagcgttttccctgtttgcatgtttgttaccaaatttcccctttaataaggacctcagttgtatgggagtaggggcccaccttattcttaactaattacagctgcagtccccctatttctaaacaaggttacattctgagacattgggggttagggcttcaacatatggattttgggggaaacacgattcagccataactcttgtccaaatcacaaagctaaagtagggtgcagaacttgcacctgggaactctgggtgcggagccagtgtcctgccactgctggtgcacacgggtgtttgctgtcaggagaacaaaatatgatgattccagccggccaagtaaaggcctggacttgaatttcaaattcctcattccaatttccagtggaaactgacagatagtaatcatgggtaatctttgaccaaaacatgcttcagtgacagggacgcctaggagccaggtactggattagctttctgaaagcttctggtgctagagataaggagggtggggagaggggcggagaatatggaaatcaaagcggtcagacttgttttgagctgggtggggcctggagaagaggcccaaagcgcaaattgggaactgagacttcaggtaggtatgttttaaaataacaaaaagtacattttttgttttaaaataacaaagggtatgatttagcctaggttggctgtgcttgtgaaggtttggtgcacagttttcccctgggtggtggtttctgatgctgggttcaggtctttgggagttgtaggtgcctggtgaataactggagggcggactgttttgtaagctctggtcagtgttcagtgagttaagtccagcagtcattggagtctattgctgtagactcttgcctttttaggtgcatttggaaaatccacctaagccctttccccatggtgaacaagtggctttaggtggcaagtggcagtcttggacacagtaggacatgtgggatacttgtccttgctctccctgcagttccagcccagttcctacactagtcattgtgttgaatgaatgagtgactaaatgtaaaatggaaatactgacagtttatcgtcaacaccctgtggcccctctctgttcagcatttaccactttatccatgtaatggacagaaataaaaggtcagtagggttttctggatgtgtttcctttaggatgctctgcatgccctcttggccatgtctgtgctgtgtgaaattaacaagtatcattggaggccttggcttgttacctacaatctacctgtgtgcttattttgtacccagactgtgaaattattttgtatctatagctcattagctcaagt

SEQ ID NO: 114736 - DNA, 1738 bp, Homo sapiens
taattttgtatttttagtagagatggggtttctccatgttggtcaggctggtctcgaactcctgacctcagatgatctgcccaccttggcctcccaaagtgctgggattacaggcatgcgccaccacgcccagcccactttctgtttttctttaggtttatgcaaacatcccctgtatttgctctctgtcctctgaagctgctgatttaacatcactgattttccgtatggagcatctcaatgaaatgcatttttaaatgctgtgattttggactttctgtgttttttttctgtgaaggttttcctggcataggaatgtaattgttctgccctagtgttattctctgtccatagaagggagttaccattcttggaactcagatttataaccactttcttattttcgtaatgcctcctaatatactttttaaaagggacttaaccttcatataattcagttttccttaaaatgtttaatcacccactttagcagccttggctttgtgtgactcatggaatatgtgtatcattttatttttaaaacttactcattaaactgaggacaatgaagatttcttaaaaggtaaatataaatagaatgtcacttaaggattattttctgcttttatatggtttttcccatattttgagggttcttgctcaaaatatctcaggctgactaatgaattttaggctgatacttagacattcatgttaacatttgaaaatgatactcgaacccggagtttgggacttaatggaagaaatgttttatttcggaactttattacattgatgttgggcctattgtgtgattatactgtatcacaggagattgcaggctttttattcctgatctgtatagtttattctttgttgctgcctcctattactgcaggaggggttttctctgcttgaaacaccaagttatctggaccattttaagggcacagaaataatacttgtgccctttttgtatatgcctcatgtgactccttgaccttgaactttgtatgatggatggcatttcatgaaaaatagcccttttctaccccagaaaagtttttcatcttccttaacaagaggcaataactgagtcaagaccatcaaaacttgcagctcttgccctaccccgcatcaaattgcagcatattgagagatgataaatatgtaaaacatgaagccagagaggcaaagacgtcagctcaacattttactgttactttcagatagcatcaaaacttggcacatgatgttgtggacagaaccgcaggctatatttactgatcttggttctgccaattacttgtgtgtgactcctgcaagtcagttagcctccctgggtttccacatgggtgaaataagatgctcttggctgggcacggtggctcacgcctgtaatcccagcactttgggataccaaggcaggcagatcacctgaggtcaggagttcgagactagcctggccaacatggtaaaaccacatctctactaaaaatacagaaattagcccgacgtggtgtcaggtgcctgtagtcccagctatttgggaggctgaggcaggagaatctcttgaacctgggaggcgggaggttgcagtgagccaagatcacgctactgcactccagcctggcgacagagcgagactccgtctcaaaaaaaatgctctcaaaagtctcattaagctttaaaattctgtatttcctgttcaggtctctttccaagtccctctgctcct

SEQ ID NO: 114737 - DNA, 1052 bp, Homo sapiens
aacgggtttgggaaatgtcatgtcaggtctctttattacaggacttctcagtgcctttaacgtattaatgtacattgtgagtatcaaagaaaaaggaaggttgtggggaaggggatatgccatgcggtattattttttaatattaaaaatatgggtgtcttgaagaatagaacaaccttggagaaaggcagctttaggaagaattatgtaaagatgtaagaatacatatttagtacctactagatgcaaggttccagagcatacataaaatgagacacattgtccttgaattctgaaaacaaacactttttatgggttggtggggcgcaaaacatttacatgtggaagaataatatttaggatagaatctaagtgccacttgtacccaacattgtacccaataggtaacttttcaaccttcattcagtccctgtcttctgagagcttatgatgtagggctggtgaggatggtggataaggatgaggccaaggataacatggagtgggattagagaacacaggcagtggtgaagaggttcaaagaagacaattgtcacacccaagagagggattacggaggggaaggagagactcactaaagggaggatctcacaagataggcagaatttcaagagagatgggattgaggtcattttgtgggctgaagctatcctcctacttcagcctcctgagtagccggtcttgaacttctggactcaacagtactttctaatactggagttattagaaaaaaaaacaaacccaaaacttaaaaaggaagacccttatccttcactgaggatctgtttcttttttaaaaaaattttaaacattgttttataaagataatgtctcactgtgttactcaagctggtcttgaactcttggtctcaattgaccttccttcctcttgactcccaaagtattgggattacaggcgtgagccgccgtacttggctgaggagctttttaatgggaaattcttagatggcttcattgtctatgggtgtaatttcctgagacagtcctactatcctggtctttattgctgt

SEQ ID NO: 114738 - DNA, 1004 bp, Homo sapiens
tggtgaaaccccgtttctactaaaaatacaaaaatgtataaataaattaaaaaaaatacaaaaattagccaggcatggtggtatgcacttataattgcagctactcaggaggctgaggcaggagaatcgcttgaaactgggaggcagaggttgcagtgagccaagattgcaccactgcactccagcctgggcgacagagtgagaccctgtctcaaaaaaaaaaaaaaaaaaacccacttcatcttattttatggatccactgtggagtgatggtgagggtatatattagagttctccagagaaacacaaccaataggatgtttatctatatacctatatatagatgtgtatataggatgtttatttatctatagagagaaaaaaaaaggagattgattgattctaaggaattggctcatgtgattgtgggctggcagaatcggaatctgtagggcagcctgacaggctggagacttcaaagaagagttggtatttcaagtcaaaatgcagtttggagacagaataccttttttgtgtgagatctaagtcttttggtcttcaactattcggatgaagcccacgtacattatggaaggtgctcctctttactcaaagtttaccgatttaagtgttaatcatatctaaaaagtacattcacagcaatatctagactggtgtttgaccaaataactgcaccgtagtttagccaccttgacacataacattaaccgtcgcatagtggagatgaggaagtggtagtctgggcctacgttatataagaatagtgaaatttcacctgatttaaggaaagctaaatgttaaatgttaacaatgtgtttttacatgtataacatcacttaattatttgaatcaaccttttgttttaatacatgagtgagttgaccatatatttagttttaatatactcatcacccataaatttctgttgatgatataagcattacgtgtgatataggctgtggactggtatttacatatgcttc

SEQ ID NO: 114739 - DNA, 1057 bp, Homo sapiens
tgggactttgcaccacaatcctactcagctaccgtgggaattcttgcttgaaagtaaatctaggactatagttgtggtaatatttgagctttacttttcttctgttactcttgtccatttgattgaggctaagaaaactggccctctgttaaattgaagttgcttttctaaggcaataggctctgggagaatggagaggtggggtctcctaggttaccaagcttgtgcactcccatgaaaaagcctgggtctctgtaaaatatgttggtaacagttaaagcagaagccattggagagagagagagggaaaaaaaaaaccaacttcattatgatttaaattaatctctactttttattcttagatagaactaattaaagttctaattattttgagtgctttaaaactaggtgacagggtttccctttctctaaaagggattggaatttttctttaggaacaaaattgatgggtagtctgcaaaaggattcaaattgtttagaaatatatgaccattatgaagcattattttctgtcagtgtctatgatttaggggtcgtagaagacctgaatgtaattagtgatgtggtgactttgtgaagctagaaaaaaaagaattgaattttcattctatctttgaaggaagaaagacattgtgagcttagaagcaatagaagaagtcacaaagtacacttaaattagaaagcttaagtttattgtgtagtggatagtcaagagggaagactctcccacccccttccctcttggtaggcaaataccagacagaaaatatttgtagccaaaatggctaccagtctttattgtaagcgcatcaactcaaagataaaacaagcagaggacatcagaagacaactcacagctactaactgaacatgaagaatacgtcaccgataaccaagtgctgcaattaaaataagatgctggccaggcatggtggctcatgcctgtaatcccagcactttgggaggctgaggtgggtggatcacttgaggtcaggagtttgagaccagcctgaccaacatggtgaaaccctgtttc

SEQ ID NO: 114740 - DNA, 1057 bp, Homo sapiens
ggtgtgagccaccacacccaaccatctcatttatccttgaagtcacactatactacacagacatgaaggttgaaagatgctagaggtggagctgcttataatgaaaacctggtggcaacctagatgtttaatatcgtttagctttaaagaatgttgatgcagctctttattgataggaagaaagttcagcatatgttacttggtgagaaaactgggctgttgagcaaaatatttgctatatgcatagaaaaaatatggactgatagaaaaaatgggcagggtaattcttgagtgataggactgatagtggtttcatttttatttttaaattttctgtatctttgaaacttgtttacggtgaatcttgtttatatatgcaaaagttttgtaaagaaattatactatcaaacttaatgaaaagctagaatatatacttacaccaggtctttagcattttaggtgtcctatgtccttaattactgaagatttttttacatttttcatcatctctgagtgttaaagtctctgtacgtaaaagcttttagtaagtttcacaatctggcttatatttcaacaactgaatgcactaaatattacttggcatttacaaatgcatgtggtaatttggaaaagtgcctttcttacaacataaatcttccaagtaactttgaaagttgttgtagtcatcatcttgaaaactagaaaatgtgaacactctaacttgtataaagaaattccaaatgttattcatcttatggtctattttgtaatttgttggaatcattgaagtgcttcagggaaattaattcggcagggtttatttaagtgcctagagcttgataaattagagtggagttttagcatgcagagaaatggtgccgtcataggactgcatctttttgtctgtacaattccagtatcagcctataagctctgcgagttaggaaacttggctgtggttttcctgtggtactcataggacctcacagagtgcagaatacgtgatacaagtgatcatgacaaaatagtgaacttttactcagcagttaatatgtgc

SEQ ID NO: 114741 - DNA, 1108 bp, Homo sapiens
gataccatcttaccacagtttcctatgcagatacaagttttcccttaattgtatattctgcagtttattttgatgggacatcgatacattgctcaagatatggatgaattttcccctaagttcaaacctccttagtagcttaaaaatcagttattctctggataagtatggtggcagctgaagcttctgggcttgtatacagcctgcggtatatctcatctgtgctgtagacagtctgtaaatctgggtttggccatgaaagtatattgtgaatatgaacatcagctaattctagagaaaaagaagcgctattcaaaataacggagtggaatttcccatgggtctttgaataataaccataccagctaacacttactgaatgtttaccctgtgccagacatggttttcaatattttataaatatttgattcatttaattctcacaacaaccctctgatagaggctactcttattatctcgtgtcttgcagttgaggcacacaggggcaactaacttgcccgagataataagtggtagagcgaggctgtgcacccaggtggtctggcttctgggttcttgcttttaagcactatattatactgcatttcaaaaggcgggactgagattagagatctgtggtcttctaatgctagtataaagagtttggatttgctagaatagacagaagggagccagtttattctcagtagtagagaggtgtcaagatgaaactgtcaagataataacattcaaatagttgcaatggagacataaaaaggatattttgggggcagttggggcaaaaggaaaagttgtgaaagctggctacttcctcagtgttttagtagcaatattatctgttaagcccagtgttctgcttgagtcttttcctcaggcaagcattcattcactcagtaaacatttattcatcactagccttgtgtcagcccttgtgccagatgcctgggatacagacgtaaaagccatggtccctggccaggtgtggtggctcatgcctgtaatcccagcactttgggaggccgaggcgggcggatcacctgaggtcaggagttcaagaccagcctgaccaacatggtgaaagcccatc

SEQ ID NO: 114742 - DNA, 1384 bp, Homo sapiens
aaaattcagggcctggtaaacagaccagaaagagaggcaataaaagcagatgaaaaattatgtgtctgtaaacctcgggtaaccttgagctgctggtttggttctgtaacacggtggacagagtgagctgtggatgaggtcaaaggccaacgtgctgaggagcagctgtctagttcagcgagaaattagctaatgtgtaaactggccttgaggtctttttacgttgcttcatattcctagtgttagttaaaagaagtaaattttatctcagagtttggtgactagccgtgatttcattgcactatttatgttttcttttgggaaagcggccttcttgggtgtctccatggtgaaggggaaggtattttaaaacacactcattcgggagcaggctttaatttgagtgacaggagggtgggggctgcgaggactgcagccctgctggtcagtgcggctgtggccagtgttgttcatgacctctgtttcttctctttctctacagaccaatgagtggaacaagaatgatgaccggctactgcaggccgtggagaatggagatgcggagaaggtggcctcactgctcggcaagaagggggccagtgccaccaaacacgacagtgagggcaagaccgcgtaagctgaaacactggtttgcagatatgctggttctgggtttttggggtgttctctggaatccttagtatccataggggaatttcacacgtgctccctctccactcccatgttgaaatatgtaagaagatattttaatctagtgcctttctctccaaattccaagtcacatatggagctctaccttgaatgggtatacatgttcccaagtataagcaaaggttttacctcctaagattgcaaccaattgtagatgagacatgaattctctcttcgataagaaatagcataaaagagaaaaaagtattttcctataaccctcaaaccttactgtgtatttatcttaaactacttgtttatttatttgatcttccttaacatagatcattaagtacatgagtagtatgattttgctttatggtttgctgtatgtagtactcttccttgccataattaaagctgtatatttgattaagtatttgtgtgtgtttgtgcatgagcatgtatttgtttatatccattcttacgttggcagtgttgtggagagagcactgactttggagccagatagacatctcacaggaactctatcacttacgagttgtgtaatctctgaacctcagtttccttactataaaatggagatggtattagttaactgttagagtagttatgagtataaaatgaaataataatgtaggttgggtgccctcagaagcaggctctgagacaaggatttaagtgcaagtag

SEQ ID NO: 114743 - DNA, 1001 bp, Homo sapiens
aacctttaccacctagagagccaggcagtctagaaagtcccaacaatgtggcaacaaaggcagccatctccacagacgttctccagaagcctccataacccaaggtcaataaccagatgggtggttgggtaatgccttagacttttgagtttctttctggagtattttctttcagggaaagatgagaatgcatgccaggaaattttcttcctctaagactgatcaaagaggggttaaaaaaaaagtaaaagcaattgaatgactggaattcatttaggaaaagaataaaggaagggtggtgtcttgggtaggaagggaacaaaatagagcagagccaagagttatagctgcagcctgtgtttatggagtcaggcctggcgtgcctctgcccagctgttctctttccatggtggatgtgaggaagtgggaggaggtcaatgtcctcaaacctcttaccgtagaagagtctaattgtttcaagatgggttccctacatttggatgtgcatttaattaaagttatgtgtgtttgtcttacgaacaaccagactaaataaaatcactgccggcactgtagtatttgaacaaataccacctgggcatgtgtgtgtagatataaggagtgtgtgcatgtgtgtgtgtgtgtgtgtgtgtgtgtgtgtgtgtgtgtgtgtgtgtatgtgtctgtatcattttatgttgcccacttttcagaaacctgatctttttggctatgaaagcaagaatttgtgagagtatttttagatgactctgtggagcttgactataaagtgggagaggcaggccttgaactttagaaatcactataataagggcttctctggctggtggtttgttgcacattctcccttcctgttttctcagtatagggatgtattagatattttacaccagcagttcagtcttggaaatcgagttataccacctgatcagctctctccagttcttctcacgtacagctgccaaattaatttacctaaa

SEQ ID NO: 114744 - DNA, 1002 bp, Homo sapiens
gcttttgattcagtagatttggagtggtgcctgagagtctgcatttctaacatgctcctgttccccaggccactctttaagttagccaagacttaggctgtcaaagtgttatttcagctacatcagaatctggatagtaccctggccgggcatggtggctcacgcctgtaatcccaacactttgggaggctgagatgggaggattgctagagtccaggagttggagaatctggttagtacctgctatcccaggtagtgaccagcatccctgtcactgggcttgagttaggaagtagataaaatgtttttatactcttcgcatctccacagctccactgcattcttgacctatctaaatgaagatgtaggcgggtttggtggctcacacctgtaaccccagtttgggagaatcgcttgaggccaggaatttgagaccaggctgggcaacacagtgagaccccgtttctgtgatttttttttttttaaagaaaggaaaaaaaaaaactatcttaatggtataaatatattggcatatagacttttgaatgacatttcgtgtctttgaaaggaaagcccacacttcttaatccgtaactcattttatgaggccagcatcatcctgataccaaagcctggcagagacacaacaaaaaaagagaattttagaccaatatccctgatgaacatcgatgcaaaaatcctcagtaaaatactggcaaaccgaatacagcaacacatcaaaaagcttatccaccaagatcaagtgggcttcatccctgggatgcaaggctggttcaacatacacaaatcaataaatgtaatccatcatataaacagaaccaaggacaaaaaccacatgattatctcaatagatgcagaaaaggcctttgaaaaaatcaacagcccttcatgctaaaaactctcaataaattaggtattgatgggatgtatctcaaaataataagagctatttatgacaaacccacagccaatatcatactg

SEQ ID NO: 114745 - DNA, 3018 bp, Homo sapiens
gccaggagttcaaggccagactggccaatatggttaaaacccatctctactaaaaatacaaaaaaatttagccaggcatggtggcatgcacctgtaatcccagctactcaggaggctgagacatgagaatcactggaatcctggaggcggaggttgcagtgagccgagattgtgccactgcactccagcctgggcaacagagcgagactctgtctcaaaaaaaaaaaaaaaattagagtctacagataaaatttagagtccaaaagaagaaaagagaatcacctccaatagcaagactctgacatggttttgttgtatagccatacttctgagttttcatctttcatgtggttagtcaactagagactgtatgcttcttatcctcattttttatattattttctaagattatatgtacagaccaagcaatagtccctaatttttgtttttatgaatcattgtgtgaggtgatgagtgagttactcaggagctcatttcatcaactgagataggctctgtagatggaagccttgaacttcatctggaccagctgcccacgattctcaccccttgctgtacttcagggcatccagttcacctgggaacttgaaggaagggaaaagagaagaataaacagtacacacacacacaaacacacacacacatacacacacacacaaatatatatacctacactttaccctctgagattcagattccattgtctggaagttgccagtcaactggtatttttttaaagctcgctgggtgattctaatgtgaagccagtgttgacaaaagatgaacaaggcaaatggagagaaaaggtagcgtagtcttaccttgtataaaacactgtcctataagaaggagcccctggggtctccagcctgggattctgcccctgctggccaccccaaaagaccaaagcaaccactgatggcttttcatttttcgattgtactcgagaatttttggcttctaataggtttctattagtgtttactgggatacaaaattagcctaactccattgcctttatctaggcttttcgtgaatccgtaatggatccctttcttttctcccatccccaaaattggcctcttcagactagtcatcttgagggatcagccaggtattgcaggaatgctattattactcaaaatatggttgggaacaggtttagaattgttttcattgtgtgaggacttaaaaaaaagaatctcagtggttgggaatctttatcctttgagaatagggtttttttttagggcaaacctaagagccctaaaaaaatttgatgtcaagtcaggtgaatgatgtttcaaactggtaaaaccatttttggtcaaaaatagggagtgattgaaataacagaatgatttttctgagcagttccacagaaagttccaaaaatattttgagaaatggcaacaccaatatagggggataaatggtttccttaagtgactgccttgagggaaatactaatttatgtttttccaattaaagtcatctttaaactcaagacccaattattgtgtttgtttttaaagttcattgtcattgctcttaaagttatgccataaaaccacatggtgcagtatgatttgctaaaatacccctaatgagatgtatgtcctcttaagtaggagaagtttccctctaagaaacccataatctgaaagcattagctcagagtgaataaactggtgccgtcacacggttttgtttcattgtacttgatattaagaaatagattagacaggactgtagttattttcagcataaccaaaatcttccctcacgtctttttattgtagggaaaaataagttggttttttgtgtgtgtttttttgtttgtttgtttttgagacggagtcttgctctgttgcccaggctggagtgcactggcacgatctctgctcactgcaacctccgcatcccaggttcaagtgactctcctgcctcagcctcctgagtaactcagattacaggcacccaccaccaccacgcccggctaatttttgtatttttagtagaggcggggtttcaccatcttggccaggctggtcttgaactcctgacctcaggtgatccacccgccttggcatcccaaagtgctggaattacaggcgtgagccaccaagcccggccagaataagtttttttttttttttaatacatgcttattgtagaaaagttgagaaatatagtaaactataaagaagaagataactcaagttcctactcctatcagaaagaaaaaaaatatttctattttgttgtatttccttccagattgtcccaatacatttttacatgcctgagatcacattatataataaattctatatcctgcattttaatttattaaatatcccgccagtttcatttcccccattaaaggctcttaagaagcatagttcttggtggcctcataacaccctgtgggtagagctcatatttaccaccagagccctaacccagttcctgagaggctggtgcagtgctgagcaggaagacctggatgccccaaggcagtgcccacttcctgcagactgagatggtaccactctctaagaagcaacactggagggagtgctgtggacacagcctggatatttcccaggattcgccagtgggaaccaattgaaattggtggaatccacagcactttggggccacaggacattgtccaaacattccatgggttgaagatgtctcagagctcccgtcacttccttctcacctgatatttttagccatgattccagcacttccctccttgggcttcatcgttttattttggcctgaaggaggtaccagcttcttcccatgatttcttgaaagcatgcaaagagaacacgggaacaaaagaagaacactgcatggaaaaaagtgcatctagaaaaacacttctcatttttttctgtcccaataaacaggttaaattgtaatggctttgattgcccatgcctgtgtcttacctgttggctataatacccacctattcac

SEQ ID NO: 114746 - DNA, 1042 bp, Homo sapiens
aattttgcatttggagagagaatttggtgttaatagtagcaatgagagacatcttacttcagtgttatagtgttcagggaatgatgcgtcattcggattttgagactatttttagtgaaaaatacttttctgctgctcgttagaaaaacatcacagggctggggaataaaagaatttttgcttctatagaaacccggcacttccaggtatgactagaacacttactcaaagtaaaaagaaaacctgttattttatagtaagttgtttacatctcccaaccatcttgtctttggagaaccaggtctttttccagtgggtgttgcttatgcagaacagcttttgttcacagcagggacaagttaatgcattgcgtacacgacataaacggtctccatcttacaatcaggatgtgttccaaaccttcatttgtaaggcatttgtttaaaactcagaatgtgcttgtccacagaaacagtggtataagtgatggttggagggccaagctactccaccaaagcctatttaatgcatcatgtaactaaactcatacacagttatgcttcatacactctggaaggagggatctcatataatataacaggaggaggaggaagagaaaatctttgtcttcttacttccaagaatctctcttccttcatttttaaattttgttcatcctcctccttttgggaggggacagagggattcctgtctctcagtatcctatgctgatgaaacaactctcccccacacctaccctaaaaatctctccgtacagctgaattcaaaatagaaggaatcggatcatttgactttacacatttttatgccattcaccatagccctatggcccactagtttttaaatacagtgtttcctagctatatgattctctaattagtgaatttctggtcagtgttacagactgaagactgatttagaaagaaaaatggggccgggcgcagtggctcatgcctgtaatccacactttgggaggccaaggtgggtggatcacctgagatcaggagttcgagaccagcct

SEQ ID NO: 114747 - DNA, 2123 bp, Homo sapiens
agccttttgagattcttcaaataagctctctcaggctgggtgcagtggctcacgcctgtaatcctagcactttgggaggctgaggcgggtggatcacctgaggccaggagttcgtgaccagcctggccaacatggtgaaaccccatctcttctaaaaaatacaaaaattagccgggcgtggtggtgcatgcctgtaatcccagctactcgagaggctgaggcaggagaatcacttgaacctgggaggtggaggttgcagagagccaagatttcgccactacacttcagcctgggtgacagggcgagactccatctcaaaaacaaacaaacaaaaacaacaaaaaacaaatgagctctctcccttcccgaaccctcagctattcctcccgccctttctcatactgtgtttcttgggcactgtgcaccgtgtcaagcagtgacaaacagcagcccctatcccagtggagctcccagtctggtaaacaatccacaaataaacattacagattgcacagcagtaaaaaggaagctaacgggttactgtaagagaggaatcagaggtggaggttcatggaaggcctcgtgaaggaggtgatatttaagctgagacctcccaaggatgcaaagagccacaaggaaagcattctaagcaaatggtacaatgtgtgcaaaggacctgaggtcacaaaggtgctggccagggagggaagaatgccaatgtgtgggcctggggcagagcaagtaaggaggaaagcagcacaggatgtagggccttttgtatgtcatgatgggcttgactgcagttcatcctaagtacagcatggaagtgtgaggggcttttaagtagacagtgagagtcacagttttaaaagagaattctgtttctttagagaattgataaaaaggggaaaaatgcagaactggggagacgtgccaggaggctaccttagctgttcaggtgagaagacgctgtcctagaaaagggtgtcgggaacaagaaagggaagagggtagagtggaggcgagttttggagaaaaaagttgacagggcatggtggtccactacatgtggggtgaggaagaggggtcggggaagggggtggaggatgaggaggaatcaaagctgaatcgctggtttctggctcaatgtctagactgatgatgatgctgttgatggagaaggcagtcagggaggagcaggtggggcacgggggaggggaagccagagattttggctgggcctttgagatgctaataagacatcagagcagagatgtgaagtaggcagtgggttatcaagcctagcgcttgaagatgacaacttttgtgtatgagtaagaatacaggccctagcccagcctgtctgagtttgaatcttggctctgccatttactgcgacttgagcaaattatcaacttttttgtgcctccgtttcttcatctgaaagtggaagtaatgatagtatccacctcgtgttgttaggggacataaagcagttctttgaacagtgcctggcacgtgagagctaatacttacatagcacttattgttgtcactgttaggacctccgcatttgggagtcactagcgttcattcttctagatgatatttcaggttgtgggtgtggaggagcttaccagggaaaagagcttagaggaagaacactgaggagccctgaggttttctgtttggctagaggaggagccgcaagaggaaaagcagaataagatgagccaagcagggctctaggagctgagaggttggagagaggaggacagaaatgtttatcgtcattggaaacatgaaggtttttggtgaccttgaccaaggccatctccttggactcgagaggggacacccaactgcagtggttttgggagtgaatggaggtgagggtgcgtggactgcatgtgggtaatccttaagagaaagctggtttcgtgaagggggacagaaagggcaggagatgggggaaaagaaaggattaagatgagagagcctagagtatgtctattagctggtggggtgctggagtgatgagggaaggagaggaacagataggtgaagcagcaaagaggggagagtttgcccatcccaaagacatgagtctccttccccatagg

SEQ ID NO: 114748 - DNA, 1948 bp, Homo sapiens
tgtggtgttacacaaagtagaaattgagtttgccctgttattgtgtagttttttctaaaaatatattgtcactatctgtttttttgatgaacagtatatgtttggttgtttatttatttacacatctacgttcttgaagaaatcataaacagcaaatactcaatactaaatttatgtgctaactgtattacttaccagtaaccttcaaaaatgaagttatccctttccctcatatttatagtctttaaaaaaaggaatggaagtaatgcagacgtgtgggaaataccattgcttttcattaatacagaaagctggctgtgattgtattctggattctaagttgtagtagacctcaacctctactttcccagttctccacaccaacctaatctggttttgtctcatgtgtttttattttcttgctattaaagcatgggctgctaggagaatacttgtgcatgcatattatttatttttatgttggtagcagatttcagattttgataaagtaagaaatgtatgaacttttgaggtttttctcatgtgtttgataaagctacttgcccagactttactaaccaaactaacccacctccattctttggactgtgataactttcagcatgaccaagtctctaaaataagctcagaaagaagtggaactccaaaaaaacgcaaagctccaccacctcctatcagtcctacccaggtaaaaacaaaagcaaaccaacaatcaataaacgcaccacaagaaagccataaatttgtcattttgtttaggccaaaaaggaatgttttagaactgacctttaagtgcatatttaaaattttccttagcagttttaaattacaaattgtggtaagaaggattgatgattagtatggaaataatgttgattcttatctatttttaaaaaaacagtagaatcgaatagcctctttttgaaaagtctcaaggaaatttctcaaaatcttatcacagaaactttcccttaagataagttcaatttatttttagttccttatgttaaaagatctagtaaggactgggagaatgagtagccattgaggcaattagttgaaaatgaatttcagttcgtttcttaaaacattgctgcaatacatttgcctttttaattgcttttaaggttggctaatattaaaagtagttttcatttctgagctttatagtgacggttgcatagaggaggaagctcagtaatctatgtaatggcaggtaaaaacacatcgaaatttgttatttaaaaattcataggccataaagagaataatccatatttaaatagtagagaggaatagctcatctcataagtattttttaaatgtatgttagcatacttattaatattcttaacctgcaatagaagttttatagatttttaaaaaagtgattctaatataggagcacagttatattctgtaaactttcagaaagtatttgaagtagctgaattgcactgaaaatattctacccgtgaattaattgatgccaaggatacttactgttagatttcattgcattggttaaacaggttgattcttcggcactggagaagaggagtttgaagatacattctttattaatgattttcattttgtttcttttttagttgagtgatgtctcttccccaagatcaataacttcgactccactatcgggaaaggaatcggtattttttgctgaaccacccttcaaggtatttcctttctgtattcagttttgttactgtattttaagatacatgatagacttgctttaagttatataacactgggaaaaacagaatatacttctgaatcattggttcacaaccttttcaccatgaagtaccccttgattattttttctggcatggaccccataaagcaagaatgtgtacagctagtttgtatccataataatttaaaatttttaaaaaatcattga

SEQ ID NO: 114749 - DNA, 1041 bp, Homo sapiens
tttaaaaagagacaaagataagaacttactagataagcagtcttcttacccaattaagtttatattaattccaatcaaagagacagaaacttgtgttattctctgttgtcttactgagaattgtatagttaatttttttcctgactataaaagtaatatgtatttattttacaaatgttagaaaatccattaggttttatccacctggttctgtagatttgtggttgcaaaacattttaaggaagtgggaggatatttccatttaatatctgtttaatatactgagaaattgtactcaagggggaaataaaatttataattgttaacatgaaatttcgatattttatatttacttactttcccttatttagaattattaaagatgtttttttttaacttggatacacattaatctgaaacagattctatcaacctatcatttccctcactttagactttactaataaactcttcagatgaatttctatgtaagacaaggcaactatactcttatagttagtacgataatatcttctgatatgactgtgcctcaaagaagcagtgcaatccgaagaatatcacaaattatgatttttcagaggtagagtataagactgtcatttctgaaaaaacaacaacaaaaaaaaacaagataaaaagtgacatttattcctacgttagcttagggaggagacaaaagtgatatctaggccaggctcggtggctcacagctcatgcctgtaatcccagcacttcgggaggccaaagcgggtggatcatgaggtcaggagatcgagaccgtcctggctaacacagtgaaaccccgtctctactaaaaatacaaaaaattagtcaggtgtggtggcgggcacctgtagtcccagctactgggaaggctgaggcaggagaatcgcttgaacctgggaggcagaggttgcagtgaaccaacattgtgccactgcactccagtctgggcgacagacactccatctcaaaaaaaaaaaaaaaaagaaaaagtgatatctatttaaaatggctaaa

SEQ ID NO: 114750 - DNA, 1113 bp, Homo sapiens
ctgatggggggaaggaagaatgggtattatggacttttgtacatttttgaagtaatccatatatgatggtctcaattttcatgatgaattaggaggacaggttcttagaacaagagtttcagagataagacccttgaaacagccactgagaggaactggagtaatagctcaacaaggagaaatagaagcatcagcggctgtattgaggaaccactggagattggggccaccaccctctttgccttcttagtacactgatagctaaataattgagctccccaaggattatacaatgctggccatatagtgggtaatcaataattcccttaaaaataataggctttaaaaattaaattagtacatatttggtcattgtagaaaagttgaaaaataaagaaaactctaacaagttcctataaataaaaattttccataattcaataactctgagataatcactttttacatttgatatatttccttgcagtatttacatttaatgtagctgtatttgcataagtatatgtacatatatacacacacatatatacatatatacacacatatatagacacacatacacacacacacacatacacacacacatatatatatatattttgagacagagttttgctctgtcacccacgctggagtgcagtggcgtgatctcggctcactacaacctctgcctcctaggttcaagcgattctcttgcctcagcctcctgagtagctgggattacaggtactgactactacgcctggctaatttttgtatttttagtagagacggggtttcaccatgttgtccaggctggtctcaaactcctgacctcaagtgatccacccacctcagccgcccaaagagcatatatttttaaaaccaaatgtggggtgataataactcctttttatacagttttttctagagttgacataccaagacttttttccctaagatgattgacaagtattcagaaatacacaagccagtaaggccacaacaattttagaagcttccagtgctagcataaagtggaggggaccacttgggtagcatttggctgcagctttctcatagttttttgtttttgttctttaaagatctctt

SEQ ID NO: 114751 - DNA, 1026 bp, Homo sapiens
aagctaaaaaccctgatatggtaatattatggtgcatagcagaggtctcggaaaaaaaatatttctgttcactttactttcaggttaaaaatgtttctaacacgcttgcaacttcccttatggcattaatcttgttgagggagagagacagaatcctggactctccaaagtatttaactgaaagtagggcctgctctgacagggcccatgtcccacaaggctgcttggcctcagtgggtgcttggctgtgctggatgatatgttgatctgtattggataaggaccaatgacagcaaagcaaaaatggctttaaagcttggtgttacttttcttaagttgtttaattatagttaagcaatttcaaaaatgctccaaagaaatgtgaaaggaccttttgtcacagcacttcagaaaatacacaacagccccttctgcccccgcacagaaatgctgcagagtatataaaacttgagacatttttgtaggatgcctgacgaggtgtagccttttatcttgtttccggatgcatatttattacgagtactctggttaaatattgaaaagttatatgctgtagtttttagtattttgtctttgtaatttacagaagttattggagaaaataaacttgtttcattttgcatttctggtgttgatttttggtgtattcagaagcatatctgcgtggcttctgaagatcagttcaatagcatttcagtgtaataggttttctagtctgtgctatgctcagctggtatgagttgtccgcactgtctcacacaaagtctcacatcatttccttttcccagctcttggattcgccctgagctctgccctgagtatcagccgctttggggcagttgaatcacagttgcctttaattcacaattgcctctcatttaatctgcagtctgtttaactgtttggaagcctccgctggattttttttccctcttgcttcttgctttttttgaaaaagtaatacatacatatgtaaaaaaaaaatccagatacattttcctgccc

SEQ ID NO: 114752 - DNA, 1033 bp, Homo sapiens
aatcattttctataggttatctacttttggaaatgcaggaagttcccaccttgactatcccaaagattctgatttgatggaagcatttcattgtaatcagacccaagtcaacaggtcagttcttaatatagaggttgtcattggtgataaagaggaggttaaataccagatttctgttaaataaaaacactttcaatctgttaattaaaatgcacagcattttataaaaatgaatagtagagtgctggacttactaggggatgtagggttctaacagtgaatgaattttaaaacagaaaatattagcaaattggataagtacttgattttattcttagatttgctactttttatcctttacttgggagttctgagcagtgttcactgtgttgatataacagcgttttattttttcttctacagatacaagatttccttactgaaaccctctacaaaggcattagtcctatcttgtaaggtatctattcggacagataacagaggcttcctttcattacagtatatgattagaaatgaagatggacaaatatgttttgtggaatattactgctgccctgatgaagaagttcctgaatctgagtcttgagtatgacaattcactgatatttatgtgtacatttatgatagatgaagttcttattctgagtacagtactctttgtcatttcatattggattttctatagagaagaagcacaatggggaagataggagcaaggtcatgtaccctaatagttactatgttttgtaaatccattttgtagagggcatgtaaataaatgttttcctgtagtcatagattattcaggactgtcctttagttctgtcttttgaactcatgggaataattgtgagtcagcgtaacatttcaagagtctaaaggtggccgggtgtggtggctttaatcccagcactttgggaagccgaggtgggcggatcacctgaggtcaggagttcgagaccagcctgaccaacgtggagaaaccccatctctactaaaaatacaaaaaatt

SEQ ID NO: 114753 - DNA, 1899 bp, Homo sapiens
actgacgttacagtacagatgacagcaatccactgttacacacattgaaccttcaaggaatagcataccctgttctgcagcaatttagttacttgctgtgttgatccatatagattctctaccctgaaattgtacatatataaaatcaacaagctatttctgaggtgtgtatgacaacctgaaaatgattccaaagaattatgttacattttgttctggttcccaattttcttgtagttttggaattctctacacacaactgtcatcagggaagatgtcatccctttttatgaggagatacatatatgtgagaaattgggcggaataaattattcttgagaaattttatgtatcatttcgaggagaagctgaacccagaactataaagctaaggccaagtatgacttctttccattgcagggactttaactgcacttcgaatgtgttaccaaggttatggttaccctttgatgctgttcctggaagaaggaggagtggtgacagtctgcaaaatcaatacacaggaacctgaggagaccctggactttgatttctgcagcaccaatgttattaataaaattattctgcagtcagaggggctccgtgaagcattttctgaattggatatgacgagtgaagtcctacaaattaccatgtctcctgacaagccttatttcaggtacttgagagcagtgcagttatagttaatgtggtctgtactccatcttcccacttagacatttgcttaggatgcaaaatttttattatccacatttttagagttttcacaactttagacagcttgtactcttacctcataattttatggatcaagaaacttaagacccaggaagattaactcactatttcatatttaggtggtggtggcatctagatgagaagcccagtcctctaatttataaactggtggtgttttcattgtactactccttactttcatagatcaggttacatcatgaggaaaattgggtttaagtgtttggaaagggtgtttgtattatggtatctttttcaagttagttcaggatgcagaagaagatgttttctacacgtggctcattcattcactaagtatctgttgatcacctaccgtgtgcttattcatcttattaagcattgtgggaagaacagcttaaaaccaaggtgaagccaagaaaatgtgaaacagcaaaccattaagtaccaagatagcacacacagatacctgggaaatgctgtataaggatttagggaggattgctcaaggctggcttcccaagggagggcagttttcagcaggagtacaatgtcaaaaaagctgttcttgatagtttaacacaagtctcttttcaggattagactcagagattctagcaatttagagagaggatctaaatattctctttttgaaatatttcagaatattaaagcccctaaatacatatggaataaaaggaataaggtattctttttgtaactactttagaagaattacaggcccggctgtaaaagtgctgtggcagacacctgtaatcccagcactttgggaggccgaagtgggcagatcacttgaggtcaggagttcaagaccagcctggccaatgtggtgaaaccctgtctctactaaaaatagaaaaattagttgggcgtggtggcacgtgcctataatcccagctacttgggaggctgaggtgggagaatcacttgaacccaggaagtggaggttgcggtgagctgagattgcgccactgcactccagcctgggtgacagagtgagaatctgtctcaaaaaaaaaaaaagaaaagaaaaagaatcacaggcccttgtcatgactttggggagttaaaaatttggctcaaggtctgagaaagttaaccaaaatggaaattggaaacctt

SEQ ID NO: 114754 - DNA, 1035 bp, Homo sapiens
gcccgcgccaccagccccgcctccaacaaaacaggcgatggcggggcgggcccggagtgtccagataatcctccaagagtcccagacaaccccattcaccagcccgcccgcgggacagcatcgcttactagtctcggggtccccgagtgcggaaaccctacctttgcggtggggtctggacgcccgagagcccttctcagcaaagtccctgaagaggagcgaggcggctccgaggaaccgcggaggaagtgaagccagtcccgccactcttcagaccggccctccacctcggccaccgtcaccacagagctgaaggaggcctagagagccgcgcgtgccgcgccaccgagaccggaaggaggcggcacagacctggaggacgaccgcggagctgagcgcttagagccgccgaaccatagagatcggaaataggagcgagcggcagcgccggaaaggaggccaagagcgcgggcggcgaggcaagatggcggcaaccaagaggaaacggcgtggaggctttgcagttcaggcgaagaagccaaaaagaaacgaaatagatgcggagccgccagctaagcggcacgccacagcagaggaggtggaggaagaagagagggaccggatcccaggccccgtttgcaaggtaggaggggatgtccccgggctacacctgcggcggcggctctgtgcgccttttcttgggttacttacttgactacagccttgcttaatttcagagtagcccgggtgttaacggtaggtcggttttagcaattctcccggccagactgggcacggagtttgcagctaatccttgtgcacgtggccgtcttcctggaggcggcgggttttaaaacctttacccggcccacggggaagcgacttacagggtgctcagatccagcgttctttcttactagttgttcagttgttttttttttttaatgtttttggagagtagtgcttttccttggttatttctcgctattatttctccagtgattagtatgcccatatactgccatagtcagccac

SEQ ID NO: 114755 - DNA, 1056 bp, Homo sapiens
tgagattgcaaagatgactagaatgtgacctcttcctcctgaaatgttggagtttaggaggaaacttaagaattcaaataagttgatggtttttattcaaaagaagtgcacacaagttgttagaattagctttcattcaactaagaactcttcttaagctagacagaatactgtgaacaaggattatctttgacattaatttttgcgtcctccgcacttagcatagtactctagcgcggagtaggtgataagtaaatgaccccgtgtggtgtgatggcaagctctaagaaagaagtgagctctgtggaatgaaagataagtgtaaattctagccccgttattaacagcaacattctgtgctcttttctgacctgcagattggggggcagggggagggaatatttactttttatgaaaaataagctggacttgtacacttccagtaaatgttagtgttctcactcttcccttgagctaggtagtatctataatctgagccatacttcgatacattctatggaagtgcaggagatatagattatttttaccctagtataataagataaagaatcatgaaggatttagcccgtaagctgcatatcagaggaagtgtagaattttgacattcaaaaaatgagagggaacactccaagggagaaaaaaaaaccgatgaaagactttgaagtagggaaatgctgaaaaatgtaaaaaatagagccagattggattgcattaggcttcatttggggcaataatgatgtagacgtgaaaatctattttaaaattcagtgtcaaagctatgtcatttgaactttgtttagaaaactctgggaagtaaggatgtgatggaagtattactttaaaaatggtccagcgtggtggctcacgcctgtaatcccagcactttgggaggccgaggcgggtggatcactaggtcaggagttcaagaccagcctggccaagatggtgaaaccccgtctctactaacactacaaaaaaaaaaaaatcagccaggtgcagtggcgggcacctgtaatcccagctactcgggagtct

SEQ ID NO: 114756 - DNA, 1080 bp, Homo sapiens
tggaacagtggagtggcagcgccatcatatggctgttgttgtgcttatgttgagaggtgctttggggtttttttgttttttgttttttatttttaaaattttaacttattttagattcaaggagtatatgtgcaggtttgttacacgggcataaagtcagttttctttgacacctaagattaaaaagtgaaagatattttcattgaaactggtttcctttaacacagtctttggtttgtgagaattttcccatttttgaaaaggattcctagaatacctaaatattgagaaacactgcttacactataatttctaattcttacagactatattttacttattttctttacatttacaaagagtcaagatttttgagcgattgtttccagctcttgttttgaaaattagtaataaaatctcctttaaactgaagagtgtaaaaacactttattttctggatagcatatgtggtttgattgaaataactttgaaatcacctttaatttacttgctttttcttttttttctttttctagatactaaaatggatcgtaaggataagctatttgtgattaacgaggtaattttggaaagtaattgcaacaaaatatttttaaaatgttaacagtggcttatttcaaaactaagtcattcagtgactttaaaaattattttgtaaaaactattcagacacattttattaactcttcaataactggtcttccaaatttttatctctcacagtttagtgcttcattcatttctgtttgttttgtctgaacaagcatattgaaatttcctcaggagaaggattatgtcccattttttaaccctgtagtgtctagtattatgctaaatccatagtaggtactcaaaaaattatcagtcaacatatataaagtaaaataagtccattaaacatatatatatataaaacccacatggtaaaaagtgttttgccagtattaaaagtgatttgtgtggaactggctattaaggtattacaaactgaataggttacattttcaaagtattgtttaagatactacacttaggtattttttttaacctctggaagca

SEQ ID NO: 114757 - DNA, 1006 bp, Homo sapiens
ccaacatggagaaaccccatctctactaaaaatacaaaattagcggggtgtgatggcacaggcctgtaatatcccggctactccggaggctgaagcaggagaatcatttgaacctgggaggtggaggttgcggcgagccgagatcgtgccattgcactccagcctgggcaacaagagcgaaactgcatcgcaaaaaaaaaaaaaaaaaaaaggagggaggtttccagtaatcagaagtgagaccattttagatgctaggcccaaaaatatgatagataatttcacccaagatatgggcagagcatctagtttaccttgggtagaatacctaagaggaactttaaaggttccttctgtgaataaatacatgtttaggcctttgtagcctattagcctggttaggtatttttgagataatctggatgatattaatcacatataattactttagttctcatttatattatctacttcattttcctatactttgcttcctttaggtttgtgaaatgaagaactgtaataaatgcatctattttgaagctaagaaaaaacaggatctctatatgtggtaagagaatgtattaagattttggttaaactcatttaagtggatttgttctttgtaccttttatgttatagactcctagtgtttcatgttaagggttgagaatgaagcaaacttttgatttcacgaaacttgatacctttaaagaaaattaaatgtataaatattataagcatattatttatggtgaataggtggtaagcattgactacatttgctaattagttgaaaaagcttactccatatctttcaggctttcaaattcacctcacggaccatctgctaaattccttgttcaaaatagtaagttgactcaataaatttttttagatgaggaaattaaaagtaatcttttgaaatagttgtgcaaaagttacaactatttttgtttttgttgtaatttttctagttcataccctcgctgaactgaagatgac

SEQ ID NO: 114758 - DNA, 1003 bp, Homo sapiens
aaggatatacagggtttgcatacacaaaaaatgcaaataattcttttgttttaaatagcttccttttccctaaagagattgctgcaagtaactatgtactgtcttatatcttaagtgagctctacctacttctattcatgactgttagttgatacagagtatggatttcctaataagccattatatatttaactttatagaaagggaataacttgaagatccatgagatacttgggttcctaatttgtagaaagtgctgtaaaggatacagtaaaatagaagtttctctctcaaagcttagaagtttctctctcaaagcacctcaaaggttaagacctagcaaaatgtaattgctctagaaggcattcaatggcagcggttagatgatgagtcacacagtgactcattcaggagaaaagaggaggtgactctagaaatcttgaagcaggagtttggcacgataagtgcagaaagatgaagaggtggaagagaacagcaagaacaaaattttagacagtatatgacataaactgagctcttttctgcatattttatattggatacctggcatgtgagttgaacacatcatcctaacctctgagggtagacatgcctgaactaatagataacataaatatttgttgttcggaagttgccttttaattccataatcagtagctattaaataaatttgactacatatccttttaatctaacttgaattagatttataaaaacaatttagggattgatttaagtttcaagagttcccccataatgtgctttaatacattttgttaatagtggttactgttttaaaatcctgtttaaccagtttttcaaggatatatgcattgtgacaagcaagatgtgaaccaaaatctaattactcaattttaaaagaactcactgaaaaaacatttttccatgacaacttcctataagtactaatagatttcagaaaatattgatgatttgccatttaccaagtttcacccccacc

SEQ ID NO: 114759 - DNA, 1080 bp, Homo sapiens
aagatgctgctcttgtagaaataggacctcgttttgtcttaaatctcataaagattttccagggaagttttggaggaccaactttatatgaaaatcctcactaccagtcaccaaacatggtaagcggttgtgtcattcagtagtcttcaatgtaccagaaccctttggccaaaatgattctgtgaagtaattgctgttttattacctgtgaaactgaatttggtttttgctgcatagaaacttggaaattactcccttttttcatgacactggctgaaaggatatatggttcataactgaaagtctttgccttatataaaatgtttatttttatttcaaaagcatctaatcttttttttttttttttagcatcggcgtgtcataagatccatcacagctgcaaaatacagagagaaacagcaagtgaaagatgtgcaaaaactgagaaagaaagagccgaagactcttcttccacatgatcccactgcagatgtttttgtaacaccagctgaggagaaaccaatagaaatacagtgggtaaaaccagagccaaaagttgatttgaaagcaagaaagaaacggatttacaaaaggcaaagaaaaatgaaacagaggatggacagtgggaaaacaaaataagtcaatggaaacctgatttgtttttcagttactttatatttattttgtattcaatgtgtaaatacttttattatctaatactatcttacgtctaattagtgtagcatttacaagaaagaaaaattaagatcttaaaatcagtgattatctttttctaaataaaatatcaccagaattcatcagttaatttctgatttctttttgaagtttgtgttgctaaaaatgtagcacacttaatgtagcctgttctcttgggttggaatttttggtttagcaaagctgaaattcagacatttattaggtcatattatttgtaaaagcattcaacacttcaagagcatcggttgtggatggtaaagtaggagtagactggtagaaaggaaggcatctcactgaagtttactcagtcatcagttaatgaagccatggaagaaccaaccc

SEQ ID NO: 114760 - DNA, 1052 bp, Homo sapiens
ggcagcatattggggaagagaaggataaccttactaaaccgcttgggtacgccaaccctgtgcaatagatattagcaacatagctaaccatacatggttagtaaatacaacccacacctaactgatgcatgtaaacattccacattacagtgaaatatattggtgtattaatgcattttaataattatggtattattttgatacctttcaaagtgtttggaataattgtgcagatagtcagatcaaccaaaacctaccagttaaatactatcctttaactgctttcttaacctaaaccaatcttggaaaggtaggattagaggccagaaagttaggattaaagtgtgttggatggatagatcagcacaatttcatccatgttggtggtaaggcttttcattaagtgtgttgatgcttcccttttaaattgtttccgcttaaataatctaactgtcctttctcaagcatattggtcaagatgatcaataccagatatcttaagtggcagctgaagagaattaaagagattaaaaaaaaaacctgatattcagtccaaccgaattctgctactgtattagctgaggaggcttgagccaaccacttgaccacttggagtctgaatcgccttatctataaaaacggggatccattgagaaattataatcagatattttccagaatcctctcccatcccagctcctatctcccccttcagccctcaggtcggctgccactcacactgaccgccatctgtgcccctcacaatgacaccagcgtggccctgcctcccttccgcgcggccccgcctctcgccccgccgaggccccgcctctcacaccaaggtcccgccttcctcctgttcttcccggccaaggcctaccttcctcccacgcggcccgcctctttccccgccaagctcccgcctttctcctgcgcggcccgcctctctcctcgccaaggccccgccttccttcctcggggcctcgcctctcaccccgccgaggccccaccccctcccgcgcggccctttccggcacagagcccacccctag

SEQ ID NO: 114761 - DNA, 1093 bp, Homo sapiens
gcctttacagagttattatgagaagcaattgtgtgtgtgtgaagctcctagattaagttgacataaatttaggaagattcttattccagtgcatcttggtaaatttccaaatcacagatgtgtaatgattctgtgggccagatttcctatgtcctgttttatgtttctttcctgtggaagtacgggactcagagacagtcatggaaattccttggctttttaaattcccctgttcatgtgggctagcattgtataatgtatcagaagttgcaggcctagttataattaacagttctgtgaaagattatgaactcttttcatgttaatatttcattaaaaatttttggttatggattggacatatcaacaaccaaaaatgtacaataataatattcaaaaggagcaagaaatccttttgaattcttacttattcagccttcacaatgatgctaatttttgtttttcaggtatgataatcatagagaggccctacttaaaggtgggtttgatggcgaatatcaagatgacagcttagatttgctacgctatttcaccgttacctgttattctggttatggagatgatgaaaaggtaagataaatgaactcacccttgatttctcatcaagtacttcattaagactcacatacaaagagaattcttaaaactattctgtaatagaaagtgaagcagtgttcattttgaaaactgaagatgcattgccttcatgtttaagctgtcagtgtataaaaacctctagttgaaatctaaatgtattgcagggactgaactttgtcccaaaattcttcaacattaaaatttttcattttgtattttaaaatctttttctgtgatcaggctgcaaaagtattaagaatttgtttttgttactgttttttagggattttacacggtgtatcgtaatgtttttgaaatgattgccaaggaagaactagaatctgtgttagaggaagaggttgatgatttcccaacttttggagactcccagagtgactatgatacggtaaaataaaaatgcattgttctataattagtatttatcactgtgtcatttttaaattttattttactt

SEQ ID NO: 114762 - DNA, 1028 bp, Homo sapiens
caggcgtgagccaccatgcctacttttcccttttaatttactaattgtttactgattatttactaatcaccatggtcccatctagtgattagtaaggctatttttattttctcattaagtttattttgaagagtgattttttctggaaagccttaaaagtactgtcttctccagagattattagaagtgttatatacatgaaaaaagaaaggtaaaagatgtttcgcatcagtaatatttactgcttttctaaaaaaaaatcttaaagcgcagaagttaatctgttttctttgtcactaggtagtccatcctttctacgcttattggcagagtttctgcactcaaaagaattttgcatggaaggaagaatatgatacacgacaggcttcaaaccgctgggaaaaacgagccatggaaaaagaaaacaaaaagattcgggacaaagcaaggaaagagaagaatgagcttgtccgtcagctggtagctttcattcgtaaaagagataaaagagtgcaggcgcatcgaaaacttgtggaagaacagaatgcagagaaggcgaggaaagccgaagagatgaggcggcagcagaagctaaagcaggccaagtgcgtagcgtgcgtggggccctcttctcagtatcggtgggggtcagaggcagcaccagaggtaccttacatgttcatgttgggttcagtcatcagcctggctttatcctgctttttcttcttttttaaattgtggcattggatagtgttttttcatctactgtgtaaaaattattattatttttgggacagtgtcattctgtcacccaggctggagtgcaatggtgcgatctcggctcactgcaacctccgcctccaggttcaagtgattctcctgtctcagcctcccaagtagctgggattgcaggtgtaatatgccaccatgcccagctaatttttgtatttttagtagtgacgaggtttcaccctgttggccagtctggtctcgtactcttggcctcaagcgatctgcccgcctcagcc

SEQ ID NO: 114763 - DNA, 1034 bp, Homo sapiens
gtttcaccttgttagccaggatggtctcgatctcctgacctcgtgatccacccgcctcgacctcccaaagtgctgggattacaggcgtgagccaccgcgcccggccaagtgtgactattaaagaaaattcaactaagtgataggtcaagttttaatagtaactatttctagaaaagctgatattgcatgagaatctatgtgttgtgtataaattcttcctctcccttgtgactttatagaagggctcctcttggtgtgccaaaatgttgttttttttttgccgctatcattagagcacaggtatttgactaccttaaaaggcaaggattaggcatttttgagaatagctgtatatctgattttccccactgtctctataaaattgacccagttttaccttatctacaaatgtgatttttcagattcgtagcccaaataataaaatgataaacttttatttattcaaaatgactaggaagtgaagcgttttattaatgaatcagaagtaatacttttgaaagtactttgaaaattataaatcactctataaatgtgaggtggcctaatttccatcgagttttacaatttataaagtcctttcacgtacaagctctcactggatcgtcacacaatcccccttacatggaggttttgctcatggaatcgtctctgttttgccgttgtggaaactaggactctgagaagctatgagatgtgcctgagaatgtatgaccatttttagatccagagtttttgcttcaaatccagtattgttaactattcgattaattaaaatttcacatacatgatatattgaaagtctacaataccataatggaaaattaacaccatatattaaacattaacactagatagggtatattttgatcatttatgatttcaatgagacagtccttcaaaatcatactgacatcacttataaataaccaacatgtagaatatggaagataccttgagatatttattggtcctataataaatcccaaatgacagtttacatgtttgtttcttca

SEQ ID NO: 114764 - DNA, 1082 bp, Homo sapiens
tccttttaacattaaaatgtgtgtcttctaatttcccagtgatccctccaagtctgtgggatggcctggaatgtaaaaacacttagcaaatacttagtgattaaaagaaaacaatggcggaagctttaagaattgaaaaatcaaaataataagtagagaatttgtccaaacctccccctgccgacattcccccatccccagaaaggaagaaaatgtatgtagataaaaggacagagaaagacagggaaagctgtggtacggaaagaaagagtgtggccacgagcttccagtatgctcactgccaaggaatcctgacacgttctgtttctctgtataaaatcatgaacaaataaaaaaaaagaaaaaaataaatagaatcagaaacgttttgcttagtgggaaaaaagctaattttatcttggttgcagttatccagcaacattatctggacacgtgaactaattttagcgcagctgctcacgtcagattgctctttcagcatgaagaatcacgagaagtcaaagaagcatcgggaaatggtggccttgctaaaacaacagctggaggaggaagaagaaaatttttcaagacctcaaattgatgaaaatccattagatgacaattctgaggaagaaatggaagatgcaccaaaacaaaagtacttctaaatattaaatgtcactagaaatacttatcacattcagagattgcattaaaaggttttttttgagatggagaatcactctgttgcccaggctggggtgcagtggcgcagtctcagctcactgcaacctccaacttgtgggttcaagtgattctcctccctcagcctcccaagtagctgggactacaggcacacaccaccacgcccagctaatttttgtgtttttagttgagacagagtttcaccatgttggctaggctggtcttgaactcctgatctcaggtaattcacctgcctcagcctcccagagtgctggggttacaggtgtgagccactgcgcccggccttaaaggctgttttatcccaaggaagttattctaactagaaaagattgtctccatattttctagttaatgga

SEQ ID NO: 114765 - DNA, 1041 bp, Homo sapiens
ttgccaggcgtctttcttttataatgcctgtttgttgttgccattgtttgtgactgtagaagaatagttgctcattgcttatcatttggaatatggaaaagtatcatccttaattttacctgtagagattacttaataaagaattaaattgtgattacactatgtataattttctttcttctacttttgctaatatgttgtaagtattttttcacataattgagtatctttggaaacatgatacttaagcacttcagaatttttcttcatatattcagccattcactttttgaacatttggattcttttcagatttcccttaatttactatcactgtaatgagcatccatgttcttaacttacctgcttctcctttttatttcccgaaggtatataactatttggcaacataacataaaaagctagtagtagtattatatttattttgtaacggcacatatgttttattacctagaattatgatgacaatttcaatgtaaatggacctggagaaggagtaaaggttgatccagaagatactaacttaaatcaagacagtgccaaagaattggaagatagtccccaggaaaatgtcagtgtcacagagatcattaaaccatgtgatgatccaaaaagtgaagctaaaaggtaagtcaaagttgcatattatttgtaaattactgaatattgatagtaaggatgtagcttttcatatatcaaataaaatcttctttcccatgactgaccaggtaatttagatgtatctgtacatatttatgtatagatacacacacacatatgtatacagatgaagagcgttgagaagaggatgctagaggaatgtgcccacacacatctcagcagcatggccaaaatcagaaagatgtcactttgatccagttcttgtttaccttatcctgctgtggcgctgattttgtcgtggatcattaacacttgacactcacatgagaacaagactcctgctgcgtccctggagtgtcactaagcaaatctccatgctcacgacagcagcctgtgttg

SEQ ID NO: 114766 - DNA, 1883 bp, Homo sapiens
gtaaagattatttaaattgcctttaaaattaatgaattaacttttaaagtgcagttcacttttttgagtgttctagagagcactcaaataatgatggttaaaaggagtatgttatttttggattatgctgaattatttattttccagtgttcctaaacccaaaggaaagaaaaccaaagatatgaaaaaacctgtcagagtacctgctgaaccacaaacaatggtaggtcaaaatcatattcatatctctttagcatatcttgctgtttaagcagtataatgatctaaagatggaaatgtgtatttggtgagccattccgcaaagagcctgcaaagatgtggatccatcaacagttttgtttgatataatgtatctttttttttcattaaaataaaaagaagcacattggaaatgctagactgtaccagaacagttactgttgttttctattacttttcaatctaaagccttggtgataagaattacatgtgtcaagttctggagattaattgtgaagcataaactcttcctcttttttagtccatgaggtacatgctattgaaagtctcaggacccttaaagttaatcgtgttgattagtgggatttaacctccaagaacatctgcctttgttgaacgtgtttattacctgtccactctgttaaaacatctttattttacaattgtttgatgcttaatcttgatattaaaacctaaaacactactttcaagtgataacgcttacttttatttatgattttttgcccttctcagagtgttcttatcagctgtacaacctgccatagtgaatttccatctcggaataaactttttgaccatctaaaggccacaggtcatgcaagagcaccttcatcatcgtctttaaacagcgcaacaagtagtcaaagcaagaaagagaaacgtaaaaacagatagagattctgcctgtgcttttgtttgactgtctctagattttgaaaccaaaaaactgaactgaaatcatctaaagagttaaaatttcagtgatctgcaattaattacattgtggaagattattttttatcttgtaaaaacacttttttggtttaatatatatttttaaaacatttcactagtgattgaattctacttttgccatctgaattgacttgaatgtcttaaaacaggtaaatactgtaaagtgtgtattcttgatgtttattggctcatgtggacagaaatgtacagggagaattacattattttaacacacagaagtgcaactttctgctttattttctgaatttcacattacttttacttaatgcttttgtgttttgttaatacttcataatatgtgaaaaactcggatcttttaaaaagcatcatagatcatttttccatatgacactggttccgattttaaaaattatttttaaataaccgattattgattactgtattttttttctcaagaacagtgataggtagaaactaattgaacatttggtagtctttcaagaatagtgtctcttcaaggttttacttgatttaatttgatattttactggtttaccagtaaggtgtattgttcagttttttgctccgatttgaattgtggaggtggaagcaaattagtttacatggcatgtcctccctaggcacagtgacagctgtaaagtatgacggaacaaggtagcagatggtacagaatttatactatttaagaagagatgtggtgttcttcattgagtttttttcttcactattttcagaagtttttgttcttttttttttttccatcactcagtggagaaaagctttgttaatgaaagattttgtgatagagctgatgcttatacatctattctataacagtgatgaatattaacacaaaggaaata

SEQ ID NO: 114767 - DNA, 1035 bp, Homo sapiens
atgtgtcatgttggtgtgatgcacccattaactcatcatttacattagttatatctcctactgctttccctcccccctccccccaccccacgacaggccccagtgtgtgatgttccccttcctatgtcccagtgttctcattgttcaattcccacctatgagtgagaacatgcagtgtttggttttttgtccttgcgatagtttgctgagaatgatggtttccagcttcatccatgtccctacaaaggacatgaactcatccttttttatggctgcatagtattccgtggtgtatatgtgccacattttcttaatccagtctatcattgatggacatttgggttggttccaagtctttgctattgtgaatagagctgcaataaacatacctgtgcatgtgtctttatagcagcatgatttataatcctttgggtatatacccggtaatgggatggctgggtggcaatttttaatttttgaacataagcccccacatcttcattttgctttgaactttgtaaatttcatagctagtcttgcttgtaggcgaaaccactcagtttctctataaggaggtgtaacaaattctgccctcatagttcaaaataccttagctagcacacaataaaatttggggcaataaatttgagttttgttttttttccagtttgttggctttttttaaaatttcaataggtttttggggaacaggtagtgtttggttacataaataagttctttagtggtgatttctgagattttggtgtacccatcgcctcagcagtgtacaatttacccggtgagtagtcttctatccctcacccccctcccaccctttcccccaatcaccccaaagtccattatatctttttttttttttttttttgagacggagtctcactctgtcacccaggctgaagtgcagtggcacgaccttggctcattgcagcctccgactcctggattcaagtgtttcttgagcctcggcctcctgagtagctgggattataggcgcacaccaccacacccagctaa

SEQ ID NO: 114768 - DNA, 1037 bp, Homo sapiens
tgacgaaagtctcatgtgttcttgagtgaacaaatttccttttcttcctttttggctcaagcacaataatgctgtcactgagacagtgactgagcactcaatgtccaagactaaatcacatcaccacgactaagtaggcactatgtcctgggatgagtcttttaaactctggccatcaggttccttacttgttaaataagtaggttggcctaaaaggtttctaagacctctcatgatctaggtaaaatccagggtttcaggtcagtgtccctggtgcagtgcaagaaagccttgctgacacacccttggcctgaagcagtgagcacatgagattgtgtgacaacgcttcagagaaaaacagagatctgttcctccaactcagattgatttaacatccttgcttctccttttccttcctggctttacatatttgtagggtttttactccttctccagagcctactattttcctaagagttagtagcaaccataggatccacaagaaatgaaattattcatcaacaatgactttggcactgcaaaagactgagtcaaaggttaaatcagtcacacagatatccaaggccaagttgaagatcacaagtatatcccatttagagatttgcatacttagagattaagcccatgttcattaattatttagttaattcaaaagccattaataaatccatgcccagcctacgcaacatagtaagacccagtctctacaaaaattttaaaaattagccagccatggtgacacgtacctgtagtcctagacacttgggaaggtgaagccagaggattgcttgagcccaggaggtcgaggctgcagtgaaccgtgattgtgtcactgcactccagcctgggtgagagagcaagaccttgtctcaataaataaacccaagttacttcgatgactagatactggaggtctgaaggagaagctttaaaaatacagattgattgcttcagagaaatcctatttataattatgatctgaacttattctatgattagcaaatatatcatctgaa

SEQ ID NO: 114769 - DNA, 1023 bp, Homo sapiens
ttagaatctaaaatttttttaaacagaaaatttggtgtcactgcaccctatggagaaaaatgagtggctcctaagaaacgtgccccagacatctgtgtcagaggctctggatccaacagaccccttattatcaaatgccttggggctggctgtcttatgctcagatggcccttgtcacatggtagcctctgattgtaaagacttccaggctcttgattgatcatgccaacagcagcaatgttgagaaagtggtgtgtgtgtgtgtgtgtgtgtgtgtgtgagagagagagagagaggttgtcaatggcatgagggtgctagtggccaaccacagcttcctgccagtcacctcctcctctgtccattgagtcagcatggaggatattcagcactggcttcctcaaggaataatcctgaagattctggattttgaagacttagaaaaagcattattttgtctgctactctggttagattatttgcctttgcttggaatgggcaagacaaaactggacattaaattatgaattgctgttcatatatatcgaagcccattttaaaaagtagctgtaggttgggcatggtggttcacacctataatcccagcactttgggagtacgaggcaggcagatcattgacgccaggagtttgagaccagcctggccaacatggcaaaaccccatctctactaaaaatacaaaaacttcgccaggtgtaatgacatgtgcctgtagtcccagctacttggggcagggggcgggtgaaatgggagaatcacctgagcctggggaggttgaagttgcagtgagctgtgattgcgccgttgcactccagcctgggagacacagtaagaccctgtcaaaaaaaaaaaagatccatacctctaacagttgtcccttcatgcctccgagactcaggctagtcagtccccagagtctgaaagttcttatacaaaacccagaattccagttcatctataactatgtcagaatttgttaagaaatttcattaaagtctccagg

SEQ ID NO: 114770 - DNA, 1109 bp, Homo sapiens
tgttttcaactattcaaaaatgtcaaaatcatttttagcttggtggtggactggatttggtccagagcagtagtttgcctgcctctgttatagagtaacacatctgagcccatgagagaattgatcctgtaccttgggtaatgctcttcctctctggctcctttctacacctcagtcacttttcccctgcaagagtgttgtcacattagactgtaaaattggatcacttttatatttcatctctaacatgccttatttaataaaagtcattctaggtatgactaaagttccagggctaacttagaaaaggactgaagagaagaattccttctgacaaatgcggacccagccacaaatgccagtgatattgtcccaagtattggtggcttgggttgcacttgataacagagggcaaaagaaagtataaattttgcttgttaacatagctttagtggaaaatacagaaaatgcccccaaactccatgctaagatcatgaactaaactgttacaatgaaaggaattacttgggtttctataaaaacagctgcctcaaggaatttgccacattccttgggtctgcctgagctctggtggcccactgcttggataggcctggtttgtttgctaacttaacatgcttgcttaacggccaaacattcccttgaaattcaaggactttctgtcccgctgacactgtttatttgtatcagtagagtggagggctctctggtgacactctagttttttctgggttataagcagatgcaggtctgtagtttttctgacttggatggggccaatgggtctaagccaagaggaaaatgcttttttctttttcgtgtttatttcctttttttttttttttttcctatcttgattggagtacccttagaaggaaaaggagagccataatcgttctctggaggccaaaagaaggccgaaggatgccaaaaattgtcacagtggtgacttttggctggagccagtgcagaatgaggggctatgagtgtgtcactagaactgtaatccagatctcttccatgaggtcaggaaccctgattcgtattgctttttccatgctgtagaacatgacaccccactcaatcac

SEQ ID NO: 114771 - DNA, 1017 bp, Homo sapiens
tttcttgcttctgttcctagcagattaaggtaatctctaaggttttaccatatagaagggtattaactgccatgtcggggatggaagatggactttttctaaaatcaacaaagtctttaaaactaccttagccactggtacctgaagccacaaagccttacacatggatttccacttcactacttgaggttccctgtactccatttataagacgggaatcttaagaagacaactgtaaaaactgaaataaagcagtatcatctgtgaccaactgcaggctccatgtctgaccagcaaaggaggtgctctctaaggaaggggtctcaggcagtgagcaaaggtcttggcaggggttctccttccctaaatgcaggagagcagaccaggtttcctgagctttgaggagagcttataggaagggcaagatatctgcataaaatggaagaatttgaaatggaagatatgtcaaatatttcctgagtttttttatgaaaagtgatagaaggagaaatggggactggaaactgggaagtcatctaaacaaggaggatgaagttgtcagagtcctgtgtctaggaaaagggagaaaggaggaggcagggctggcaggtgaaaatttgtatctgagctggggtttcaagtcacaaggggcaagtcaagaagcctcagtggtgcgtgaagatttctaaacagaggcagagaatagaaagaagcaagttgcaggatcagtggcaggtggagctgaagagagaacagaggggtggcgtgtgctggggtggggagaaccttcaaaggaccagggatgccctcccctcacccaaggctacacctagcctcatgtcttcttcaccttcctggccccacgcagccacctggccaccacacccagcagcttcccacaaagccacatagtgcccagagtgagccccagcagaaacacaaagacatcaatgaggtactgctcatgccaaggctgctggaaggcatagggcttgaggtgcgtcgctcccccagtct

SEQ ID NO: 114772 - DNA, 3041 bp, Homo sapiens
taaatcaaaagattcaagggttttccctttataaagaatagatcagaaaatttgacaatccagacattcaaaaaaacattctgccagttgatttttttggactactatttgattagatgatcagttctgaaatttaagctgcatgtatgcccaaattaaattagcataggaaagtcaatgtgtgtggttttttaaaagtatattttagcatattaatggagcaatttaatttacattcagttacaaacctcattcttattaataggtttagggaatgttcttgctggtgtgctgattaccatattagagaaaaaataaactctccatattataattcacctgtttagtaaggtgagtttcttacttgtgatttgagtggattatgcctaaaaattacaagtatatttgcactaagcgacaaaatatgtccctgaaaaatcttagcgtacttgaatcatcaaatgtaatggattgtattgaattctaaatgttaagaagtaagtggatttagggttttgtctttcttttcttatgtcctctctcattcctttatacctttcttcctttctgaggcctatgtttatagcatgacttttaatgtgctgaaagattttccttctgttttgtgtacagagttgtttttgatgagtggtacgctcagaaggaactagttctgactacaaatcccactacttgaaatagcaatattgtacctaaagtagtcaaacagattttgctagacaactaagcaacatctgaatacaaatgtaaagtatgctggctcagtgtatcttttaggtcactaaagaggacacatcagtaaataaattgttttcagtgtaatatttttacataaaaatagatttcccccccaaaatttaagatttatttagattcttgagacatctttttatgaaaaggaattaataacatacatcatcaaaacttttcttaggagcgttgaaacaatataagaaggttacagaaggccttctaaaatatgaattcccatctgtatgaggtacttctttccaactcagtgactttttgcccagagacttggaagactgggcaatgttttctttcccctttcccaactcctggagacaaggccctaggagcaatttcctccagtagggcaggccgtagtcctgctctgtcttacttcccactgcagcaggaacatgtcctcgcctctgattccttctgtaccaagccattggtccattgaggtcaattgaggactcactgtaaattttaaatctgttaataaagcaaggatattggcatgttcctcttctcatcaatatcctaaaagacatttattttttacacactccttgggaaaaattaactttttttcactgaaaatatttccttttttggttatcttgatctcagattattttgtgaaagaattttactgtacttagttcaaaagagtagaaagaatgatttactattgcagacatatgtagggtaaaatcataatttatttaaactgactgtacaacaccatttagagttgatattgacataaatgttattagcctactaatttggaactgcatttctcaacaatgctggcaagcatcttccgtacttagcataccaagttgtaggggagagactgtgtatatattttttaaaagcaatccaatggatttgtttttgttcatattttgaaaacaactcgaaggatttttcttattttagaaggtagaaaatatgtggacctgtgttttaaattaatatgtatttataaattataacattgaatgatacaacagagctctaatattgatgttctcactttctgatatttaatttttataaatgtttttgtaagtaactaattgtagtattgcttttaaatagttttaaaatctatctcaaataagttctgcccagacctatttccttaggacagtattctaaagttcagtagtccagtgtgagcttgaaatactcctagatcccgtcagtgatttttatatataccaatacacaagcaaattattaatataccaaaaacctaatttctgcattgcattaataaaatacttgttattttgcctttatccaattcagttgattaggtgaaatagaaaattaatcttttcaaatgtgcatatgatcataatttttcaaaatgttactgtggtcatttttggtgcatgatgccaagtttatctttagttagccattgccacctgatatgtaatgacaaatgttttactatctgatcattgggttgtagattaaactattttttttctctgtagattctcactacattttcaaatatgtacttggaaaaagctgcaaagtgctacctataagcaaattagtaactttggccttatctatgcatagtgttcgctcagtttggttttgataaattgattgacttgcagttcctttgtagtattttaacttattgtgatgtaatgaattttttgaaatgtttatttgattagctgttaaaatataggaaagaatgtagctttgcatgaaataaattacatttctacaagttaataagaattttgctgattgtttatatattttacttcatttgagattaaggttcttttaagtagattcaggcgttctttgttccttatcaatttattagcaaatatgacaaatgttttaaaataaatatgtgtactttagttttcacattactttttcttatgtttgaaagtaattatatatgtattgaaacatactgtaccccataaatatggacacttatgtatcaatttaaaacttattttaaaaatttttaaaaagagaagtaaccccctcactacaaaatgtttaaagaaaattagatcagaaaccagtgaaattgaaaatgggagaacagtggagaaaatcaacaacaccaaaagctgggacttcaaaaaaaaaaaaaggtcaataaatttgatgaaattttaaccaggctaaccaagaagacagagtaggctgctttcctgtataccaaaaatgaacaattggaaattgaaatttaaaacacaacattatttaca

SEQ ID NO: 114773 - DNA, 4065 bp, Homo sapiens
taattaaatatcggctagtgccgatgttggctagtgctacccatactcttgccttatggtaaaaagacacacctttttttaagagtttgagctgattacacattaaagtcctagccaagaaatgaggtttactgtaaaaccaactcaaactacttttgttaataaacagtttcaccattgtgataccatagttaaatgttaattctgagttacactaatgaaatgtttgcactgtgtctgcttctgagcttagagagcttcttagctaactacaagcctagagaacttttccttgctatattctattatactgcttataattttaatctgattttaaggaaccatgtagttatcttttcttatgttctttgtcttcagattccttggaattttgatttttctttctgtacctccatagactgtgacccataagttaaaagacagtagggaagtagacatttttcccccttcctttgcagctgcattcaaatataccagggctaataacaggactgaaagggaccggatagaacttctccaagatgcagaacctttggattttaatgcagaaacattcactgatgatcctcttgaatctgaatcaggaaggtaagttctggctgtgacattttagctctagcattcctctacacttttaataacacattgacttgacaagattgaaaataagtaagtaaaggtgaaagtaaacaagtgataagtaaaggaaaatgttcattttcactaacaataaaaaatatattaagtaacttttgatacctttttagactttctaatgcttttatatcatccagtaatggtaactaaaattgttatcttcatacaatactagtggtattataaataagaaagaataattgaaatatatagcaaaggatcacaacaatatttatatgcctatttctgattgtcccatttgtgaaatttattatatttagtaactgctgcatagcagtgtctagatgccagacactattctaagtcctttagcaaaaatattgtaattgtatggttgcaaattcagctggatttaaatccagagaggctcagtaaagtgcccagagtcacacaacttgtaaatggcaagtcaggcattcaaagtccagtattctggctacagagtctgtacttttagccattatgctataagcacataattaaataaaagcaaaatatcatgtgcacgaaaatgtttactatagtattgcctatatgcagtaaaaacctaggttatatttatttgcaacaattgagagtggttattgaattgattaatctcccagatgtgtcttacatcccctgcccccttctttttacatctctcactctgtcatgcatatattctagggtctaaaaccgttgctggttgatttataattaagtccttttggataatatacttggagggtaagtttctgctttcagctactgactagattttacagtacttacaaattatatggccactcccttttaatgtattcttgttttcctctcttcctttattatttttgatgcctcagatcatttctttatgttccctttttaggtatcagcctggtggacgatatctctcgatgtctcgcagtgacatatttaatgatgtttaaagtctgaaaaagtttgtgggaccactaaccaaggtcaacacatcagttcagtcttgatgaacatctgtgtaccctagaatttcctctatacacagtgaaaagtgtcaagataacaaaaaaggcactgagaattaattatatcttaggaataatagtttaatgtgcattgaatagagtatcacctttttcaacaagatttattacatatcatttcctaagcatctgccttagaaatacagttacagtggaaggactttaagaaagatcaacatatgttaagaacatgcagttcagtttgtttcagattaattttttttcaagagagttattttaaagattcaaggaagccataagtcatactaaataatattatatacagttttgttattgtgacttacatttttgttacttctaaaaagtatattcaacctgtatttcccaaagaaatgtaagtgaatggagacctcaaataataactgtattcataaaactcgtgtcttaaaacaaggcttacttactagacataactgaatgtaaaaagtgctttttcaaatctgtttgcaaactcgtgggggatttttgcatgtataagattaagattatacttcaagtgatgcgtgtctgtgtatttagcatgtgtactataatcaggtgatatagtattccttcagtctttgtagtaactggatttttttatgcttctggtattgctttataaaagattttcatttcagaaagctatgttcacatttatcatttaacatattgatttaaatgttgattatgatattcaaggataaatcctaggcattaatgaaaaatagtttttttttaagtagtcaaagagtccaacaaaatccttcagtatttaaaggtacctgcttatactttttgagaaaaaaactggttattcaaaggtaaaaagtgaatccatttactgttattactgatacttaaatcgtggtttatagaaaacaaaactatattagaatggaaatgtgtaataacttgttggttaaacattcttactaaatagactgtttttaacctttgtgtttaagataaatttatgtattatattttaaagcactagtgttttattgaaaagtgaacatgtttgattgcagcatgcttgcagagagttttcttatgtccctagaatatttgcaactcttactgaatccatgctacatttggtgaccatacttcagcttgcctaatacagtctcagtgtaacacctagtatcctgtttattactagtgattactttcaccctcaagtatcccacccagtttgaagatgaattatatggttcccctaacttgaagttaatctttccccaagacataaatttaaaatttttatttttatttttaataaatattatcatgtaagtttttttttaaaacacagctctatgcagatattgaaaggaatagagcatcatcctcattatctgaaaattttgatctttgagtttttatgatctttgcaattagatcccttttaaaataattatcagtggatagacttactctgaattgaaggtcatatagactacacttaagaacacacacatacagtcttttcatgtgaagtgtggccagaaagcaataagccaggagcagagataatttgatcctctttgtaatttaatgattgactaattgaatacctttggcaaatcatgtagctcttcagtgcctcaagtgcttcattctgcactttcatttgcagaatgaagatgatacttgctatttacctgctgatctaccttacaaagccattgtgaggaagttgaattggtgtttatgtactggagtttataactgtgctatttttcctagtgatacttgaaggtattggatggggaaatgatcatcccagaaatgggtccagtttcttattattacagaaaagtttacaagtacttaaagcaaaaacgcttttggactaattcatcaaaagtcctgtgaaagtagtgttgttttatttagtctttgggtttactttggaataatttcttaagtataatgtttctcatcaggttttgtcatgaaattaagatgctgttgttgaaacagaagcagaaaaggaaaagaaattagccaattacttttataactaacttttataatgccctaagataaattggtaggaacgtgtaaggtaatgttaccactttcctttagtattaaattttttatggttataataattgaagtgtatacgtgcatacacttcacaaccggtatagattcctttatgactttcaagttatatttaaaatatttggttgtttcagtgattcagaatattcaactttaagcagaatttgtcttacagaatgttatatacaatcatataaaaatgttattttgttggataaatttgagttcagaaggcaatgacttgaccctggaagactcagtt

SEQ ID NO: 114774 - DNA, 1039 bp, Homo sapiens
ggaggaatagaaacatggagaagactccctctgtggcatatccatatccatgcagggactactgaaatctgagagtggaaaaagaatactgagagaaaccatctgacacttgaggccctactaagtacaaggtcataggatttcattactagagaaatgtgaagtctttggggacttaaggaaactaaagcaacaaccaaatccaaactcagatcaactataggttgagtgattcaagccatcagcaatgatgatctaatagaagaggtgtgcccattctgggcataaaactatgatttctctccatcttttccttcttttacacataatgtctagcttttaacccaaaattatgagatatacaagaaagtaagataatatgagccattttcaaaacataaaatagtgaacataaccagacccagaggtggctcaaatgttgaaattatcagacagtgcagtgactttgaaataaccaattgatatgttaaatgatctgatggaaaggttggacaatgtgcatgaacagataggggggaatttcaccagagagatggaaactatacaaaagagctaaatagaaatgttaaaaatattttaattacagactatgtatgatattgtagatttctcatgacagctctgatagaaggatgcacaccagatgcagaaggaattcagcttggggattgaaaaagagggcttatcttaggaaagagtttttataatgaagaaatatttctgtaataaggacatgtttagctgagtatttaagaaggaatagtacctagccaggtgaagggtattttaattagaagggagactaagtgcaggacgttgtggcatgagagaacctttgggaaaatgcatgtttttctctaactaaagcctaagcatggggaggctaataagagaggaggccacagagtagttggggaacagatattgtcattctccaatgtttggatttggggccaggcgcggtggcttatgcctgtgaagctgaggtgggtggatcacctaaggttaggagttcgag

SEQ ID NO: 114775 - DNA, 2064 bp, Homo sapiens
tcatttccttccttgtgttccatattttcagtattcttgtcttgtacaacaatcaaatttaaagtaaatagcaaataagatataaggtagtagtcttcagataagatatagtaatcaatttgtagtgtataaaagctatttaaatagttaactagatcagaggaaaaaaattgctcttacattattacagttatcattttagcatcttggtataattgttttctgaaggtatgctgataacttgacttaactgacatctataagaaacctgaatatagtgcataccctaatcagtgaagtacagggcatacacttcttagaaagggagataagtggtacttcctgaagcatgtcagatgtgacagtagataactatatgataacagataatgaagcatagtcttcttttggagtgacaatgctaaagaacaattcatctaaatatttacaatgtgaaataatgtttgtctttttaaaaaatctgcttttattagtttgggaacccgttgtttgaatctgctcggtttccagcagtttatgggagatgatgatatgacatcagacttagttaatgaaggaaaagaattaatcagaaaaggtaagatttgtcttttaaaataaatgaagggaaaatactaagtgctaagactcaaaatacaaaattaatatttgtgtagtttgtgaatattttttaatctattctaagaaattatgaattaatgcacatttttagctaaaaatgtacaatggcctttctagcaaaaataatttgaaaacatgaataattgttttatcggtctttaagaaattctgaagcttaaattattagtatgtctgcagcgagataacacccttgtatggtcttggaatcattttcatgtttaccttgaaacatatttgcgaagctctgtacaactataaaactcattaatttaaagaatcatcggtttgatactgcatgggaaatcattcaaacaaaggctacttttttagaacgtgatcattaacagcctgttagaatacatggtactctagtagaatcaaatcacaaaactgagtgtattaaatttactgatgttcaaagtgatgatagcatggagggaaaaaaacttgacttttgggacattggttcttagacattctccctacttgagtctggggcttttgtgtaattatgagttgaatgtaagacaaaatgtattgcagctccaaaataagccagtgtagccttcacgtgctctcctattagacctcatatggcatagcacatccagtcctgggtaagatttttaagaataagactgataaattagaaggtatttagagaaggacagctagaattgtgagtctgtagggcatatcctgggggaaaaaaagtgaaaacatcttgtctgtaacctaaagagagtaacaaggaaagcgactcatacagaaagaaaagaagtatgaacttaacttagaagacaggaataaaagaatagaatttacagagaaacaaatttcaggtcattgtgagaaagaaatctttcttccctaaagttatttaagcggagactacagggccatctgcaacaaaaatagagaaggcattcactactgagtaaggtaacctctcaaattccttccagcaataacctataacatttgattttgtgataatttaaaagaaatactggtcattgcccgctatctttacttcagttgcactatgtctgattaaaccatgttatgccatatttgagatcatttttctgtctttagagaagagaaaaaggcaaaggcaagaagaaggtgaaaatcgaagaagagtaagtacagtattaatttctgtaatctgaagattaatttgaaatttaatttcttaagaatcttactaatttggaataattagctaaagacagaaaaaaacagtggaaaaatgttataagatatatttttaaagaaagggaattttaatactttcaggtatatacgctaagtatcctgacagacctgttctaaaagtcattagtaataaatttctttgtgtttagcatcgagcagcttcttgctaaagtaggtgct

SEQ ID NO: 114776 - DNA, 1624 bp, Homo sapiens
tttttatttggacagaattgaacaactttatatctgtgcttgtcagaatgacatatgttgatacaacttcagttcttttatgtactgaatacaattcaccttgaggatgttactgtccttgtcatgctgtgagatggattttacggatggcttagttgtaggagatgatacaaaggcactccacaacttgtggggataaagcaatggcagaaaccataaaagcaaggagcttgaggctgtagtcacgtaggcattgatgtggcaattttcagaatatctcccaagtaagtgagggcaggtcacattaagaattcaatatatatataaagcaaatagatgaaaattttagctataattatctgaaatgtttttaatacatctcagtatactataaaatgtattttgctgctttactttttatatacatatttttaaatgtttgttgcaggctattttgccgtttgacacctcctttatgtcttaatttcttgggtttgacccatatggattcatctatctctcacaagaatactcaaccaactgcttatacatctgtaagtacggtcagaaaatagaattccttaggttcactatctatatgaggtgctgttattgtgaaatttcttttaatgccagcagaaaagttctatagtgttattggtaaaattttctcttaaagattgtatacgtattactattgactagataaaagtgattttccttcttttatgataaaaatgttttttttggttcatatatgttgtctagctgaccagtatcaaaagaactgacctatactaatattaactttatatttgtagtcaatgtatgtgataattttgagtaataattatattaattttctttaagagaaaacctcaataaaaagcagattttaaaaaataagtccatttactgctttttttctactttttaaaaagttcaaatggattgatataactggttataggcaaattttctaatgatggaaaggaatggaaattatagagctattccaatttaacttacttttttcttgctcttcagattatgggttccatgaaagttttatcctttattgcagatggattctatatatattatcctatgttggtggtaattctctgcattgctacttattttaggtaagaaacttaacattgttttttcttttgctcttaaatctggatatcctttctctttaaagctcttttaaatatttactgattgagtttcagtttgtttcattgtagctttggagaagctggggatagtttgaagggactacttgagtgatcaggtgcgagtctccctctaaaaaatttaaagaaaaaagaggtagagttattattctattataataaataatactattttaacattattctatttaggctaaaaaatgataggattaattacagaatgttaactctaagtcctggcctttgacactgacagctatcgtagcctgcaaaacacccttatgtccagcttttttctaatgacataaattagccttagagctttccaataattattgctgggtgtctaaatgcttcagaccatggccagcacaaagggtcaggtgaggaccgattgtaatcaagctgtacattaagattag

SEQ ID NO: 114777 - DNA, 1003 bp, Homo sapiens
tagtagtatggaagatgactttaaatgcatgtatttatttctctgtgctatgcctttcaaaaattcagcatcttggatttgtcatgattttgcttcattctttagctagaaaaataatttatcctacttagaataatcttctcaaatactagttgcttcctgcaggtaagctcccctgcctatagccatctatacctatctggtatatatgaacacaaagattaatattataaaggtgagaagaaactcagtacatcttttaagacattttcaagaaaatatcagcaaatgaagtctaactagagatgacaataaagtaggaagatgtttttgagaaaattagaactgctcaagaatgaaagatttttaataaaaataaatttttatctttttacaattaagatttttaaaaatctacttttttttttttttagtgccctacagagtatcaggaaaaaatgggtaggaacatggatgattatgaagattttgatgaaaagcatagtatctatccaagtgaaaaaagtctggtaaaactgcataaacaggtaactttgttaattataagtattttacttaatgatgattttaattagacttctaatcattgctcataaaaaaaggaatttttagtgaatgtgtatttaaaacttcctttaatcccgtccttatcattctttgaaatattttatctctgtgtataccagcaggggtattattggcgtttggggagggagaattcttcactgagcataactgttacattatataaaactgttacatcattttggaacattaatattctcagcctgacccagtaaatgccctagcactttcccattgttatgacaatccaaacatgctccctagtggagagttgaaccactgttggatcagaacactgccaggtctacccccattctcttttttaggtgatttattcagttcagagacaccgtcgaactcaagtacaatggcagattcttttggaacaagcatttta

SEQ ID NO: 114778 - DNA, 1613 bp, Homo sapiens
gattagtttttgcctgtttatgaactttataagcatagaattatacattgtgaacttttttgcatctctctttgctcacatatttgggaaattcatctatgctgtgctgtatgtatcagtattctgttcttttccatttctgtaacataccccattatatgtatatgccatagtttatcctacccagccaaacttcttaaataaattctctatatttgatatctccacttgctcattgtttacttatttcttaaccatagtactctgctttctattctcctccacttatacatacaggttcttaatttacttcacctcttggcggcatttgattctctctctccactttaactttcctctcctagttcctaatccatatgctccttggttttcttccttgccccactattgttctgtctcagtctcttttgctggtctaccctccttctgttctctacctctcttaaaagttgatatttctcagagttctgtctcagttctttccttcacattctccatactcattcttacagttgagtatctactgatgttatttcactgccattgatacagtgatgacttcggaagctatccatatttttagtccgctctcctgaaccctgaagctgggtttgtgtgcagctcctcttggatgtctcctaggtactacttcaaagtcagtatgctgtcaactgaccttctccctttttgcttcttaccaccatcatcacccttccccctcccaactagttccaattttgttccccttttatccattctccgtgtgaagccttaggaaactaaaatttgatcaaaaatgttttctttgaatgtagtccagactcttcataaaggctttaaagacccatttgctttccctaaaattttatattacaaaaatactcagtcatctattatagttattaagtattcatgattacttataaacatttattaatgagaagacctattcattaaaattgagattcatatatttctggcactttgagattatacagacatatcaattatttgggtttttaatcatattttttctatccatctaggattctcttaccttttatgcagtcatatgcaagatcaggagggttttccatcactggaaagatcaaaactgcactaattgagaatgcaatctactatggcacctatttgctgatttttggagcatttttaatttatgtagctgtaaacccacatttacatttagaatggtaagaaaagtagtcttcttaacattgctttaatgtatgtttgcatttttaaaaaatcatttttaatttcatatgtgcaggtaaaaagacatttcattgagaaatatattgttacatattttatggatttccccaaaagaatatgtgaataatccatattactaagaaaatatggaatgacatctttaaatatagattttaggcaaaagattaatgattagtctaatggctatatattaaaagtaataacccttatgatttttggatagaatttcaaaatttttatgataaaataactggttttatttttcattggaacttgtgattttttttgttttgattataatttgaaggcatatttgttcttaatgttacctt

SEQ ID NO: 114779 - DNA, 2634 bp, Homo sapiens
tacttttaaatggtctctttccgttttttccttcctctcttttagaaaatcttaaattatagaggatgaataatcttagtaaaatgtattttactaagtatctaatttcctaggatttagttaacagcttatttgcataaactattctgttaggacttataatattaagaaacaaactccagatgacactgtattaaaactgttcacatctaaaataagaacttcttaatttgtaatattgtaagaactaataatttttgttaagtttttgaaaatacaaggtacgtgaaattttttaagtgtgctttaaaaataaaatataagtacttgaggataggaattacccttttaatcttattcatagtccaatgtgaagcatgacatttctccaaagagttgattaatgtattaatgtactaataaatattcagatgaaatttccaaatgtcatttcctgtgttaatgatgcattttaaccttctttttactttatagatatggtccagacctgtacatgaataactttggttagtcagagtgaaatattcaataatgagtggtgcagctttgggacttgagattgtttttgtcttttttctggcattatttctgcttcatcgatatggagactttaagaaacagcatagacttgtgattattggaacactgcttgcttggtatctctgctttcttattgtcttcatactgcctctggatgttagtacggtaaggagtgaaatttattttcacaatttaaaagacaaattttaatcatacagcatgttggaaataatgttatttcttaagacagctaagttatgtcagttttgaattaaaagattatatggccatttgatcattaaaaagcatagccaagggccgggcgtggtggctcacgcctgtaattttagcactttgggaggcccagactggcggatcacaaggtcaggagatcgagactatcctggctaacacggtgaaacaccgtctctactaaaaatacaaaaaaaatagccggacgtggtggcggacgcctgtagtcccagctactcgggaggctgaggcaggagaatggcgtgaatccgggaggcggagcttgcagtaagccgagatcgcgccactgcactccagcctgggcgacagagtgagactctgtctcacacaaaaagaaaaaaaaaaaaaaaagaataaagcatagccaagaaggtaagtttagatagatagatttataaactctgatgtcctttaagtacttggtaaccttttgattctcatttttaaaccatacattcgttgctttagacaatatacaaccggtgcaagcatgctgctgcaaattcaagccctcctgagaatagcaacattacaggattgtacgcaactgctaaccctgttccaaggtatttccttttttaaaaaaaatatataaacattgtaggggacacattgtttaaaaattgaaagtttttaccatccagactttatatttatgtaagttatcctcattctctactaattctccccacctctattctttcctagtagacttttcattacatcatattctaattaaatctaatttttaatatttattggtccacaaagcccttcagtagacggtagtgagaaacttgaagaagtcctgattttttagtcctggttcttctttaccaagtatgtaatttctaaaacctgtttttcctctcagcctatctcagatttaaaaacgtgggatgtattttcacttttgcctaatttacaaggttataataaagacaagtatttctgaacttatggtattcctttcatattgcacatccttcaaaagcattatagatttacataaaaaattaataaagttcaaattgtccaaagattatattgaattcatatcgaacttttaagtaaaaagcttatatatgttgactatagcctttatgaatgctttcagtagtatttgcatgcttctttatgcatatttttaaaaaatctaacttcagaaaaggtaaatttaaaatgcaggtgttacttccatttgaagcactattaaaaaaactggataaagatcagcagcagctacagattgttgcaagttcttgggatatccttctagcttaggaatatggctccatggcagaatttatgatcagagactcatcatgtcttcaaaaatttaaacagaattatgtataattgctagcatgcatctccatagaagctatgttatagtgagtgatttaattagcattacaattttcaggaattaattacctaatgttttcccctcccaacccctataacctgaaaaaaaaaaaacccaacctataaatggattgtgtattttaaaggtaatcattagaaattttatttcataatacatttgcttttaatgattgttgcacttttagtctattagttgaacattaagttttctttttacccaatgactaaaaatacactgaaagttgaaaacttaaatgacattttcagaacaatctattttgttgcttttgtgtgtttttttagtttggcagtcagctttgaattttaaaatttctttgaaattttatgggttattgattattagagtcagtaatttaaaatctgaatgtaaattaacttggccacatgcaa

SEQ ID NO: 114780 - DNA, 1038 bp, Homo sapiens
gcgatattcgcggcctaaaagaattattaagagggtccatttcatgctcttcccctttttgcaatccgtttacctgtgcatagcgtccgcaggcccgggagtttaaaatacgtgcattaactgcagagctgctcgcctcccagattcccgctttggcgcgcggcggctccgagcgtgctgctcgggcccccagcagccagacccgctaagcctagcaacgttccatccccactgcgcgcgcaaggctctacagcccgctctgcttcgcggccgcactgaggcccaaggcctgctgggaattgtagtttccgtcccgcttcgtagtccgacgggctcgcccttacttccttcccttgcagctttacccgccttcgagatacccacaaccccccgcgggagcgggactggtcggcccacggggtaggcggggaggcggaagcgggcggcgctacggctgactgggaaatgtcagccgctggactgtagacggattttcctttctcgggagcccgcaggccttctggtgatcgccagcgctgtcgtctctgagcgtggatcccagaacctggacagctgtggcggccgccgtttcccggtcccgtccagacgctgtctggcgagatcggacggtgagcctaaggcggaacgcgtgaggcgcttttgagtctggggtccggggccgagagcaggcggaaagagaggggacccggcagaccccgagtggccgccgctgcggggcccaagtccttggctgctgagtggtgacagtagcccagcccgccggccaggtgagaggctgcgaactgctggcgtcgcacctgttcgtccttttgccaggaagcttcttcctccgtcggggagaaggcggccctaagaattgggtctgtggacgggatccttcctttatctgtaaaataacgcacaacagctaaacacgccgttggaacgagagacaatggtttaattttaggggagccggagaccccagcgggtcctgtgtggtgggaaggctgcgcatgcccttgcagccttgacagg

SEQ ID NO: 114781 - DNA, 1060 bp, Homo sapiens
gcagctctgcagttaatgcacgtattttaaactcccgggcctgcggacgctatgcacaggtaaacggattgcaaaaaggggaagagcatgaaatggaccctcttaataattcttttaggccgcgaatatcgctactggctaatattgttagtaatgctgttaagtgaatggttgcttagccccttcttggggaaagtgtgaatggatggatgccttagtgcggggatcagcgtgtggttttatttggcttccctaattgggcttttctgccaccgttttcaatcagtgtatgattgccctgtctctctccttgtctgttccctccactgggagaaattcttgaggccttctgcaggatcgtaagtcaaaaagccttctcgatttgttcttttcatttcttcgttttcttggtaactcgccgcaggcacataaaaaatgcgattctgttagctgctgtgaaggtttcctacaatgcataaactgcagcttctttaattgccttgaaattatttatgggtgtgttttcgaaaggaaccgggggtattgtgcacttctgcaggaagcacctccaggagattccagacctgagtagcaacgttgccaccagcttcacgtggggatgggattccagcaagacttctgaactgctgtcaggcatgggggtctccgccctggagaaagaggagcccgacagtgagaacatcccccaggaactgctctcaaacctgggccacccggagagccccccacggaaacggctgaagagcaaagggagtgacaaagactttgtgattgtccgcaggcctaagctaaatcgagagaactttccaggtaaggacatgagggtaaaaatgtcagttatgcaaagggtggatttagctatgttgttgggaaacctttgttcagagatctttagcatgggttccttttaagattgcctaattctgaagctatttttcaacaaaatagggcaagtcgtcaagtatgcaggaatcttggtagatatatatatatatatatatatatatatatgtatgttctggtgcataatcaccttgaa

SEQ ID NO: 114782 - DNA, 1018 bp, Homo sapiens
tattccagaattcttactcttaatcactaagttttactaacacagggcatttggggatgtattagagaagatggcaaatttgagagatgtataatcaaaagaacctggtgattttacaagtagatgtttgcaagctaattctaattatgggtgaaatggatatatgtttattccattgtctttttaattcaaaaagtacattgattgatattcttgtgtatttgcttcatagtaagtcttttattacattatatcatttaatcttcttaataactctgccaagaagtttgataataccatttcacaaatgagtaaactgaggcaaattatcctgtttgatgtctgagagatagtgatatacattttaaactcactgactcaaagacctgtgagcttaactacactcgcctgctttcatctaaatgttgttgatgaatagtgtcttactggtctttttcttctgacgtttttctctttttccagtactctcgcaaaaaactcaaatttagtgcgacttaacctttctgggtgttctggattctctgaatttgccctgcagactttgctaagcagctgttccaggtatgaaagatgtgagacttgattatagactcttatgtcaaacgtaaaattatccctcacatctgtataaaatgggatgaactttttgagctttttgtactttccaggctcttgatttggtgaatgcaaaatcttttgccctcctaactttctgtccaaactcaggagccaagtcaattgagtttgcaagtgatacttgtatagtgatctcttttttgtttatttggaactgttaaaataagggaagtgtagtagtgtctatcaacagtatggttgtaagaaatttgctcacacttaactgtacattcaggttttttcccctatggtatctgtagacctaacttacaattttttatcaaatttggtgttttataaatatagaccgtaaatttgggcaattctattaacaatatctttcataataatgtcagcacat

SEQ ID NO: 114783 - DNA, 1006 bp, Homo sapiens
tcctgcccagggaggacagagcttaagtgtgggccagaggaaactaaccctttatcccccaatgtttcgttctttctccagtggtgtcaaagtatgattgcatcagattttgctgatggctagttggctggctagatgattggtccctcaaaattttattgtgtacttttttcattttttggtcatttattaaatatttattgagcacctacagtgattgaacaaaacagagccttgaacaaaacagagaaagtcactcttatgaagattactttctagtgggggagccagaaagtgaacatatttcataaatgttatgaaaggaggtaaaaatgcaaggacgaagagcaaagcagagtaaccagatagaatgtggcagaaagaggactacttttagatggaatggttaaagacagggcctctctgaggagactgtactggacccagagaactgactgagtgaagaaggaatccatatgcatatgtgagagaagaacattcaagaacaaaggaccagtgagtgcaaataccttgatatggaaccaatgtgtgagagggagcagggagaacagtgagaggagaaagatggccaagggctgtctaagccaaggcaaaagctttgaatttttcctaagtgacatgggatatgggaagccattggagtatttcgagcagagcaatatgactgacttcattttaaaagactcacgctagtgctgtgttgagaaaaggctgtagcggggaagtatgaagcagggagaccagttagcagactaggctggtgacacttaaggtggtaagaaatgatcagatttgggcacattttaaaaaccaacatcatgagatttggtgacacaatgaacgtgggatgtgagaaaaatagtccactatgatttcaagggttttggctgaagccactggattcgtgaaattatcacttgctgagatgggaaagagtttagggaaggaggaaatttgggggagaaattgagtatttgattttaga

SEQ ID NO: 114784 - DNA, 2032 bp, Homo sapiens
attaccaccagcaaacaatcttcatagcccatataacttttatctatttaattttatagtattgctttataagacagcttagaagaacaataagctatttgtattatgagctgaacaaaaagagaatcataggatagtagcgtctgaggccatcttttctaggaataggaaagagaaaaatgtatttgaattttgcctttagatttgaaattaggttaatagaaataagtaaccccatgtaattcaccttaaaacttaacaaaagaccaaacattacaaaacccagagatatagaatcaatataggatttgaaggcccagcagacagttttctatgacaggttaatctgaagtatcctgtaatgttcattaagttactgtgtttccagaatctaaattagatgagaaatataattgtggttttctaacttgataatcaaattatgttaacatgggtcctttagcttttaaaatgacttgctttgttttagaaaggtggtattaatccactctctattcttgaaaatttggatgggagaattctgaagttgcctgctgttttcctttagcgctgaggttcttaaggttacttttatattactctggaatcaagtattttaaattgtattttttttttaaatgatctctcagcaataattgtttgaaactatccatatataaggttatcagacctacagttccctaagaggaactgcatgttctcttcaatcagaaatatacagtagaagcaggtatatcttccatgcagtttcagtagtaagcactacttatacctacataagagttaaaatccagatgtgggaccttttgataccatcagtgatatatatttttttaaactggtacagagaagtgaaaagattaaattctacttctattttttttttttttttttgagacggagtctcgctctgtcaccaaggccggagtgcagtggtgcgatctcggctcactgcaagctccgcctcccaggttcacgtcattctcctgcctcagcctcccgactagctgggactacaggcgcccaccaccacgcccggctaatttttttgtatttttagtagagacggggtttcaccatgttagccaggatggtctcaatctcctgacctcatgatccgcccgtcttggcctcccaaagtgctgggattacaggcatgagcaactgcgcccagccaaattctacttcttaaaaatcacaaaaactagtttaaattgatgacttgttcgtatgttcaaaatgtaacaacaaaaaaagctaacaccagtcatttatattaactttttttttttaaatcaaaaattgttaatgttagaaacatactatgaagtgcctttatctgcttagacctaaggaagattttaaagttgggttgcacaggaaatgatgatgcttcaatttcttaatagttaaaaagtgctaaatactacttgaaattattgtttacagattagtgacaagagctggggttaggatccggttggactctgacatcggatgccctcaaacatacagaacttccaaactcaagtccagccataagctattttgccaacatgtcagagtaatctgtatttttgtatgtgatttctacttttatagacttgttttaaaacaataaaacacatttttataaaaatgagtgcttaaactaagttgtattccttttttctttctctttttttaagtgctgtggttaaaatttgaaagcatttagtgtggtatgccatttggcttagatacctctaaataagactcttcaaaacagagccctgagatggtcctttttgacccatctacttcatatgcttgtcacattaaaaaaaaaagtttataatgcctttataaaaggggctaatacagtcttgttatctttttttttaaattatactttaagttctagggtacatgtgcacaacgtgcaggtttgttacatatgtatacatgtgccatgttggtgtgctgcacccattaacttgtcatttacattaggtatatctcctaatgctat

SEQ ID NO: 114785 - DNA, 1050 bp, Homo sapiens
catgttctcactcataggtgggaattgaacaacgagaacacctggacacaggaaggggaacatcacacaccaggacgtgtcatggggtgggggcagaggggagggatagcattaggagatatacctaatgtaaatgacaagttaatgggtgcagcacaccaacatggcacatgtatacatatgtaacaaacctgcacgttgtgcacatgtaccctagaacttaaagtataatttaaaaaaaaagataacaagactgtattagccccttttataaaggcattataaacttttttttttaatgtgacaagcatatgaagtagatgggtcaaaaaggaccatctcagggctctgttttgaagagtcttatttagaggtatctaagccaaatggcataccacactaaatgctttcaaattttaaccacagcacttaaaaaaagagaaagaaaaaaggaatacaacttagtttaagcactcatttttataaaaatgtgttttattgttttaaaacaagtctataaaagtagaaatcacatacaaaaatacagattactctgacatgttggcaaaatagcttatggctggacttgagtttggaagttctgtatgtttgagggcatccgatgtcagagtccaaccggatcctaaccccagctcttgtcactaatctgtaaacaataatttcaagtagtatttagcactttttaactattaagaaattgaagcatcatcatttcctgtgcaacccaactttaaaatcttccttaggtctaagcagataaaggcacttcatagtatgtttctaacattaacaatttttgatttaaaaaaaaaaagttaatataaatgactggtgttagctttttttgttgttacattttgaacatacgaacaagtcatcaatttaaactagtttttgtgatttttaagaagtagaatttggctgggcgcagttgctcatgcctgtaatcccagcactttgggaggccaagacgggcggatcatgaggtcaggagattgagaccatcctggctaacatggtgaaaccccg

SEQ ID NO: 114786 - DNA, 2477 bp, Homo sapiens
agcaagctgggtaagagttgattcctgagttgggtgatcataagtgtgttcactgaactgtacattaataatttgggtgtatacctgtatacataattacatgtacccaactcttctgtatatgtgttatacttaagtaaaaattttaagtacaaattttacatgaaaatagttaacactcttattcaatacttaatatttgtaatgttagtaattcagcatttaatcatatgaaaacagcctgtgagttcagtcaggtctgcacttctttactgctaaatgcttgagcgaatggtgccatcctgaacgttttgagaccttcataatatacccatatatttacatagtgactaattttctcataccagagaacaacttgatttttaaaatggaggccaaatgatctgctaggttaaaattcaggattaaaataacctattaagaaaactattactatttaatgagatatttccttctgcctagggtttgtgttcgttctcgttgttgggatgcctgtatggttgtggatggaggaacttcttttgagtttaatgatggtgcaattgcttcgatgatgatcaataaagaagatgagcttcgaactgtgcttcttgaacagtgaaggatttcctcatgacaaattttgattactggcgagaatatttttacttcagaaacagactaccagtcgtaaagtgacattttttggttattgttgagactgcttgcccgtgggctcagaagtgagatttgcattattcttctgttggattctgatagaaaaaaagacattcactgtataagaaaatggatggactgaaccaattagaattgataccagtgaaatttttatattgcttacaattggtaaccaagagtgctgatacctttttaaatttagaggggcaggcttaaataaaggactaaatatttaggatttgaaacttaactgtataagtgtgttttccttccctttcctcctaattgtgggattgtcagaactgaacacatatcatttgattagtgcatattttttatagtacctgaaaaccaagattttgaaaaaattttcaagacagagaattttgataaatcctgacattgacctaattgacataggtaaatatgtttgtatatgtgctaataattttctaatttcggaacacgatgatgttatgactattgatttaaaaatttcaaataataatttttgaaattatagatgaatgctttcatttgagtttcattctgtaattcagcagttctgggtgaaatacagatagcaaaacaaatcatgatgctgttacaaatgtattagttatccaataagtgttttaagtcaatttttttaaaatgatatgagtcttacaggtttcttccatctttaaaatgctcaaacatggattcagggactaaaaggatgaactgattagacattttctattaggagtttggtaaaatattgtaaaaatatcttcacctgtgttaggagtattatcagaaagaatggattctttaataaatatgtaaaacacagtagttttggaattgccttccttagtattgtggttttcacctagcttatattccaagatttacagaatagcttttaggataagatgttaggactttttttttttccccatgagaattcctttatttttggaggaaattattatctaattattgatctacttataagtaatcctagaatttttgccaaaagatcctgtcgttgcataatcaaacagttggtattctcgtgccgttgttcaaagtcatgtgtttctttcatttggtgctgaaaatttctgttcaatcattgacaaatatttattgaacacccactctgtgccatgtaaaactatgtcaggtgctggatatgttgatgaatgaaacagactctatccttatacaatttgagtcttgtgggctcagaagtaaattctgtgaaagctggacggatagtcgaattgagtgctcttagttttgccaatatttaacatgttgttcttatcaattttttaaaataaatgttaatgtacaaagttaatctaggttttgatgtatatccagagaatcaatttttcttaaagtatctgcgtagacattcatagcaaagaatttatgacatatcagatagaaatacattaaaatgtagtgttttcccagagattgatctggctttttttttttgatatacataagataccactttataaagaagctccatactatagaacctcccctaacaggcttaaaataccttctttttttttttttttttttttgagaacggagtcttgctttgtcacccaggctggactgcagtggcatgatctcggctctgcaacctccatctcccaggttcaagcgattctcctgcctcagcctcccaagtagctgggattacaggcaggcaccactatgcctggctaattttttgtatttttagtagatatggggattcaccatgt

SEQ ID NO: 114787 - DNA, 1015 bp, Homo sapiens
attggagaaaggatattgcctgtcattgtttgagactgcattttatatcaagctgtttgcttattatcatcgttatgagctctttgacatggtattttggaaagaacttggtagggccatatggcaactcaagttccttttttgagtgcatctatctaattcctctattgtttaattacaagttttgaagctagtgttttttatttttttctttttccccagttgtacctattcctactgtattgtgggtgatgtatgtttctgtgggcaaatcatggtacctaattcttatttataaggttttttgttactgtgttttaatggaatatgtgttacgagtttcaagaaacttgttcccaaatatacttttggaacagaatttaaatgggggatggcatctattttttgttttgcccttctcagaagtgaccatcttttattgagtgtgctaatttttttttctttgtagtaacaaatgaatataatgaatcactgctctacagtccggaagaaccaaaaatacttttcagtattcgagaaccaatagcaaatagagttttctcaagcagtcgtcagcgttgtttctcctcaaagtaagcatcctcaatctgacttctgactgttttcatccctttcattgttacaaagcccacttggtttgaaaactatttaatttcattaaatttgctcattcaaacttaatctagcaggaaaagtagaacctgtgaaagtaacaaggtatcatgctaacccggctaaaatcatattttcttttacactcattgtgccattttagagaagctaaaacttaagtgactagaaagggtacagttatttatttcagtgatttgttggtttttaaaaaatgaacgaagacacaataattgtaaaagaagctgaatagaaagccccttctttttcataagctgtagaataaaaacacaataaacactgatagaaaacttagattgcatagcaataaacctttagaatagtattcatttcttctaggttt

SEQ ID NO: 114788 - DNA, 1047 bp, Homo sapiens
tctacagcttatgaaaaagaaggggctttctattcagcttcttttacaattattgtgtcttcgttcattttttaaaaaccaacaaatcactgaaataaataactgtaccctttctagtcacttaagttttagcttctctaaaatggcacaatgagtgtaaaagaaaatatgattttagccgggttagcatgataccttgttactttcacaggttctacttttcctgctagattaagtttgaatgagcaaatttaatgaaattaaatagttttcaaaccaagtgggctttgtaacaatgaaagggatgaaaacagtcagaagtcagattgaggatgcttactttgaggagaaacaacgctgacgactgcttgagaaaactctatttgctattggttctcgaatactgaaaagtatttttggttcttccggactgtagagcagtgattcattatattcatttgttactacaaagaaaaaaaaattagcacactcaataaaagatggtcacttctgagaagggcaaaacaaaaaatagatgccatcccccatttaaattctgttccaaaagtatatttgggaacaagtttcttgaaactcgtaacacatattccattaaaacacagtaacaaaaaaccttataaataagaattaggtaccatgatttgcccacagaaacatacatcacccacaatacagtaggaataggtacaactggggaaaaagaaaaaaataaaaaacactagcttcaaaacttgtaattaaacaatagaggaattagatagatgcactcaaaaaaggaacttgagttgccatatggccctaccaagttctttccaaaataccatgtcaaagagctcataacgatgataataagcaaacagcttgatataaaatgcagtctcaaacaatgacaggcaatatcctttctccaatacacccccattactcaacatattttctagaaatctttgggacctgctttctctctaatcaagaggtacaggagggctggaatacaaagcacaaattggttgagaaaactacaaa

SEQ ID NO: 114789 - DNA, 1686 bp, Homo sapiens
aaataatttccctgaaacaaaaattctatgaactgactaatcttgataaatcttgcatgtgagaatgacactaaatttgctcattattttgggctgagcatctctcacctgactgtacttgtctttctctctgcctctgcttcttttctacccatgcccccttacctctaatctcttttgtttctacttgattctggcatagtagcagccacttctatggatttggctggcttgtctgtacataataggctcctaatgtgtgttttctaggaagacataacaaagctatgaaatagattaaatgtgaatattaggcctgctatcttttatttttaataagaaattctgactatagagaaaaaagtgaaaaggagttgtattatgcaaaacccttacaaattaagagcttacaggataaactgtaaaggttagaataagagataaattatccatagtgttagtgtttgcaagcatgtccagtaattattttgaaaagttgtattttattacggttttatcgtaacttttttatttgctggagaaaaaaattcagtgttgatcagtgacaccattattttaagatagagtttacaaaataggcttttagacattgcaaaagttctttgaatagttacaaatcatttatgtgttcatggagttaaagaatagtgccatttttgctggtgccagaaaacccatttgatttcatattaatgaaatattttaagaaatgtaaatcccaagaaatttatagttctggtttatttctagttttgtccactaatccagtattggttgagaattttctttacagctttattatctaatctctgttagcttactaccaattcaaaaggtacattagcatgtaacttaagaaacaagagtttagtagaaactattaataactttaagaattagaatcagctttaaaatatatcaaggactagctaccaagaatgaaactcacttaagaatagtattttctttttttggattcagaaatgaggctctgtatatgttagattccataagagcaaaagcacaatgctagctaaaaatttgcaagaagctcctatttgaaatattaaagtattgacagaaaggaatatataaatcagacaggcatgcagacatgtagtttttttttttttaatttcttctaactttttcacttaatcagtattggaattagcatcatgatgtgtgtgcctactaagtcaagtatttcttgggtaagctgacttacttaagatttccttagttctgaagaagactctcttatttaccttgaaccataagctcagcaaacagttttatattctcaattcacagggcttcctactatgagatttcagttgatgatggtccatgggaaaaacagaagagttcagggctcaatttgtgtactggaacaggatcaaaggcctggtgagtaacttgggatgttgcttatcaagttttgtgaaatacttttagtaatgtaatattttggcccatctaaggcctgtaatatgcaagaggtgtcctggtggtgttatgtaggtaggccaagtttctgtttcattcatcatttgggtctagtagtcctgccttgacttcttggattacagttacagcctggatttggtcattattgagcactaggtttgcaaaggaaaggaaatgagaagtggttttgggact

SEQ ID NO: 114790 - DNA, 1146 bp, Homo sapiens
ttagctagcattgtgcttttgctcttatggaatctaacatatacagagcctcatttctgaatccaaaaaaagaaaatactattcttaagtgagtttcattcttggtagctagtccttgatatattttaaagctgattctaattcttaaagttattaatagtttctactaaactcttgtttcttaagttacatgctaatgtaccttttgaattggtagtaagctaacagagattagataataaagctgtaaagaaaattctcaaccaatactggattagtggacaaaactagaaataaaccagaactataaatttcttgggatttacatttcttaaaatatttcattaatatgaaatcaaatgggttttctggcaccagcaaaaatggcactattctttaactccatgaacacataaatgatttgtaactattcaaagaacttttgcaatgtctaaaagcctattttgtaaactctatcttaaaataatggtgtcactgatcaacactgaatttttttctccagcaaataaaaaagttacgataaaaccgtaataaaatacaacttttcaaaataattactggacatgcttgcaaacactaacactatggataatttatctcttattctaacctttacagtttatcctgtaagctcttaatttgtaagggttttgcataatacaactccttttcacttttttctctatagtcagaatttcttattaaaaataaaagatagcaggcctaatattcacatttaatctatttcatagctttgttatgtcttcctagaaaacacacattaggagcctattatgtacagacaagccagccaaatccatagaagtggctgctactatgccagaatcaagtagaaacaaaagagattagaggtaagggggcatgggtagaaaagaagcagaggcagagagaaagacaagtacagtcaggtgagagatgctcagcccaaaataatgagcaaatttagtgtcattctcacatgcaagatttatcaagattagtcagttcatagaatttttgtttcagggaaattatttttttaaggcagcaataaaactcacagtccctttagagtgggtatacttcttcttaaattgtccactgctacagcccaagaataagaca

SEQ ID NO: 114791 - DNA, 1079 bp, Homo sapiens
gaaacatggttacagtttgatggtgagagctcaaatttactggtaatatttcatgagtacctattgttgagcatttgtaggaaatctgtggggatagtaatctaaaacaaatttcattagtaattaaggaaaagtaatttaaacaataaattttagccatttatgtttgtaaaactgtcaagaatgagaatgtgaatatatgtagtacctaagacagtttaaagccagttttattcttatgtgcaatcaaatttgattaaacatatcaaatccatatatatatatatgcatgcatatatagctttttgtatcaaggtctttctctgtattatgaagttgagctgataatttaggtaaacaacaagtgctccaagggtacttggtattgtaatatcaacttgttatatttgaaagaataattgggttgcctttaggcagttatagtccaaaagaaatgagaaaaatataatgttccatttaataaacataataaacagaagaatataataattaggctacaaagtcaaaggagaagaatagatcaatgttgtcttggtgacagtggtggttttattagtgtatttggtaactatagtgtattaggtaactattgttgtataacaaatcactcagtttagcatcttaaatgtaaatatttatgacctcacacagattataaaggtcaagattctaagagtagcttagctagttacttctggtttaggcaggaggtgacaatcaagctgttggccaggacagcagtatataaagacgactggaactggagaacacacttttttagctcatcacatggcttttggcagaaggcttcagttcctcaccatgttggtctctccaaagggttgttcatgttatctcttcctctagagcaggtgatctgagagaaagagagtggccaaggtggaagcaatagtgtcttttctaacctgatctcagaagtgatatgtcatcactgctgccatattctgttggtcacatagagcaaccctagtatgatgtgggaaagagagtgtgagtatatgtattcacaaaattgtgaataccagggaggcaggaat

SEQ ID NO: 114792 - DNA, 1054 bp, Homo sapiens
gattggagtatcattaaatgatgatgactgagccttctggacatctttaggtgccacatactctcatctacaccaaccaataggcaatcttaccaccttataatttgcaatggtttgttttaatttgtcttccacatcaagctatgaactccttaaaggagtttcattatttatgtatttttgaataaatgaaggattacattggattaagctttctcagttcttttttagtgacttaggatatcttaaatgacatttcagaaaggattatggttcaaaacatttcacataaatattttgattccttttgagattgctggtttatcctgattttggagatgaggaagctgatgctaaagtgacttgcccaaagttaatagttaaataatttaaaggttagaataaaaattggaaggttagtagttaaataatgatttgaacaacactgtaccattaaataactttacagggtaattagtagcagatttgctgctatttttagtttcattgtaacgtagaaactcacatattattatgtattatggcattaaagctggatgtagactactaattctatctggtcttttttgtttttatttaaagaacacaattttgtggcaaaaaatggaatatagggtagacatttttagaatttcatttcttatttttatagcttagtgataccttttgattaaatttttttgcttcaccttttttcttttcctctttatatcaccaaaaaattcctgttaaaatataggtctgagggtcatttatgcctgcccgttcgatatacacattcctttccagaagccttacagaagttctatcgtggtgagttcaggtaggaatttcttacggttgttcttatgtaagtatcttaataagtatgtgccattaataatgctgttaaaaaacagaacaaatcaggcagggcacggtatctcacgcctgtaatcccagtactttgggaggccgatgcgggtggatcacttgagctcaggagtttgagaccagcctgggcaacatggtgaaaccttgtttctacaaaaaa

SEQ ID NO: 114793 - DNA, 1073 bp, Homo sapiens
ctctgtggtggctgcttcagtagttcaacttttgcattcactttgcttcccttatccttctttcttcaataaacccaccttgttttcacagaggaattgaaagtcactggattagaactacttcaccttttctcttgcttaaaaaaatcttgtcctgtcttgtcttttttttctctcccttcacacttgactccttttagcctaaaaagacttgttcaagactcctgtttttcaagaaaattttaaaaatcctttaccctgtgtcactctcttggttattatctcttttccttccacttatccccaagcttggtatcgccactccttcagttctcagttattttctaaaactttgcagtttttttatggatttgcccccaaccagttcattgacgttgcttttgccttagagatcagtgatatcctacttaccgaatctactggatattttagtccttgtcttacctgatttctgggaagttttggtgctaactgctcccttatttcaactgtactttgttggcatttatgatacctttttcttcctatctctgtgactacttctttgtctgtatttcttttgaaggatcttactatttggttactggctaaatactggtgtttttacatattgtgctctgggccatcttttttcttcttcaattcctatattgtctctagggaggctgattaatactgtggtattattggagtcccctgggactccagaatctttattccaacactgatcttcttgcttccattcttacccttatagtttcttagttcttctccccactgcagccagcgtgattattttatggaagtttgataatattatgtaacttctctgcctagattttttttttgtcgtggctccccatctaacttagggtaaaatctacctttttactatgaatagggtgacaaacttctcctggttttcttggaactttcctggttttagcactgaaagtcctgtgtcccaggagaatgtcagtcccaggcaaagcagggaacagttggtcaccttaaatgtgacatacaggctgtacattatctggccctttacc

SEQ ID NO: 114794 - DNA, 1015 bp, Homo sapiens
gggccagataatgtacagcctgtatgtcacatttaaggtgaccaactgttccctgctttgcctgggactgacattctcctgggacacaggactttcagtgctaaaaccaggaaagttccaagaaaaccaggagaagtttgtcaccctattcatagtaaaaaggtagattttaccctaagttagatggggagccacgacaaaaaaaaaatctaggcagagaagttacataatattatcaaacttccataaaataatcacgctggctgcagtggggagaagaactaagaaactataagggtaagaatggaagcaagaagatcagtgttggaataaagattctggagtcccaggggactccaataataccacagtattaatcagcctccctagagacaatataggaattgaagaagaaaaaagatggcccagagcacaatatgtaaaaacaccagtatttagccagtaaccaaatagtaagatccttcaaaagaaatacagacaaagaagtagtcacagagataggaagaaaaaggtatcataaatgccaacaaagtacagttgaaataagggagcagttagcaccaaaacttcccagaaatcaggtaagacaaggactaaaatatccagtagattcggtaagtaggatatcactgatctctaaggcaaaagcaacgtcaatgaactggttgggggcaaatccataaaaaaactgcaaagttttagaaaataactgagaactgaaggagtggcgataccaagcttggggataagtggaaggaaaagagataataaccaagagagtgacacagggtaaaggatttttaaaattttcttgaaaaacaggagtcttgaacaagtctttttaggctaaaaggagtcaagtgtgaagggagagaaaaaaaagacaagacaggacaagatttttttaagcaagagaaaaggtgaagtagttctaatccagtgactttcaattcctctgtgaaaacaaggtgggtttattgaagaaagaaggata

SEQ ID NO: 114795 - DNA, 1037 bp, Homo sapiens
aagatagttataaaatgttactccaactaggaaaaataatttttgaaggatatatgtatatataagttatcctttctaagggagctagtcagccctttgtttagatttcgtaaggtaaattccaaatagagtttataaatctgagaacaagagagaagcaaatccaagtggaacaaaggtcatctaaccgcctctacaagtattagtttatctttggtcatcaagtagccatatgcagtgtgttaaaaagtcatcaaggctgaggcaggagaatggcatgaaccagggaggcggagcttgcagtgagccgagatcacaccactgcactccagcctgggcaacagagcgagactccatctcaaaaaaaaaaaaaaagtcataaaaaaaataaaaaacttaagctgtaaaacataagattttgagatcctggtgactatatgattcagaaaacataatgctgtatttggtattaaagccaaattataattttctgatatcaggctttctagttcaatttgtacttgtaggtttcacaggtagttattaaaatatattttcaaaaaattatattttatacggggcttttaaaaatcataatattagaacatcatgtgtaatatatattagtaaaacaacgtttcttttgttttgatatagcttgcattgaaaggctctagttacagtggacttcttgaacgacatcatattcacaccaaaaatgtagaacatattatagatagtttacggtaagtctatgggattgggtcttgggttggattttatattcaggacttccagtttttattttgtactagcagcccattcttagatttttagtgatgattgttattataaaatcattttcagaaaattatatcaaggttaatggatctgattttatagcatctttaaagaaaaatttattgttctctgaaaatgtcacaggtgttttcaattatttggtcttccagagaaatgcatcttctgtagagttaattcagttacacagctggcttcaactgtataatattttattt

SEQ ID NO: 114796 - DNA, 1028 bp, Homo sapiens
gcaggagaattgcttgaagtcgggaggcagaggttgcagtgagctgagactgtgccattgcactccagcctgggcaacaaagcaaaactcagaaacaccatctcaaaaaaaaaaaaaaaaaaaaagaaagaaagaaaaagaaaaagaaaatgaatgtatatagtgaaaaaagcaaatggtatgaacatatacagggctaagacaagatgattgattttacagtaacattgtgagttaagtagtccttttttggcccatctgggaaccccatcaccatttataactaggctgctgtgcaaaaatgtgcttttcattccaaacactgatcttaaattgaactctcagaacagttgtattttctttttaactctcttagcagcaggatcccttgttgcaggttttgttcacaagtttctcttatttccttgggattttttttttcatagtagagtaaagtcattcctgaaaaattgaagcaatatttggcatgggaaatacaggagatgaggattgaggcctgagaagttttctgcttgattctccaggaaaagctttcaatgtggttatggtcagaaacaagactataaacatttcaccttattaccgcaaatgcctgcttccttctttaggtggccctggtgacagaactgctggcgaactaactgccttctctccctacacacagcttccctcaacccctcaaagcagcaagatttatgcaagcctcctgtgacagcagagcttctgtcccatcagtagccttatcaaatctgtcctatagccccatcagacctgagcgaacacctgctttccaggtaagttcttaccatggatcaaggcagtggtgcacaaaacaaaacaggctgaacatttccaaattgttgggactcatgccacttctttgggagggcacaacaatcaaatccaacagaatttaggcttgctagagcctaaacaaaaattctttagtccctttggaacaggaaaacttagggagcactaagaaaactttgcacaaacattacagt

SEQ ID NO: 114797 - DNA, 1050 bp, Homo sapiens
aactgcatgatttacccggttacctcaaaagaaaacttacagttctcctatagaccattaagccacttccttctcattcatttaacacatactcatttataattcatgatcctatacgtataataaatagagctcagtaatactggagtatatttgaaaaagatggagaaacaccattcaaaatggtgttgtaaacaccagaagagtggaatttctaagacagaaatgtttccattcaagaatacaggaatggaaattcataaaacttgaacatggaagacagattgatggagaaggaagttcctaagtcattagtacaaagcaataacatctctaataaaaagaagataatgccaggatttaaaagtctgtttttctctaggagttctgggatcatccctagtctatttttctctaggagttctgggatcattcctcacccagtgagggctttcctaagatttgtgagaattgcaataagagttggctgagctagggtagataagttggccgggtgccctcatggttggctttactaatggaaactgaggaggcagaagcagcaagaagaaggcactaacaaagaaacacataaaaagagctcattgacagtcaaagagaccactgagtctacatcaaagacttggaatagcaaatagacaacttaggagcaaacagatttaggagagaaggaagaacccttcagttatctgttagtgtgtcttccatcaagaacccagtgaatataaaggctctatttagcttgtcactgggttccatgtctaccagtcctaagagataggaaaagaatgtgtctgtacaccaactcttaatttatttgctgtagcataagaaaaaacaagaaagatgctagcaaggaagaaggagataattattttcccccaagatgagagatgagaagagctatagttattacctagttttcaaattcctaggtttttattgcttttagtaaaaaaaaaaaaaaaaaaaatcactgggaaaacctatgtactgggttgaatcttttgtttagactgtttttttttt

SEQ ID NO: 114798 - DNA, 1068 bp, Homo sapiens
agagagttgggaaaggttgttttgaagcagtgggtagaagtcttaatgttgttctaagtgtatctctggattctattttgctctttttcttcttgtcatttcagatattgaggaaacagagcaggcaatttcaaatttctctttcaagtaggtaatcaaataagcaagtgtgttcagaacaattaaccttcagtaataatacctttcatttttgtggtggtacagtttacaaagcactttctgttgcactctctgtagcacgtaagctatgaccaggccaccctccttctgatttgtatctgcaaatgtctgggacgcagctaagaaagcattgagagtctaaagatcctgggtacaggcccggctccatcaactaactcgatttttatggtgtaagacaaatctctgggtctcattttctcatcagcaaagtaagtttggactaatgtctgcttccaactccaaaattctatcattttaagtctagtttatcttcctctaaaatatctgaatatatagaataataaacagaggtgttttgctttgttttattttgttttgctttgttttgtttccagggcatgacactgtaccattgctagaatctttttcctagataacccattctggctggtctctccagtctaacaaatagcccccttctctccctttgacctcttgagggcccctggctctgggtctgataatcagtgtttcctagccagtgtttgagaacacagtgaggacacactttgcagaagccccttctgcccttcagtctctgcccatctctcataaattaggggaagaaaaccacaggcttttgtttttgctatggaataaataagattgtgaagagcctaacctgtttagaggaggcaaccagagtttgagcactgtcttttccaagctgtacattccaggtacttgatatttatggaacactaggatactatcattcatcaagtatttgctggcagctaggtgagctgcatcattgctgggagctgagaaaacacacagagcacttcagtgcacagagtttagcgactatactcactgagtata

SEQ ID NO: 114799 - DNA, 1558 bp, Homo sapiens
atgactataaaaataaatatgtatttattccttttttgactctttgtatacaaataatagcatagtatacatagcccacttttcaccttgcttttttcactttacaatatacctgggatattattccttagcacgtagaaaggcccctcattcttagggctacattgtatgggcataatataacttatttaagcaattaccaattgatggacacttcggttgtttccagtctttagacatttttatttaaaaacgttgtaatgaatgatctttcacccatgtatctggatatacctagaagtgaaattgctgggtctaaaggtatactcattcataatgttgataagtattgctaatttgtactccatagaatttgtagtcatttgctacaaatgtgggatttaaaaaagagttagcctcggtactgtactgcctctgccaaaggtaagcatgagtggactttgcagtttgtgcgggttccgcagacagactgaggaaactaaggaaatcagtgcattggaaaactgcaatttcaggatagaatcaggtagatgcaggtatctccctgcttctaaagcccaaatttaatccatatacaacacccaaagctttaatttgtatgttacattcaacttttgaagccctttcacatctcttaccatctatcatcttcacaataaactgtgaaagagatgaaccagggtttcagtttttatccctccctctaagccttcaccccctaccaccaatttagcagaagtttagaaagtgaaacattgagtgatgtgtcaaaggcgcttagaaataagagactgccagaaataagtctatagaagctaggatcaccccgctcccaggccagccctggctgctttagttacagtcttaggggatgcaacctgtccacaaataattccccagaatactggtgctaacagtctgagcacagatgggtctcggctgggctctagagcagaacataaaatcaggaaactagagcaaactttactcttcatactgcacagagacatatcagttagtagaacagaggctctgaaagaacagaaaagggaatagatggaaatgggaacacctttgctgtgcaccagcatataacacacaaaaggcaccaggggaacttgggaaattttaaacatatttcattcccagtttctacttgttcataataatttcctttttccagaaaggaaggcaacaagtcctgcttttaattgctatttctggaatagaagatttttaaaaataacaatggattggacatttagaatacctgtaggattatttgtaaattaaattaccacttcacatagccttttttggtgcagtttttggaagaaagcaccaggcctttcttaaaactccaaggttcttctgatgcagttgtctctaagagtcacacaccgtgtgcacataagtccgtgtctccactctacttggtcatcagtcacccagggctctctcatttgggcacccctggtggaacaaggctggggcaggtatttcccaccttcaacaggaaataccaaaggacaaaaga

SEQ ID NO: 114800 - DNA, 1061 bp, Homo sapiens
accaacacttatcttttcctggtgtacccgcatgatttcatttccttctccagttgcctcccacccccgttaccttttatgctagtgggagaagggggagggggcgggagattttcccatctgaatattttatcagtggacacttggatttttaacaagtggaagctttgcaggataggattctatgttctatgacaatgagataaccatttattcctgcatgggaaaaggtgaaagagtcatttgtctatgtgattggtgaatcagatggagccaagaagttgcagaaaaatgttactgtacattccttcctgcccactcttctctttccccacagcacatctctgacttggagaaggaatttccatagacactgcccgagcaggatgatttctgggtttgtaggtaaagctcagaactcaggtattactgaccctattctcttttccacccttggctcactgttcccctgttgggcatataccactctacctctatgtgagctggcactgagaatccttcccatcccagggagttctcaaggatatttatactatccttcaagatctctgtgtaatgagaacttcatagtacaactcaaaagtcatggaggaacattctattacatgccttggagggctggctattacttagacaggaactatgtcagattttccctcaatgccttgcagatctctgctggtttccacttgtccagggccttaaacaagtgattgcatgtacatatgctttcactggagaatgaattgcccataaaacagtcctggagttgatttgatgtacttgtttgtgaagctgggatggtccattgctgaccaggggtaatcacagcagctacagttcttaccacaaaagctatattcatgctgacatgagggcacatgcttattttattatccatatgctgatatttttctgggaaacaaattattcacagaaagcacttgtaagacagaacccacatctgacattttctgtggtagagcagagtctctcctcaccatccctgctggcagggcatctggattaagtgcctgcag

SEQ ID NO: 114801 - DNA, 1164 bp, Homo sapiens
acatttataatattgttaaagagaaaagaattataagctgcaaacaactaatataaaatgaacttttaaaactgtaacctaattgcaagttgggagtgttgccaaattggaccattaagagagttttagctcttgtccaggactgtgctaaggcaaggagtctgaggggcagaatttagttcgccaaagatctttttaaggtgttagtctgaagtgagtaatttccaaactacacagtaatttagatatttatgatcaaatggaatgaatgatggattcagtaagaatgtcctttatggttttgaatacaataattctaacccaaatgagggtatgacccagctataatgggaagggaggaacttctacaaattacacagacccctggaggatccctgtgtatactgggaaatgttactggagaatgtgttgcctagggaagaaacaaaggcaggctccattgctttagagtggaaaggcaacctcaaatgcctccagtggccacgtgggtgatgcatgtacatgaagctgccctttcaggctattttttgttttcctattttgatagagtcatggatacagagaaatatttctcttcaacaagagaactaagagggacaagtatgatgataaacggagagggacccaactacagaataatatggcaaaaggcaggcaaagagactattgagacaagggccagatcttcctgtttttcaagagtatccagaaatctcaaattttttaagaacctgcagattctttgatacaattcacgaaacaaaccagtgcaaagcaaacgcagtacacccattccaatgtaattccaatggcaggcccattccaaccctcagactaccaatatttgaactcaggtttgaatgtcagaatccaatcattggcagtcctgtgccaaagcttaactgataatgtggaattcactactgaacatcatgtttactgctgactaaacaaattgctattggaaagcctcttctctccatcttctgggtataactgcattgtgtagtagccattctggtcttttctgcaccagaaggaacactggagtaagaactcagaggtcatgctcccataggaaatatttcccagtggggaaatactttatagacttgtttctcctaagttcagttgtcccagggt

SEQ ID NO: 114802 - DNA, 1050 bp, Homo sapiens
attctgagaggatgcactgtcccatcagattaattgcactacatagaggtagtgcccagcttccaatccctgccccccaccccagagttctttaattaattgatctgaaatggagcttgggagttgacatttatttgtagttctctagatgattctattgtgcacccatggttgaaaactaccactttacagtttttctagaattgttgttttctggcgccacagtcccccactgttactactttagttgatacctttattagttcagataccccctcttctaggaagccttccctggctttcccctgctaatacagggtcgcagaggtgtagatacgtttccaccttatcacagttactgcatcacaatggaatgcactgttaacatgtctatcttcctcatagaggcttcttgaaggtactgtgtctttatctggcacattctttgcattgcctagaggacagagtctgcattcttggcaggacaaataagagccttagcagccttcgcaagcccctctaccagctttattgcctgctgctctcctggcagaaaccctgtccctctctcaacgtcctaatgccctcagcacttcatccttagtatgcttccctcttccctagctccatcagaattctttacctacttcaaagtaaattgaaagcttagctttcaatctttccgtaaagttagccctattgatccctccctggagtacctgtcactgtcactcatacattaccagcacatgctgtcatgctccaaactaaactggagggttccactaggaccatgtttgatgtatttttgtggcatctggagcaaagttcatcctgcctgagaagtgtaccatttttaatggttttttgtttgtttgtttttgagatggagtctcgctctgtcgcccaggctggagtgcagtgacgcgacctcagctcactgcaacctctgcatcccgtgttcaagggattctcctgcctcaacctcctgagtagctgggactacaggggcccgccaccacgcccagctaatttttgtatttttagtag

SEQ ID NO: 114803 - DNA, 1027 bp, Homo sapiens
ctacctccctgaaagtatattacaaatgttctacaattgtaatatagtgattcacacacaaaaaaatccctattatcagcatacctaaactacacactaaatatttaagaaaaaaaaagtggaaacattagtagcttttatactggaatcttgccatttctttttcaatttagaatagaatttggttgtcttatcttggtactctgtgcttcatgacatatctgaaagcattcttttggcatggatctggaagatagttttagagccagacatcagtgtagtagttctcaagatactgaaaattcataacattcttatgggtataataaaaaatgtttacatattgaattctatgaattctataatataaagtaggagcacacttactatgtgaaatataactcctatgcaatataaaagtaaaattataagcatatttccataaacagtaaaagctattaaatctaagcatgattgacaatttcaaatgttccaatatcatttaggcataatacttcaaagatttcaagccctttttctgctagcattcagaaaagtagaggacaagaaaggatgaagaaaagcttacagtgaaaaaatcttaaaattgagagaattcaatctattaactttaatctataaaccttttttctccgaactgggtacattggcatcattatttgattttagcagcaaacatttgggtttagcttatggaaggcagatgtcctgtgggaacgtgacttgaagtcaccatataacttcccgctaaataaacatctgaactgtaacttgacagctaccaagtgaggtcaagtgtctgaaagtgctgtgtacaccacataagcacgttttccttatgtgaaggatgcatttctagcaatgtgtatcagactttcaagtactcaaaacatacttgctgccaaactttgccacccaccactaacctccatttgatccttagaaggtagaaacttattttacaatagaaaaagagattattttatttgtatgatgtccctaaaat

SEQ ID NO: 114804 - DNA, 1218 bp, Homo sapiens
atatgagtttatttctttagttgtagtgaataaaaataaagttaattacaaaagtaaagcaggtaacacaactatttgaatatgcttaacactattgaactgtacctctaaaaatagttaagatggcacattttattatgtgttttataccataattaaaattttcaaaaataaggcagatataaatattttaatgtcaattcttttgagtggactattctaaatgattatttgcttatcagtctaacttaagcacagttaatcacttttacactgctttgagttagatagctgctccctatcctaaattttactttctaagatgagtaatacagatactcaagttaaccaggatgttagtctgtgggtcagtgatcaggtatctccaagtcaagacattcctcagccgcccctgtggttgtcctgtgaggtggttggtggtgagggtgggcctggggggagacaactgcaacaggaggacctctggattacatacccaagttccctctcaggaatgtggatgctaaaagtgaagtgctgataacaaatctcactggtatgaagtagattttacaagctgcttcagtctcaggctatatctcaatttatggggcggcgtcattgctgaaagttctgtgtaggtcttttaccatagtattgaattttacattcattataatgctttttattatgagctctaattccaagttagttatttttaattcagaaagaaagtaaatatttgctttctggaggtaactgcacttgagtatctgcaaggagagcccctcaagttctgtttttggggatcctccccttttgaaaacactaatcggacctcaaaaccagattttatctttgaggactgacttccgctgcctttttttttttttttttttttttttttttgatagagtctcactctcacccaggccagagtgcagtggcgtgttctcggctcactgtaacctccgcctcccaggttcaagcaattctcttccccagctgcccaagtagctggaattacaggtgcctaccaccacgcccagttaatttttacatttttagtatagacaggtttcaccatcttggccaggctggtcttgaactcctgaccttgtgatctacccccacctcggcctcccaaagtgctgggattacagatgtgagccaccgcgcccggccctccattgccttttgaccatcaacaaaaaaggc

SEQ ID NO: 114805 - DNA, 1008 bp, Homo sapiens
gtgccattgcactccagcctgggcaacaaaagcaaaactccatctcaaaaaaaaaaaaaaaaaaagattctctatctctattccgtatctctatccacacacacaaaaagggacaattggcataaattcctatttttaggcttcccaaagaaaaacacaatcctatgttctgttggctgacaagactaagattaaaaagtgacataaagcgtaggactgcagcctttctatagtttattatttgtctcctgaaaaggaagatatttgtatttcttttaggaacttcactccaacagatttattctaaaacaattcctgactgtgttgaaataatgaggtacagttcactttgagaaaataccctaaagaaaagtcctgatcaatgattctcaaaatttttccggtctcaatatacttatgggataaaaagtcattcttctcagtaattaatagtagctaatataaccctttgcttttgtgtttattgttggtgtagagagagcagaaggagctatgttaatttgtatggcttttaaaaactaaagattattctgatatcccaatattcatttcccccagtcctcaacccttgagtgagatgggccttccccattgaaaatcactgtgtgagttttccaaaaacaattaattataatacgttccatcatggattactttagtgcacttaaaatttgactcaaaattttacaagcattgattttactttcagaaatacgtttgtgggcagatgtgaaattttcctatgggaatatcagtctaccttactgttttggggacatccaagtcttagtgtagaggcgggtggggaaactagattaaatgttgagtgaacttgtctactgtttctaccttgacctctaactctcaggtgagggtggaagtcctctctcctgaatacaggatagggattgtctatagtctgagggaaaggctgctttccactggggtcatttatccatctgtaaaagaggatttttctccccttaa

SEQ ID NO: 114806 - DNA, 1263 bp, Homo sapiens
gggaatgcagctattctagatgtgatatataagagtagggaaactaagttttttttaaaaaaaaaaaaaaaaaaaaaaaaaggaaatatagaaactaggggctaaactagtaacttggcccctccttgggttccttccccacaccaggcttgctgactcttcctccctaactccactgccctctactatggccaccatctgcaccctagtctgggcaacaccatattgatcctaatctacactaacttcctttctagtctccctgccatccgcctaccccacaatccagggtcttgctcttttcttacctactttttttgcacaaaggtagcatgttcttcctaaaactcaactctgggctcattccccacattgcttttggaataaagatcaaacttctcacatggctccagcttgtgcctttctgtcttatttctcactcctcctccccaccctcccacccccagcccaaccccactcccaccctagtgtctgcctggactcttttccccagcttcttcacctgaaacccctccttaccctcaggtcttaccttgcatgtcactttctccaggaaacatctcctacacacacagtacagttaggcagccccattgccagtctccacctcctccagccaactgtgtcatgaaaacagggaccattttgttcagctctccatccctggggacagacagaaatcatctttcgagattccagagagtcttaagttattttataaagtgttgtgaaagtctccactttcatgttaaaaagtactatatgctgcataacatttttcagaaagggttattatggaagggccgagggtcaaagttccaaggtcctgaaagtattacactgcttccctgagcagtgtcagaccagaaaaaccaacaccggactcttgactcagggaaatattgcaccctactgccaatttatgtggttggcttttttatctttttaaacaggcaaagagagctttgccatgcttttcctggaaagattcactgattcaatccttcagctaatatttggtggaatgcctactaaagccatggcatgcaattctgccgtaggacatgaagtcgtgtgtgcctgctgttgaaagcagtgagtgttacatgagagttttctgattgccagctagtttgcttccctgacaggcatttccagatgtgaggaaagatttattttggcactcccagctccaagtggcgtgagcgcacacacacatacacacacacacacacacacaac

SEQ ID NO: 114807 - DNA, 1240 bp, Homo sapiens
aaaattgaactacagaaattggcgtgactgctgtgaatagcaaacttggaaatgctttgggtgagggtacaatactgaacattcaaatgcttccactggataatgcaggtctagcttcataaacccagtgtgagaagtcagattgatttgctagtttgctttttatgcattttctaagatgtttcttcttgttttatgacctcttagaagcactgacctcatatttgccttgagattgaatgctttgcccatcttgctgcacatctgtgatcattaatggtattacttaatgaataagttagcatgtaaatttgcaatgtggaaactgcatcccctgccatcacacttctcagcagctgcttacaattctttcacgttccctccccaaggaaatggttcataacagaattgaacagatgctaggtgtttggcagcattgtgagcgacactggttttcaaaatttaggttatttcatgtcagataattacaatttcaacagcttttaggcctttaatgtgtggcggtgttcacataaatacttaacctctgactccacatttacccctcccaagttcccctaacttatttattggttctgacaacaccactactaaattcttggctctcaaagtcgaatctggtaaacacgcatgggcagatctgacttggcactaaaattgctccttctttctagatgagcttttacagttgttcctgacagcagtcaagtgttgccagaactccaatgtatagtttagtagagtttcccaagtgcctctctcctgggcccctcacttctgacacacacagatctcttctttctcaacctgatgcactgttctgtctcatggaatgctgtgatgccctggacttgtgagctttgagagcaaacactaggtctttctagagctcctgagagtggcatacaataagtgctcaataaatgcatcccacatgagctgaggataattagctaaaaataaggaaaatattgatgcttttgtttgtttgttttgtttttgagagagcctcgctctgtcgcccagactggagtgcagtggtgcgatcttggctcactgcaaccttcgcctcctgagttcaagtgattctcctgcctcagcctcctgagtagttgggattacaggcatgtgccaccacatccagctaatttttgtatttttcgtagagacagggttttgccatgttggtcaggctggtctcgaactcctgacctcgtga

SEQ ID NO: 114808 - DNA, 1038 bp, Homo sapiens
catctgaggggttcttacacccctccaggggctgttaggaaacacagtgaaaatggtttgggcatacagaaaacactctgtgagtgggatgagccaatggaaatgttctcgtgctgcagaacactcagtggtagatgaagggtggtttgtgtatcttaatgactgagtccctgctcatcgatatcccaatcacttgacttcttaacacagtttatctccctacttgaaatgttttacctttccccccattcgaaagttattccacacacattcatgaagcattttacaaatgctgcagcctccctaagactggatgctgataacacttctaaaggggcacagactccataagactgtggatgccgatacacttctcaagaggcaccatttcctttcccctagcaagccttgtatagctctgtcccctcactggatacacagaaaacagtcttgaccgagcatctgccatatgtcttcatgctaccttcccttccttgtccccattgcatgtgtgctctgcgtcatgcagggctgctattgtctagctgaggttgttaattcattcagtattgaggccctccagttagctgtgctaggtgcctaagaaggaagtcacagcactgttaaccatagactccaggtcctacatctccttcctctgcagagtgaggagatgtttgcatctgaaaaggtaaacaggggccagctgagtggtgcaggggacattcgctctggctgcatttatttgtagtaattcctgtttggttcttaagaacacaaacttctggagctaccagttgcagcattgactagctgtgggagaagtcactttggcattcagggcttgtttatggagtggaaataatagtagtgacagtaataaacatgtttgttgtatgtgcctcctgggggacctggaggtgagctcacggggaatcatggctgtgagtgtggtctatgtgaatctataggcattggctaatgtcagtgactactacactctgagattctgctttaatattataaacaccaacttca

SEQ ID NO: 114809 - DNA, 2089 bp, Homo sapiens
gttcctgcagtgttagtcactgggcatatagtaatcaatgtaaaccatcgtgtattactatacttcaagggctgtgacctggaaaatcactgatatgttattccagaatgaataaaagtgaagttgaacttaaggcatatactttaaaagaatggactttttaataatcattgtagcacaaccagaaatttttgctaatgaattatccaattaacttttctgaagcctaaaataattatgctgttatttcttttgcatatgaataacttctgtttgtattgatccttgatgcatttacatctctgcccaaatgatatgacattcctatctagaggggaaggatatttattagcttatacttctctagattgatactactgattcttttaggaaaacagtaattcctgaagttacaaagtcaggctaacagtattcccacaaaacatcttgtaatagcttcatgtgctatagggaatttttttgtttaaaaagtgctccctttctataatcactttttggttgtggaattcctgaaacaatttgttttggttattctgaaaaattctgaatcttccctaatacctttagtaataaaataggacctgataaaaatcacgaagtgtctttgaatctggctgaatatctagacttaatgagtgtttaaggctccatgtcaacctgcaaagatacctggtgaagcacccttatgtacttttctaaaaaaaccctgccctgttccatactttaatcaacgactcaacaacatagaagtcatctacatagtgttttcatacgacataagcccaaaaaggatggcttccactgcatatgcctgtgatcatgattcataatgatttcaataggctgcaatgctggatggaaaccaacatgatgaagttgagcaaggaataagtgtacatttctgcttttagattcaaaaggcaattgcgcaattacaggatggggaacaactgagcttggcagcagttcatgtgactaaaggcttaatgtgaaccaacagtaggaagtggtggctaaaaaagaatgaatgtagccgtgtgcttcctcagtagaaatattaatagtcactgtactctgcgctgaccgcactgcattgggaataatttgtttggttctgagcacattcaggagaggctttgacaaagcagagtagctactaagagggtgttgaatccaatccaagacacatttattagactcctgttttgggcaggcaatgtgctaaccagggcaggcaataaagacacaaagagactttgccagtctctaggctcaaggagttgaaaatttaaatagagagtcagacaggtacacgcatgactataaaacaaagcgccccacgaaaccaagaagcacaaagaaagggttgtgggaattcaggggctgggctagtggtcagatttccacaggaaatgaggacgagagcagaagaagccttaagagcaaagagacagagacaggaaaacccaaggcatgtctagggaatgctgagaagtctgggttgcctggcagaatagggtaggcctgcgtaggaaatgaagctgaaaaaagaaggtttgggccagagcgtgaggacattgactggtaggcagtgggaggcattacaggttggtgagcatctgaaaaaaaataatgatatatgaggatctgttggagaaatgatgcatattgagtctatagaaaagaagaccgaagtcccctggtaaacgtatctcagacttgctttgggttcctccagaagcaaaaatttatctcaaagggaaagggttaaaaggaatgagattttagatttctaagcagttttttttgtttgtttgtttaatcaaagctgcccatggtgaagacttaccttagaagattgtgagcaccattgtggtgggactcagagaaagtttggtaactgacactctaaacagagttgggggagaaatgctgcagcttcaccaactggcctgggcattctagggattacccatggcctttgcaatgtgtaattatccatggttgaggtttttttctttcttctttgacttaagacatccattagtatgtcattttctgaataaag

SEQ ID NO: 114810 - DNA, 1158 bp, Homo sapiens
acccctgaaatctattcaggataagtgaagtttgctataagggactgtccacaattttcttgtataatttttgggattcctaaatactccttgaaaaaaaacattggaatatgaagctgagaagaaactatgcacgtaagtattacaaaactaaagtagaatgtgcagaaacaactccctcctagagaaggaagaaagctacaaaagtgttatgccactacttgtggaatatatcagcaattattcaattccattgctgcccttggacctgggggcaaaaatgtagcttttcctgttccaagggaagaatgttctgttacaatggtaaccagaaacagggaagccgaccaattctagagtttactccgacagtgttttcactctatgcagtaacactgctttattgtttggctctggtagctgagagaacaatctcccactccctaggtgagactattcttttataggaactattcttttagataaaacaaccaatgagcttttaaatgctgagaaaactaatcagaactgaaagggggtgccgttggccacagctcaagaaatatgctgactaagataaaagccccttctgaatttttctccatcccatcttcctttgctttctcatctcccttccttttctctacgttttctcttttctctttctcctcttgtcattctctcagctctatctccacaatcttccctttctcctctcctcagccccagctctatcaccaaagatttcattttgcacactctttttactggccaaagtgtggacctgaattttttaaatgtattttcttatatagtagataagattcacatctctggatttaatttaaaaaatagacaaagtggtggctcatgcctgtaatctcagcactttgggaggtccaggcgggcggatcacctgaggtcaggagtgcgagaccagacaggccaacgtggcgaaaccccgtctctactaaaaatacaaaaattagccaagcgtggtggtgggcacctgtaatcccagctacttgggaggctgaggcaggagaatcacttgaacctgggaggcagaggttgcagtaagctgagatcatgccactgcactccagcctgggcaacagagcgagactccgtctcaaagaaaaagaaaagaaaagaaac

SEQ ID NO: 114811 - DNA, 1396 bp, Homo sapiens
gtgggcctctgagaagtgaatttcggagctgccccttctgagagtttccggcgacctcgctgagagtgagaggaagtccctgcggtgggccctctggcaaaccacatactgggaagatcgcgggactgtgttaagctgtcatgagagtcaattgaatggtcaagaccagcgtagacagaaataaagcttgaccactcagaggccgccatgggctgcttacccgggagaggcagtctccaccccaaaggttaagccaaagggcgctagaagttctttgatgttagaagtagcagtggtggaagttgtgcctcagtttcctctcattgcttccgaattaaagttcatcctcaaaggacgactgtagccagagaaaagggattgtctgcttagtcctatcagaccgaggatacagtgatttagttgactttttctgccactaataatactgtcttcgccactgatttttttctacttaacaatctttcaaaagagaatgtttctcttttgcttttctacacttcattttcttttcttgtttgtttgtttttgtttttagagacggagtctcgctctgtcccccaggctggagtgcagtagcgtgatctctgctccctgcaacctccgcttcccaggttcgagcaattctcctgcctcagcctctcgggtagctgggattacaggcatgctccaccacgcccggcatttttttttttttttttttttttttgtattttttgtatttttagtagagacggggtccccatgttggccaggctggtcccgaactcctgacctcaggtgatccacctgcctcagcctcccaaagtactgggattataggcgtgagccaccgcgcccggccctgcacttagttttcttaaggaacactagagcttgaagaaaaagacgtgttgacaagttttaagggtcaaatttaaaaatcagtttccctgataaagtatgtgccatcacacgtggcaaatctgtaaggaacacttggtgttttcatgtaatgtaatcttataaggctaagctgtgttataggctaataaaatgtcatttgtgatattataaacagccataatgagaaggaacctttgaccagggtgaaaacccgtgtgaaaatgcttgtgactgtgaattctgcaaaatcgttctccgctcttcatggagatggtttcattctcttcaccaagaatcactgataaaagtaaattgccttctttgctcaaaattccgtgaagtgaacctttctaaaatgtattcccttgttacaatgtccataaaatttctgttcaagtgaaatgacccaatacccaaggtcactatcctcattctgtggtctccactagtgagatgaagcaagttcttgggtatggtggacagcccaagatca

SEQ ID NO: 114812 - DNA, 4731 bp, Homo sapiens
tctataaaggggccagaagaaaatatttttgcacagaaaaacaatatagttctagagagagatttgaagtgactttctttgtgctccctccccacccctcactgcctttcctgggtgagttttttcaccctcctcctcactctcttcctaggatggcagtgtaccctggactcagcagtgggcagctgcctaggacacacggccccatttttcaatctgtaattatgaagtatattgtatttttagagtttgattttcttattaaaaaaacttatattcacatgaatatggtacatattagcactcatccttgctttccttgtaagtttgcccatcttgaaattctaggagggttgagaacaggcgtctttcattagatgcgtgtatgagaaactcattgtggagaaggggtacatctaaaataaaataaaaactgaaacagaacaatcttcttgaatcagcagttgccatcactcttttctttccttctggacctgttccagtggccctggaagaacaatgaaacatcatggggataagtgggaagacaattcaaaacagaagactacttctctagattttgtgtttcaaaaccagagatgggaattgttgaggggagtacactgatacatgttaatgtccaagtcacagattttcagcagacaggagaataaaatccatgccaatgatggaaacttgggaacttggcacattttatgttgtcctttaatacttgactgaatgtatattttatttatccaagaagtcatattaattattataccataagagatctaatttaccatatagacttacagagtaccacatacacatttccaaaacattccctctctgccccctaaaatcccatgaatttggtgcatatttgttgtgacaaatcaattgccaaaagactgtctttataattacctatttgctcaagaaactcccttcctttcctctctcttccatgtgattactgcctaaaatactcaggtgtttgaagcaaagttttaatcttttactttctagaaagcatcttattcagtctccttctgatgcttaactcattgttgaacagaaataggtttggagaaatgattgcttgcttgataagtggttatttatgggtagacttgtagaaaagaaaataagactcaagtgctcacagcagccagcaaatatccacggctctccaccctccattaaacatgctctgggctgtttttctaggaatggtgaagaatttgcactgatattatcagctctctagctagtccttctggtgaccagtgttaatcagcttgatcttaaagtaggtttagggaatactgagtaatgggacagagatttttcacaattatattcctccacagaattatcttcaagccaagtggctcatcttagcaattaactcaaatgcaagaaagttagagaaagtcagcatggataacaagcaaatgaaacatgggtgactcctggcttgtccataaaaagagaggtatagcagtaagaatactctcttggaaatgtgggttcaaatcctgccactgtcatttattagctgtgcaatgccgggcaagttatttaacttctctggtctcttgtttcttcacctataatatagtatcaacaatatctgcattatacaattgtcatggaattaaatgaccattaccatcaatcaaagataggacttagcgagtgagtctttggaccacataaaagttaactcaaaatgtacaaaacacacacacaaatgtgtcattgtaagtgaaagagccatcatggtacttataacaatagtacaatacagtatttctttggatttcaggggggtcttgattctgaaggcaggttgttttcataataaagatgtcatgatgtcttgaattgggctagtttagctaagcccagatcaaatgaagaaaaagaaactagtcaagatcattatctttaccacttgctctggaatgtgtttctcaaatatgtatttagatgaatgcatggctgtcgtaacacactcccacaattacctacataccaaagtaacttcccgtctccccatcaccccagtgcccttttctcccatatattttaaagtgataaggctcaatgtaaacttcctccttcccaaacgtttagggcagttcctgccaaagtgccccattctacaaagtgatttagtactttaaccttgctccagacactctgacatctctgtttagtctctggtgtaaaaaggttcgtctctcatatttcttgaggttggggaaaggaaatggtcacagagtttaggtgagggtgggaaagtgatgccctgctcatttggggttttgtcttccagagttcttcctccattttcctgatgccaccagtattaaggccattgtgtgtgaacagattgcacacatctgtcctgctgttgccctgatgacagtgtactgccttgttcctggtggtctcatttgttttacaagctagggtacctggaacagaggtggtcaagtaactctgtgtgggacttcgatcctcctttaagggaaggacctacatggagatgtgattaatgaatatacctcccttacctttcttggctgaaagaatagcagctgttactttattctctttcaaaggataagggccaatatgcagaggtgagtgaggcctctcatttgatgattgaatctccttctgtgctttttgggaaaaaatgccttgatggttgtcttcagctatttagaattagaaagtatgaagaaaatgttttcatattggtttttactttaaacattttttaaaaacctatgaactttattttctagagtcgacagccctgtagccgtgggtattgggataactttccctatccctctccctatggtgtgagaagggacattaaacctcatcctttgtttgccactttggtttccagtgctctgccttgaccacttagcactctctccgaatagctgtaggtcgagaatagtgggcaggagcatcagagaagagttggcgtgagaacggaacagcaccacaaaatagaaggcgagagggaaaaaagcatctcggaggaagaaaatactgccgcctggtactccctggtacccagagatatccggcgtattgtgcttacactactcgccggttccacagggagagagccggaagaattgcaggctttggtggtgacaagttcaggcactcatgggaaagagagtgggcccctttctgagagaaatcattttgagcacagccaagccaagatattttgagatgtgattcagacctgagaatgaaactgcggggggatgggatacttcggttgggaacagattagcccatttttaacatagttgaaatgttgaagtggtgccatcctaacaaatgaatacttagccccgggtttcgagaaagtggccaaggataaaagaggctaagtgcatggcatcaaagccaaagctggcctccttatctgtgggagctgcagttggttttctcagaggcagaaagtacactgaacctagttacataagacccgagttcaagttcccactccattccacttggtgttaagtcctttaaactgttacttaactgctttataatctgcattataggttgttaaaaataagaacatatgaaatactaagggcttataatgaaaattataagtgatacgattcaaatacgaatgaaattataaattgaaggtcatggcttcaatttccacttaagctaattacctttgtattaagatttttgagcaaacccaaccagttatctggcaatcgtagacaccattttaatcagtactttaccttctaaatatgcaaatatttagagttcacacaaactctaaatatgttcatgtgaacagggccactacctgaatattaaaccaccattagaatctgatactcgtcattgaaatacagcataaccttttaatacatttgtggaaacaccattttaaattgttaaaaaaaaaaaaaactcaattaactgtaattggattacactataattggattttagtgggattggggaggataaagaatgaagaaaagtgaagatacagctaataaaacagaagagctcatattaatatagataatttaatcttttgagagttttttgtcttttccaatagtttttcagcccaaaaagcatggaactgtgttccattagctacagcctttaggaaaaccttaaaagtcatgcctccttttttctctaggatgacaccttgcctgaggcagactttgaagatgttctgaaaatgagggaaagagggatatttagcatgagatgaggcatctcagacctgtgggacaaagtagaggaagacagggtacaagaatgagaactgtgccatgataatttttaaaaattctttgattggatgagatgaaataatagcagagaaactatttgagaaccttataagccaatgtctactttaaatgcaaattgaagatagatcaccaggtgatcagaataatagcttaaattgtacattaaaacatcaaaaaagaatcccaaatacatatataaaataattcttttgaaagaatttaatggcagttaatctgtgtgtgaatcaccagagtgcttgaacttgaggtaaacttagattatcctgccagaaaaatgttttaagtatttatttacacacacatgcacacaggcacactcacacacgcactactcacactcatagcttcccca

SEQ ID NO: 114813 - DNA, 1033 bp, Homo sapiens
gcagatacaaataccttttaccattagaagataaaagctcactttaacctcacttgaatataagagctttgttgcctaaaatattaaaagggaaacagacactcttggttaaataatatttcccaaacatttctccagatggtgtcaattcactcctgttgtaattccctaacgcttctgcttaggatctgtaaaacaaaccaaacaaaaccccaacctagtagaagactggattttacacatataagtctccctttgttttttttccccttgtaataatttttaagactatttttaatatgtaatgcatgcacacattgaaacattcaaaccaaattctttctttaaaaaaaaaaataagcctgaggccaaaatctaactttctttgttcaaaaacaactataactataaataataagcgcctttcaatccaaccagccaactctagcaccatggggctgacgattccagtaagtcagctggccctgtgtgatatcaaaaatgctgatttccagatccttcagatggaaaaagtgctgacttgtacagattgattgtgtttgatttggatttgcattcacaggattttgaagggaaagaaaatgtttctccccaggtctagttggcttagaccaggatgcaaacaaggttgcagtttctgtgcatgctgcaaacagagtctaaggggaatgagttagaggcataagaaagcctgatcaggattgaaaatctgccctggacaatccataaaatgcataaggacccaacggaataaagaaatttgagagttggttggaatagatgaatggggccaatttttttgttgcttgaaattaccagtgctactaactgttcatgaatgtgtccatagtattgacagctggccatggctttgtttgggagtagttgtttcccagtggataagaaacttttccattaacccttggtaaagaaatgaccaagcacttcatatacagcagcactttcttcccctagactctagattcactcaccatcactcaccattattact

SEQ ID NO: 114814 - DNA, 1051 bp, Homo sapiens
tctgaatacaaagtaacagagtaacagtaatcattttagaaaatttgacaataggaaaatataaagaaaaaaataaaaatcacctttaatcctcgttgtgctttttatttttaagtttaaaaccaactatgagaagagaagctttaaagtgcccatccaggccaacgaaacgcttgtgggtgctgtgataaacaatgtgtctgaggccatggagactcttacccgaatcacagaggagctggtcccagttccaggatctgtgaatggagtcaatgccctgggtctagttgtcttctccatgtgcttcggttttgtgattggaaacatgaaggaacaggggcaggccctgagagagttctttgattctcttaacgaagccatcatgagactggtagcagtaataatgtggtatgtatttccattttctatatatgttatatacgagatggttattgccatcaacatgtgttctgtactgaggaaggtgccacgaggcaggatggccaattgcagttatctcactctggtaagcccaggaaaatcaatgaatctctgggcctctagaggccttgaacctatctgcaagcctcttctaataagtttgcttccttgttttcaaaagctgtcacctccttttaccccagtgctgatggaatctcattcctcatttctccattttttatctagtttttcattcaagacataattattgagtgtctactatatgctaagcatatagtgccaggcactgtggatatagcaataaagaaaacatacaaggatattccagatcttacactcttttaagggagacagacaataaacaaacaaatcaatcaaccatatgctttagtcacaggtgctgtggaaaaataaaataaaattgcaggtaactaggagaaggcacaaagtttgccttggatggtgcagaaaggcctctgaggaggtgacgtactttgttaagacctgaatgaacagaggaagcagtcataccaaagtgccagaagaagggtgtttccagtaaagggaaaagcaaacggagaggccccct

SEQ ID NO: 114815 - DNA, 1305 bp, Homo sapiens
tgtgtttggtaatgtgagtttggttgtagtttgctgcacatatgaaacaaacagaagggaaatccaggcagcgaggcctttaagcaaactctaggttatttcaacatgtagaaatcattttgagtctcagtttattgtctgcagaaggaaagctcataaatggcagtagcagcctgtggggaataatgacttcattagaacacctataacctgattgcagtagtacatacatgcacattattaagtttaataatgaatttattttatggacatcttctaattatggcaagtggtactagatttccatttgtactataacatagaattttctcttaaagtaaatttacttaagtaaaaaaggtgatctgaagaataatactaagtaatcttgtaagtggtatgaagatatggaaaggcaataataaaagtggcccttgaataagagaactgactgcaaacctgagacactggtgtagcatcgtgtgcctcttgctttaacttgggaatcaggctctgatgtggaaaatgcttccaaaagtctggatattggtacagtggattccggctgttcaggacacttagcaagggagcaggaggcagagggagtgagtggcatctgaggaccagaaaagtgacccccatgtagtgaaaggagggctggctaggaagacagaggtgggtatcaaaagctctgtatctgccttttcccccaggtctaagagaaaaacattgtgtcctagagcaattctcagtgaggggaaagcccgattctgcaagaatcaggggaaatttatatttacaaaagaaaaaaaagaagtccacagtttctgtaagaaaagaagtccacagtttctgtaagtcctaatggtatcctgggcaggaaagtttggcagtcaactctcttttccctttttcttatcacttggaaatttctgtggactagcttggtggaaaccagactccaaccgtgctggtgttgcttctccccaggtatgcccccgtgggtattctcttcctgattgctgggaagattgtggagatggaagacatgggtgtgattggggggcagcttgccatgtacaccgtgactgtcattgttggcttactcattcacgcagtcatcgtcttgccactcctctacttcttggtaacacggaaaaacccttgggtttttattggagggttgctgcaagcactcatcaccgctctggggacctcttcaaggtatgtatgtatgtgtggaaaatgagtctgaaatgttaccttgaaccagggcccctcaagtagggtgtaggagaagccatt

SEQ ID NO: 114816 - DNA, 1027 bp, Homo sapiens
ttttatgttttgcaagttttcttaatgtctggcttaatacaagacagttggagtttcctgtttctgcagtttcacaactgcttcagtgagttgtgacatcacacatcatgtagtctttgcaaaactccactatacattcatgagaaaatgagactgagagggacaaatgacatcttagtattattatgagaatggcttaaagagaaggctcgttccccactgttgggactctcacttcagtcaaactaataactgaacattcatcatctatatggccttataacctttaatagctactattatgaatattatgtgtctattacgtaatcttgcagttggtagatacggcgaactgaatgttaagaggtgcttcgctggccagttcctaacgtaagttgaaaacttgtgatgctcacgggagcctcgtttttccctcctccccaccctgcctgcagggatcgcctccggaccaccaccaacgtactgggagactccctgggagctgggattgtggagcacttgtcacgacatgaactgaagaacagagatgttgaaatgggtaactcagtgattgaagagaatgaaatgaagaaaccatatcaactgattgcacaggacaatgaaactgagaaacccatcgacagtgaaaccaagatgtagactaacataaagaaacactttcttgagcaccaggtgttaaaaaccattataaaatctttccatctcattacagctcattcgctccagcaagcccgtcatcttccctttcctcccttctgataagactggaaaatagtcctccaaaacacaagggaggattttgggtggccaaagtgtacaattttcatcccacaattgaaatttttaaatcatttcatgttagtcttaccgaataaggtaccaagatcacaaatagtgttgatcagatcttacaagtttatgtggcacacaatcctataaatgtgatttttttatataagttaaagagacaaatagtaggctaaaaacattttaaaatcaacttttg

SEQ ID NO: 114817 - DNA, 1420 bp, Homo sapiens
ttaaggaagaataaaaaagaagaggttcatttttctggctttttttttcacctgaaacactttttctcgagtccaaaatcattccccccgtgaagtctgcttaccaaaacataagacgacttatatatttgaaagaagtcaaatgaatgagctctctaatagaagtccatgagttgagtgggtatttcttatttgaaagtgtttttctttaatcaaaagtccttagaatgagggaaacaaaatatttatttgttttggaatcccacttatcaaatcattcaaaactttcagctggagtggggtttgcttttgttttgtttgtgtccataagagaaatggtagaagatgaatcagtatgaagacactgtcaatgaggttatgagaaaaaaacagcaggggcattagtttcaggcaaggcagctcccaggtttagagattaatttttaccccctaaggaatatccagtcaaagacgctgagtgggagctgtcaggcagtagcagctgtgtttgagtttctggctgaaaatggtgaagaatggacttaattatgctaacaaactgaaaaatctagacatagatcctctgatatacaattagagatatttttatatagaccccaagcattctgtgcataaaagttaacattaggctgtggtgcagtaaccatttaatgtcgaggctctatttcggaaatacactacaaatgttaaagtacgtggctgtcctcttaagacactagtagagcaaagacttaatcatatcaacttaattctgttacacaatatgtgttttttaatatactaaccatttcttatggaaaggtcctgtggggagcccatcctctcgccaagccatcacaggctctgcatacacatgcactcagtgtggactgggaagcattactttgtagatgtattttcaataaagaaaaaaatagttttacattaacatctttgcacgttgttgttattcttctcctcaaagaaaaatacattttccattcatggaaatattacaataagctcagggcagtctctggaaggatcccatgcagcaaggtaaaatcttggcagagccagccacaagaaaataagtaaggacatgctctcctgctcaactccaagaactggagctggaaacaggaggaggtgagcggagcactttgctgtagcaggccatacttccttgtccatgtcagattcaaatttctcagatgaattgaatcatttccatgtcgggattagaaaagtgtgataccaccatgggcccttccgaaaaagtaacttcctgtctgacctccaaattaggtagatttatctctgtgattattaccaccatttgtgaaaagagctaactaagatctcaagggatttccagaaacagccattgtgctggtgctctattcattaagaacagctt

SEQ ID NO: 114818 - DNA, 1345 bp, Homo sapiens
ggagagtgcaggccgcgggccagcggaatctacttgagctcggggattaggagagctccgggctgagcggagcgactgctggtcggtgacaggcctcgcccgggagtggagccgtagctagtggggaggcggaaacaatacaactaacagcaaatgtgccctgatcgtccccatatttacaactttcccggtccgggagtggggaacgtcccagtgaaacaaacaacctcccttcttccccctgtgaccccatgaagggaggaagtagtttcagttagtgagacaaacgtaaatactcagacgcggatccagtggtaattctttctctttctaaaacttgtttggacgttggaaagttcataaagactcattttcttttttaaagaattaaatcgtccacatgaatatttaatacagaaaaacatactgtggtagacactgcacatctccccctccccaagagcttttatcttgttgttttgacagtgtgttgttgcacatggactttttattcaaagacaagtataaagtacttgacaggtttactctgccactttctatttgtatgcgttatgtaagggcagttttaagcgactatacgtaaaacactcaggtacttcctgaccaaaacgtgtaggagcatacaaagaattttaagtgttctgagaattgtgctgagatacgggtaaaaccacttttcttttctttttccaaaaaagaaattaagttatacttaaaatccttgggaggttaaaaaattgtagaaggtgccatccttttatgtcagggcagttcttcttgaggtcccaggattgtcattggctgtttgtgccatgatgtttgactgtgtaatgagagaggtgtcattttaataggttaaatgtatctgtaaatgctggagaaaaatatcagttctaacttgacaagttctagttcatgagtaagttaagtgtttcgagcttgtttatggaggcgttcataatgtaggttggtataagggggaaacaccaatttaaaattcctcagtcaggcaaattgctagaaaagtgtacctgggttacacgttttgatattttgtttcatattcgctgaaggaaaactttcattggttaaaatgaagcagcactgctcagcgaaatcccttgttttactagtgtttgttacattggttcatattttttgtgtcattaaattattgtcactgtagaataagttattttgtggaggttatttttgagtttagcgtcctgattacaataaattgtttcacatttcctgcaaacgtacggataaatgtttaaaagaatgaagttaatatagctgtcacgtactaggcatgttttta

SEQ ID NO: 114819 - DNA, 1556 bp, Homo sapiens
ttgaagctaggtattgctcagtgctgacactgacaccatttgttactttttcaattatctaagttcaaagtgcatttttcttgtctttgagagagaggatacctgtttcttggttgtattttcctggtatgaaaatagagtgggattttagtgtttctggttgatttaaaaggaattttaaactccatgtctcttaaggccatcattgtaattttaaagggtattttatgtgcttagaatattttgcccaaataaattaagtaataaaagtaattttaggtatttgtcttgtgtgtaattttttttttttggtgtaaatctggagtcagttttgttgaattgagttttgtcaagttgcattatgttttaaggcatatttttttctattcccaaagttatatcattaggagagatcattgcttgatgtagcattgccagctaagattttgaggacttatttgccaggagttaagtctgtccccataatatctcatttaatcttttaacatgcccaaaagtagaaacaataattatctacaatgtacagatgaggaacctgaggctggaaaggtttagaaaactgcccatggtcctacaattagtaaatgatcagtctgatttacatttgttcttatggattcaggattctatgtatctagtttcaatgaaattttaatattatcttttgggtgttagttgatgtgatacttgcccagtcacttagtcaagaaaattgtgtacttcaggcaaagaagctgaaatagaattcaggctatatattctgtatttataatacttttaaaaatcaataactctttaccatcttgtgtttaaaacaatttttgttaagcagtctgtgaagcttttagttctttgaagtattttatattgagttgaagatgtttgtcaaagcatctgttgttagaaagacaaagttcagctttagagagtcatttcattcatagaaatgtatatgaccaattgtaggatagtagctagatctataaattagtatgactgatcattttgtaaagtttcagtatttttatagccagagaatgttgatcattatagtcatcaacttgggaggttgtgcgcttattccagaactgttgccagtacatacaaccttataggaattccttttgtgaatacctttaacacatttgaaatagtctttttctcatctttatgacaaatctttattttctggggtgaatttgagttttagatactgtacaacgtcacttgaaacttagtttagggattttttttgtgtctggcactatgttgagtgctttatgtttgtaatatgtagtattattgaatgtttccatgtgacagaaactgtgcgagggaaaaggtttttcagttcctcaaggtattgaaaagttgaatatgaaattgaagttagttgtatgagaaaactgagatatagaatgattacgtgactagcccaaggtcacacaactaataagttcaagacagtggagaaaggatttcagagttgatactttacccataagccttaaccacgatactgtgtatcatgattt

SEQ ID NO: 114820 - DNA, 1057 bp, Homo sapiens
ggagctgctgagatgacactcacggagctgagacatacggtccagtccttggagatccatctggacttgataagaaatctgaaggccagcttctggagaacagcctgagggaggtggagacctgctatgccctgcaggtagagcagctcaacagaatcctgctgcacctggagtcagagctggcacagacccaggcagaggggcagcaccaggcccaggagtacgagaccatgctgaacatcaaggtcaagctggaggctgagagcgccacctgccaccgcctgcttgaagatggcaagaacttcagtcttgatgatgccctggacagcagcaactccatgcaaactatccaaaagaccaccacccgctggatagtggatggcagagtggtgtctgagaccagtgacaccaaagttctgagacattaagtcagcagaagcagggtaccctttggggagcaggaggcccataaaatgttcagaggtcattgggggaaaataggctattcagttaaaatagttatctgatgactgaaatttttttaatatgtcaggtgtattgaggtataatttatacagtaaaactcagtcttttgggtgtgcagtttgatgagttttgacaaacatacacagtcttaaaaccaccaccacaatcagaatatttccattacccccaaaagttcccatgtatccctttgtaatcagtttcctgctcctactgcagcccgaggcaactagatctggtttctgtctctatagtttttccttttctagaacataaaaatggaatcatatatagccttttatgtcttttttttaaatttagcagaaagcttctgagattcattcatgttctatgtatcagtagtttgtcaatgactgaagtttaaaattgttaactttggtgaagctcttacgaaagagtattatcaaaaaatagtactttgaacagtggtagatatttctctcagattttggcagctgccttattattgaacattttacttgctcatttttacccctcgacccccaaattttacttacctgtttaaccctca

SEQ ID NO: 114821 - DNA, 1028 bp, Homo sapiens
ttaattcattcagtagattcattgtgtttttcatatagaatacacacttcctatgaatattattaggtcatttaaatgctcccgtttcccactattgtgcctgtggtctctttttactatatatttttaacctcttgatgataaacagttgtggcttttcaaacggtgtatatcatttcgaggtattatatagtaaaattagcatgggatctaaactgctattagccaagtggcatttaggccaattcttaacccaagcccatgtcttcaactgtaaactgaagaggttctcagcttttgagatttcatggactagtcagaacaaagcaagaaagtgcttttctgcagaaataaagtggtaaggatattgtagattggaatgtaaaaagaaaagtaatgtctaggtaagacccattacttagtcttaatatttgaaatgtgaaatacccagtgtgatgtgaacatggtcatgatctcatattcattctcttgtacatcaaacactgagtgattcctatgtcttttctcaggagctattaaggcattgcagatggtgaaataaaagacttcaggccgggcacggtggctcacgcttgtaatcccagcactttgggaggccgaggcgggcggatcacgaagtcaggagatggagaccatcctagctaacacagtgaaacctcgtctctactaaaaatacaaaaaattagccaggcacagtggcgggcgcctgtagttccagctgcttgggaggctgaggcaggagaacggcatgaacccgggaggcagagcttgcagtgagccaagatagcaccactgcactctggcctgggcaaagagcgagactccatctcaaaaaacaaaaaaagaaaaagaaataaaagacttcagcccacccatattatagtctaatacagtttatagacaggtaaacagagattatgttacaatatctaagtgctatgatcaagataaacaaggtgcagttggagcactggtggtaggggtggtcacctaatttagactagtgt

SEQ ID NO: 114822 - DNA, 3762 bp, Homo sapiens
gggactgtctagctataatatctccactttccaaattaggaaactgatgcttacaaagaatgtgacttgctcaagagatgagagaaggaagtcccatgagcaattcagtcaacataattacaatgaatgtatgctctccttaagtttagttagactcctgacctccttgaggtcagggacttaatatgtttatttctttaattctagtaccaagcacagcacccagcatatggcatatgctcgggttttttttgttttgttttgttttgtttttttaataaagaaatgaagttgcgagaggctgattcattagctttagctgtaagtcttctggagggaatccataccaatttcatttacattgcatgattttttttcctttgccttggaataccgcttggcaggggacctagtaagttcctgttcattcttcaagttccagcgtaattccatcttttctttgatgccttccttgtctcttttaggcagaattaattgttcccttttctatccactccctttttttccccagcctttattttagattccagggggtacatgtgcaggtttgttacatgggtaaattgcgagtcgcagggggtttgttgtatagattattttgtgacccaggtaatgagcatagtacctgacaggtagtttttgatctccacccttctcccaccctcaagtaggctttggtgtctcttgtttccttctttgtgtccatctgtggtctatgtttagctcccacttacaagagataacatgcagtatttgatttttttgtttctgtattaatttgcttaagataatggcctccagctgcctccatgttgctgcaaaggacatgatttcatccttttttatggctacatagtattccatggtgtatatgtaccatattttctttatccagtccactgttggtgggcatctaggttgattccatgtctttgctattgtgaatagtgctgtagtgaacatacacatccatgtgtctttatggtagaatgatgtatattgctttgagtatatactcagcagtaggattgctgggttgcatggtccttctaagtccttttttttttttttttttttttttttgagtcggagatttgctcttgttgcccaagctggagtgcaatggcacgatcttggctcactgcaacctctacctcccaggttcaagtgattgtcctgcctcaatctcccaagtagcggggattacaggcgtgcaccaccacacccaactaattttgtatttttagtagagagggggtttccccatgttggtcaggctggtctcgaactcctgacctcaagtgatccacccccctctgcctcccaaagtgctaggattacaggggtgagccactgcacccagccctaagttctttgagaaattgctgaactgttttccacagtggctgaactagtttacattcccaccagcagtgtataagcattcccttttctccattgcctcactagcatctgttattttttgactttttagaatagccattctgactggtgtgcaatggtgtctcattgtggttttgatttgcatttctctaatgattagtgatgttgaacatttttttgatatgcttattggcggtatgtatgttttcttttgagaagtgtctgttcatgtcctttgcccgttttttttttaatagagttgttttctgcttgttactttgtttagattccttacagattctggatactagacctttgttggatgtatcgtttgcaaacatgttcttccattctgtaggttgtctgttcactctgttgatagtttctttggctgtacagaacctctttagtttaattagatccagcttgccaatttttgtttttgttgcagttgcttttgaagtcttcatcatgaaatctttgccagggctgatgtccagaagagtttttcctaggttttcttctagggtttttatagtttaaattttacatttcagtctttaatccatcttgggttgatttttgcatgtggtgaaaggaagaggtccagtttcagtcttgtgcatatggttagccagttattattgaatagagagtcctttccccattgcttgttattttcagctttgtcagagattagatgttttaggtgtgtggctttatttctgggctctcacctgttccatttgtctgtgtatctgtttttgtaccagtactgtgctgttttggttactgtagccttttagtatagtttgaagttggatggtgtgatgcctctggctttgttctttttgcttaggatttctttggctattcgggctcttttttggttccatgtgaattttagaagttttttgtttgtttgttttttggttttttttcctaattctgtgaaaactgtcactggtagtttgataggaacagcaatgaatctgtaaattactttgggcagtatgaccattttaacaatattgattctttctatccatgatcatggaatgtttttccacctgtttttgtaaactctgatttttttttagcagtgttttctaattctcattgtagagatctttcacatccctggttagctgtattcctaggtatcttattcctttgtggctattgtaaatgggattacattcttgatttgactctcagcttggacgtcattggtttatagaaatgctactgatttttgcacttcgttttgtatcctgaaactgtgctgacgtggtttatcagatctaggagttcttgaatagagactgtggggttttctaggaataggatcattatcatctatgaggaaagatagtttgactttctctcttcctattcagatgccttttatttctttctcttgcctgattgctctggctagggcttctagtactatgttgagtaggaatagtgagagagggcatccttgtcttgttccagttcttaaggggaatgctcccagcttttgctcattcaatatgatgttggctgtgggtttgctatagatggctcttactattttgcccctctttttaaactttaatatattagtaatacctattattttcatattgtaattatctacttcctctagcctgggaattctttataggtcggggaggggacagtggtaggctttatctaactcatcttagttattgtcagtctcaagtatgatttctggcacttggtgggtgctcactaaatgtttgggctgaatgaattcatataaacaagctaaaaatagacttgtagataaatgatggagaactttatttaaactttgtcttctctgaattactgtcatttgctttgtgattttaggctacttcttagtttatgagcaccatttctcaaggctgcattctttaagaaatattaatatttgaggagatactacaccatccaaagattgccgctagtattttctaagatgttttttagggaaaaaatttaagaatggagggaagaacctaatcagtgaaagatgtgatcataaataagcagacagatttataggaataaacaggttaagaatttgaatatagaaatatagaaaggaatatattagattaaattatagagtcctaaagtagagtgtaagccagaattatatgtgctcttacacataccacatactgtataggattgtttatgaggttcagttgagataatataaatagaagtgctcgtaagtaggatgtttgtttctgcaaaatgaattttattaaatatttagtgtactgtagataaagtgattcttaagaatttttaaaa

SEQ ID NO: 114823 - DNA, 1012 bp, Homo sapiens
ttaatcttcacaacacccctgcaagactgtaatacatgttcattatggaaaattcagataagcaaaaagaagaaaaataaaagttacgtagataccagaaattaaaataatatttatttataagtttaagactccaagtgaagattaaagttctaaaaggaactaaagttatagcttcgggagtattatatgcattttcccaccttaagtaaagaaaacaaaacattgtgggagtaatatgactgaaactaaaatgtatttacttagaaaagaccagaagaaaatgtcagagcatacagtagttgcattagggtgacaggattataacaggcactttttccttttatctgcagtccacaatatttataatgtgcatatgttacctttacaataaaaatttaaaaaccttagtcttctcagaaatgccactgaggaaaaggtctgaaagttaataataactaaactaaataaatactttacaatttaaatgaaaatcatcaagatggacaaagaataattcacacaagtgaaaaatggtaaatgaacaactgaaaagaataaatcaaatacagctttggtaaaatagtaaacagctttacacaatagtaaaaaaacatgcagctaagcaggtatctatcttttccaaaaggaagtattttagagctaacaaccaatgctgacaaggcacagcaaaaccaatatatttgttcatttctggtagtagtatgcatccttttgaaaggtaatgtgattaacacaaagattcataaatatttaatggcaatagaatacaaaaatactatacacactccatctgtcactatgtaacatgtttacatgctgaaagacaatcttttggggaaaaaactcttttttgaggataaagagatgagattaccgagtgctttagtgtttgcttaaacattctttaagtcttcttaacttaaaaaaagcaaataaccaaagttaactttacatatgatagccctctatcaagtaagtaaaccacatt

SEQ ID NO: 114824 - DNA, 1025 bp, Homo sapiens
ttccttcatttcttcctttagactgcacagttgcacttgcagtaaacccttcctcttgaatccctacccaaagatattttgaaaaggatctagtaactaatggggcaataagcagcactatcatcatgggcaccttaggctcagaatttgtcatgttttaactgtttctctgtctttgctcccatgtcatcttcagttgttgggtccaacttgcacatcttttccatatacctttattgttcttcctgtctttatcctagttcacttcatacctagattattatagtagcctgtgaagctggtctcttttcggcttaagtatttccagccgtggagagtatacctcaatgaaaatattgctgtagcaatttgtacctctttactctataatttattttttatcttacctttttttagtggtggagtaagaaggtaaaggtaaagggagatataggagctgatactattgtgtttcagtactggtgatctattgctaaataattatataagcttgcatactgacccaactcttctagaagggagagtgttaacaaaactaggagagagattgtagccaaggtttaaaatggatatatttatgggagaagcctgcttagtgaattgtgttttagggtaggaattctgaatgagtaagcatgtctgctctttttctaatatctgttaagtttggggctattttattccatgtcttttatcttcccttttagaaatccctcagttgaattaagaggaaaaaagatcatttaaaaaaatatctagactagcattgtatgaatgaagactgcagaaatctgtagaaacccgctagaaattggtcagttagtaaggtgtatccccttgatagcaatttctcatatggaggatgtagtagggaggtcatagcatctggagagctttttcctaagtgacagtcatcacattctgagatggcatcccacttatcacctttctccctttgagaatcagttttaatgagtcattattactaagggaatgtgttttat

SEQ ID NO: 114825 - DNA, 1074 bp, Homo sapiens
catgtttgtgcttttctctattgattatgggaaattgttaagacaaaaatcgcattcactgtatagcagctggtttatcctgtggttcttctctttgcaggcaaacttactaagtaaatggaccagaataaattattttcataatctattattattaaaccctgtattagtcagaatgggatataatctcagttatttaatacaactagggtttattcttgctcacattacttatccaacagtttgtcaggaaatagatctactccatacagtagctccagaaaccacactgatggaatttctgacagtgtatatctgtacacctggaacattagtcctccacggtgaccaccacatggaaataaagagctagaaggtcttctgttggccgttaaatatttcagccatgaaatgacacccaggtcattcaggcactcacaacctagtaaccagaactagttaccttaccctactggtaagtgtctgggacatgtgggaagcacaggttgtttggtgaactgtaaatgtgtctgtcacatattgtacttcatctcaagaaatatgcgtagcctttaaacctatggataatggccattgttgccataattctgcctattaaattgtactaaaaaagtgttacaggccgagtatctctaatccaaaaatctgaaatccaaaatgatccaaaatccaaaactttttgagtgcctacgtggtgccacaagtagaaaattccacacctgacctcatgacaggttgcagtcaaaactttaatgcgcaaaagtattagagatattgtataaaattacctctgggctatgtgtatggggtgtatatgaaacataaatgaattttgtgtttagacttgggtcccatctacaagatatctcattacgtatatgcacatgtgccaaaatttgaaaatccgaaatttgaaacacttctggttccaagaattgacactcaacctgaatcactttcagtgacaaacagtggctttcctcttatatattgactatttctcacataatccatttttatttattactttcaaaactatataataaatgtaaa

SEQ ID NO: 114826 - DNA, 1127 bp, Homo sapiens
tgcacttttgagtgaatgaattcctgttttaaagtggttaaggattatatttgcaagttccaagttatctgtattctactaattgtcctatagatgacattgttataatttgttcactcacattgttgctttccactaagatctgttattattatctttaggattttcttatttgttaacatgattgcttaagtgattaatcaaactaaatcagataacatagaactcaatgaatatagctcttaactttggataacagctattttcctcttgaactaatatccaaatttttgatctttaaatgttacaactgcagtaagcatggaatattattgaaataaatttaaatataactgtttaataaattattaattatggatgattaataaaatgtttagtgtgttactgaatgtttcttgagaaaattttatatcagtttaaatagttttgtagcttgtcagcattacagaattttttatttttttattgtgtcattaagtgtagtggttaagaacataggcctggagtaagatttgaattcatattctgattgtggtctttattagctgtgtgaacttaggcaaattactgtaacctctttgaaaaggcttccatttctataatagtttgccagctggtttggtcaggaacactgtattgtcttgtgtataggtgtatccacaatgtctggtaccttgtaggtactcactaaatttttaatgaaatgaatgataactgctttggatgattgccatgaaaattaaatgatgatatgaatgtaaagcagctagtaatgtacatagctgacactaactgctgttattatcaacagtgacagaaaatctccagtctagctaatacaagaaatagatttttcctcagactctcatctcacattcccttttaagatttccttgtcctatccccaccccagacgtttccattttgcttttattttctataataattcctgggggcctctattaaaggcctttttctttgactacttacatccattataccagtatctttgtcagtaaaattttatatatcttttattctgtcatcaggttaagaaacaataattgtatttttaaaggaaaatattttacgatgctactaagcag

SEQ ID NO: 114827 - DNA, 1045 bp, Homo sapiens
aatactttaaaacactcttttctagtatatcatatctccaaatttaatatttattgtcttttacacttattttacatacattaattcattactttttttttttttgagatggattttcactcttgttgcccaggctggtgtgcaatggcgtgatctcggcgcactgcaacctccgcctcctgggttcaagtgattctcctgcttttgcctcctgagtagctgggattacaggcatgtaccaccacaccggctaattttgtattttagtagagacggggtttcaccatgtttgccaggttggtctcgaactcccgacctcaggtgatccatccacctcggcctcccaaagttctggtattaaaggcatgagccaccgcgcccagccagttcattaatttttaaaataactctgaggtaggcactattatcctcactttatatttgaggaaaccctcaaagagactaagtaaataacttaaagtctttcaactagtacgtggcagaattataattaaaaacctgtttttgccactattgcatattgttagaaggctgtttcttcttgaggctgagctaagagaacatatatccatcctacgtaacttacagttcccattgtctgttcatttgcctatattctactcacatttcctgctttccattcttacttatttctgtccaactagaccaagaacataatattctataccctgtctcccaaacttctaagtcatggatttgttttaacctcctgctatgctcatttagctaggtatcatttatgaatattttcttctcattttcgtacccattctcaagtctaattcattgatgactcagtcacgtcagtagtttctccattaccatggcaataccttcctgaatatgagaataaacatatatcctgacttaattcctttggctcactctgtgaattctttaccacttttgaacactgtaaatgtacctttgagaacttctttgttgccagtttgatttaaaaacaaaacaaaaaaatgttactgactgttccagttatctgttg

SEQ ID NO: 114828 - DNA, 1050 bp, Homo sapiens
atttgttagggatctattcagagtttctatttcttgttgagtctgttctggtaatttgtcttttgaagaatttcctttttttttaatataagttgtgtaatttgttggcttaaagttaatattcccttttaattctttctttttttatttttttgaaaaggagtctcactctgtcacccaggctggagtgcagtggtgtgatctcggctcactgcagcctctgcctcctaggctcaagtgatcttcccacctaaccctcctgagaaactaagaccacaggtgcatgccaccatgcctggctaatttttgtattttctatagagacgaggtttttccttgttgcccaggttgctctcgaactcctggactcaaatgatctgcccaccttggcctggaaagtgctgggattataggcatgagccatcacaccgggccttcccttttaatttctaaagtattggtagtgatttcctctccttcatttctgattttggtaatttgtgtctgttctctcttactttcctgatcattctatttaagacattgtcaattttgttgattattttttaagaactaatttttgaattcattcgtatgtctctggttttttttttttttgtttatttttacttttatctttatttttttcttcttcctgtttttgattttgtttacactttttctagtttcttaaggtatggaagcataaatactgattcgaggctgttctttctaatatgggcatttaaagctataaatattcctataaaactgctttagctgtatcccatgaagtttaatatgttgtgatttcattttcatgcagttttaagtatttaatttctctcatgatttcttctttgacccattgattttctcagatttctttcggttatgggttttaattttattcttttgttgtcagggaacaccctttatatgatttgttgtaaatttaatgagatttatttcatggtccagcatgtgatcaattttggagaatgttcttgtatgcttaaaaggcattgagtattctgtggtctttgggtg

SEQ ID NO: 114829 - DNA, 1910 bp, Homo sapiens
gtcctacaggattttaataccatatttttactgtaccttttctatgtttagatacacaaatactgttgtgttacagttggctacgtatacagtacaataacatgctgtataggtttgtagcctaggagcaataggctataccagtagcaataggtgcgtagtaggctataacatctaggtttgtgtaggtacattctgttatatttgcacagtgatgaaattgcctaatggtacatttctcagaacgtttgtccctgtcattatgtgacccataactgtgtgtagctcagaggtcaaagttatattaggaggatatgcccagaattctcactaccatcccattttaccttccttgtggataaccatttcatgactactttcaagtttatcttgacctaacaagtaagtctgattgattaacctcatcttaatcatgggacaaaaacaagcagactcctcaaagttccatatttaaaatggtgataacgagacttaactcattggattatattgaagattaaatggaaaaaaaaaaaagtaaaacaactagcacagtgcctggcacatagtagatataatttccttttttcccttctgtacctcataatataggctatgtattgcctacaattagggaggctaatcagtttgttcacatatagccttttctttctataaaggagaatttgtgatatattaaacaggcattataaaatattacccagaagttttatcaattttttggctttcagctcctgaaactatagatagcatttatctatagttagtagcactagttttaaaatttggaatcttggtcctctcattcatttatgtattacagcagagtcagacttattttaaaaacaattctaacctgcctgaggcttctgtctagaagtggaatgtattttgggtaagcttcttaaacttcataaaatcaccttctcatttattccttgccttaattaataaaacatgtacttctgctcttaatgaccttcagccatatactcttgacattctaaatttttctaacacccaattttgagaaaatgtattaatagaggactgactaaaggttggcattctctgcattcctctgaatatttcaaattttacttttaggttaaaccataccgttggagatctgtgtgcatggattgcatgattttgacctcttgttaactttgcatttgctggattgtactttcaggatgtgatttttttttttcccaagaaaagagaagaaaaggagaagttgcctaaaacagatctttagtttttttaggaatgctattaaggaccttctccattatgtcatccaacgtctttctgaggacttactagtgaaattactctcagatttctgcatcttggaaatgctgtacttctgaacaactactaattcacttttattttatacacatattttcttctttgccttactaacaaggagacttaagccttattttaggaccaactcttggagtttggagaacaatgtgtgtttctgtgtgccatttttattttcgatatcaaaatgtattgtttgccctgaatctttcccctgtttatttttagtcatatgtatgcatcagaattatctgaagcacttattaaataccagctcccatccctgaaaaccttgggttcagcgggtataatagattgcattaatagcaccggttgtttgccatgtgaccacaccatttaccccctgctcctaaaggggcagattatatttccttgccccctgactttggatttgctcataggacttactttggttttagtgggcgtgacatgaccaaaggcttgaatagcactggcaggattaggcttgtacttttgtgcctctattgtctccaaaagaccatgtccagcctggcccactggttccgggagaa

SEQ ID NO: 114830 - DNA, 1050 bp, Homo sapiens
caatattctattgtatttctgcatcctaacaattaacaattggaaatcaaaaatttgtcaattataataacatcaaaaatgtgaactacttaggaatgaatctgaaaaagtatgtgaaagcaccgtagaccaaaaactagtaaacattgctgagtgaaattaaagaatatctaaattagtggagacatataaattgtttgtagatcataatgctcaatatggttatcagttctcaaattgttacatagattgaatgctatatctatcatattccaagcagctttgtagaaactgacaagatgattctaaaatccatatgtaactataaaaaaaaaaccctagcatcagaacagtttgggaagagggaataaatttgtactaaagcagagatattgattagataattggatatgagtctagtatatgggagaaaagtcagatttagagatacaaatttgggagccagaagcacagaagcactattttaaaatcatgccactgaatgagttcaacagtagagtacggagaggaagataaaaagaaccagaagaggatcctggagtggccagtttagtcagcagaaaaactaggagaatgtgttgttctggaagacaaagaattattcaaggaggagagaatgatcaactttgttgatttctaggtcaaatcatatgaggtgagaggcttgcccactgaatctagcaattttaatgtaattgctaactgtggcaagatatttggtggaatggagaataaaaacacatatggttgtgggttccaagagaaagtaggagaagaattagggatgaatataaacaactgagggaattttgctgtgaaagggaacagaaaaattaagccattgttggagagagatcataggggtcaagataaatggtggggtttttttgtgttttgtttttattggaagtagggacaattatttgcatatatatgttttatgctgattggaattattcaatatgtggaaaaattgatgatgcaggagagaggagaattgctgaaacggtatttttgaatgagttagag

SEQ ID NO: 114831 - DNA, 1029 bp, Homo sapiens
atctgtaattttcattcaatggtttctttccattaattactgagcataagttggaactttcttattagcataaatttaggaaaaattcattgtgttttggtgacctttatcagattttaaattccaaccaactttttaaagtgcttgatgtgactactaactatgcagtgttgcattaaatttctttagtaattgttaaataatcaaattaataatttcaaagagtagaaattagtaatttcacagtgtagcaaatggacaaatatagaatagctagtagtgattatagctttcctatattatttcctgtgccttttcctttcagtgggcttctgctagaaattttgtcagtcattcaccaaaggaaagtaatgttttttcccttagctggcaattagtaaagaatgtacatataaaggtctttaaactgtaaagaaaaaagaggaaatgattaccacaaagacaagatagttaatacccctagaaggaaccagaatgctagccttttggatgatgattctatggatgcttactttataactctgttaaactgtgtgtgtgtgtgtgtgtgtgtgtgtgtgtgtgtgcgcgcgcgcgcgcgcgcgcatgtgtgtgtgtagcagtttaatgtacctttgtgcaataggtcttatatttataataataatgtttggggtgaaggaaattcttagttttaactacccgtataattatacgttaaataattctatttgcaatgttgcattcagacataatgagtaagggaaattatcagtattatgtcatttgaatgtttgacgtttacaactcaaaaacttaagaggttctcttaaaagtgactgactagcaaatacaaccttaaaaagataaatatttaagttttttaaactggaaattacaattccgtttttaatcttagctctatggtttagttgatgtagacttccatttgctgattaatttataaagtaaaagtcacttaatgagagcatatctttgattaatgcgtacattgttaaaatattatct

SEQ ID NO: 114832 - DNA, 1051 bp, Homo sapiens
atttatttgtatattcttaagcttttaaaaaacgttacttgtctactttatgaagagtcagatattgttatttgtttgtatgagcgtactattgattctgaaaaatcttataaacaagaacaaatgagattaatgaattgctacattggaagttagtttgtaaccatgcctttttcgctagtcatttgttaataaaatttaagaaatgaaaagcaaggatgaatataagggagctgaattttattcctagagactagtataatctattatggtccaagtgatgttttggaagttttgtagggttgattgaggtttgttaggaagaggaggaatgccttttaataatttgtcacattgatatttataacttacttttaatcccaaaatacagataagcactaaagagacttctatagtcactcaatttctaataatctgattttattccaaatagtcctgaaccagctgcctcttccatctcctttacctgctacaactacaaagagccttctctttaatgcacgaatagcagaagaggtgaactgccttttggcttgtagggatgacaatttggtttcacagcttgtccatagcctcaaccaggtatcaacagatcacatgtaagtatgatcaattttatatctactataagtgaaaagttttggccttactaagagaatccgtattcctggttttatttcagaaatttttagatacatagtttattttttaaaaatatccatatccgagggagaatatagtcttattgcaataatagattaatgagatttaagtaggcaatatttatttttagataataattctgacccatgtagctctatggatattttttcagctcttttgaacttatcttgggggatccatcatttgtgcagagatctggtcatgaaactatatccctgtctgggcgcggtggcttacacctgtaatcccagcactttgggaggccgaggcaggtggatcacgagatcaagagattgagaccatcctggccaacatggtgaaaccccatctctactaaaaatacaaa

SEQ ID NO: 114833 - DNA, 1047 bp, Homo sapiens
atttttgataattatatttctcccagggatagcatatttgaaaattcataactgttgggtcagccacagtggctcacacctgtaatcccagcactttgggaggccgaggcgggcagaccatctgaggtcaggagttagagaccagcctggccaacatggtgaaaccctgtctctactaaaaatacaaaaattagctgggcgtggtggcaggcacctgtaatcccagctactcgggaggctgaggcaagagaatcacttgaacctgggagacggaggttgcagtgagctgagattgtaccattgcactccagcctgggggacaagagtgagacttcgtctcaaaaaaaaaaaaaaaaaattcatattgttggccataccagtgtgatttacttttatatgataagtcttcttaagaatcagtcaccattttaatttttgatacttattttctcaatgccagagagttgaaagataaccttggcagtgatgacccagaaggtgacataccagtcttgttgcaggccgtcctggcaaggagtcctaatgttttcagggagaaaagcatgcagaacagatatgtacaaagtggtgagtttcttaataactgaattcccatatcaaacttgttttatacatatttaaatccaggtgtcttctttaacaagctggcctatcaggaatgcgatgtttatgccttcagtcaagccaagaacaagaaggaaactaaactgataagattcttgtagtttaatatgtaactaaattccttgagaattagacaaagctttaagtgtattttgttaaatatgttggaatatatcagtttactcagcttaaaaatttttttgttttagaaaatcagaattaatttgaaataagtctttcattaattaaataaatatttgcaaagcttttgaacatgtacattgtagcaggtatatagagttttaatactgattgtgattatattcatggttttctagtaattgatttaatactcctgttgccttagcaacagaaaaattggttaagtattattattaaaga

SEQ ID NO: 114834 - DNA, 1026 bp, Homo sapiens
gataaaaacccggcttctgaaagagagaaaaacttccagagtaactatttgtaggttagatacatatcccacaagtgttgtcaaggtgagaagttatttagattgccggggaaagagaacagggagataggtgattgatctagataactagctttttttcttctgactcttgagattagatagataaatagtagatgaactttagatagaaatggaaaactttaaaacaaataacctcactaatatattattcaccaaaagcttgaacttctgtcatgaagttgttttctaactagttttgaagggtaagtgcattgtcagtctatcttgatttttagattaattattagaatttgaagtttgttctaaagtgtatataatttgccacatagaatttaaatacaaaggcataatggtatattacaattcagacttagacaaatcttgttttaaatcttcaggtttgttaactacataaccttgggcaaatttcttaacctctgtaggcttcatgttccatttctgaaaaattttaaagataatactcaagaatgttgtaaaaatcaagtgaattgatatgtaaagcacctttcacaactctgacacaaaatgttagactaacatttatagttaattgctcccatatcatctttatcacactagagtcaataaataaagttgtatgtttatatataacatttaaaatacattaaccttgctaactgaaagtccagatttatgtatcatggaaaaagactgaaagcttaattgaaggcagttctaggtttaagttctgtctgtaaaaaaacttttatcttgaccaatttttacaatttcttacaagtttttaaatattttatagtttagtgataagaaatgtatacattattcagatgcagttatactattatttctgaagcatatcaatgcactttttccttcatgtctgaaggagaatttttgtctgaaggcttattaactaggataatttttccatctgattatttttaacactttcctgtttca

SEQ ID NO: 114835 - DNA, 1644 bp, Homo sapiens
ccagtttttgaagtaagtaaaggctctagtaattgtaaattgaccacttgctttttgttatcatcccagtagtattcatgtaagatagtctctaggattaaattgttatttttgtgtaatttaacaaaagcgtacttattcttactttaatcaggatatatctgttttcccagatagtccatgaaagaacagagatggtcatacccaaaatatttgtgttgtatcatctttagaagcaatgaactttttacccctataaagctaaatatgtatactttataggcacaaaaatatagaaataatactggtctgaaaaattgaatactcatacttagattcaaacctagattttagattaactactagcaagctaaacaactgtgtgggacaagtttttaagctttcttttcatctttcgtaaataagtagcttggattatataatttcttatttttttctagtattactatattgtcacttattaatatttctatcacattgtaagaaaatgtgaaaccaccacaactgttacttctatcgaattatttttctaggctcaagaccacctttaatcctacaatctcagtctctaccttgttcatcacctcgagatgttccaccagatatcttgctagattctccagaaagaaaacaaaagaagcagaagaaaatgaaattaggcaaggatgaaaaagagcagagtgagaaagcggcaatgtatgatataattagttctccatccaaggactctactaaacttacattaagactttctcgtgtaaggtcttcagacatggaccagcaagaggatatgatttctggtgtggaaaatagcaatgtttcagaaaatgatattccttttaatgtgcagtacccaggacagacttcaaaaacacccattactccacaagatataaaccgcccactaaatgctgctcaatgtttgtcgcagcaagaacaaacagcattccttccagcaaatcaagtgcctgttttacaacagaacacttcagttgctgcaaaacaaccccagacttctgtggtacagaatcaacaacagatatcacaacagggacctatatatgatgaagtggaattggatgcattggctgaaattgagcgaatagagagagaatcagctattgaaagggagcgcttctcaaaagaagttcaagataaaggtaaaataatctcattattaccacttcatcatctgggcaaatatgtaattatagtgtcaaaaatttttttcacattacttttttcccgaatattttgtataatttatgtctactcaagtacatatttttattactaatactcataatgcagaagttaaattcgtaacaatttcatttattgtctgaaacaactatatgagatttggtaattctctactacaggtctgttactcattatgtactatatgattttacttatttgtgcttttctgctaaaatgaacattagcatttctatataacatgtatatttcacaagttacattaatattgttgtgcaccttcaaatttttttctgctaaaacaaggttaaccactgtagaattattttgaacaggtacacttaagaaaagctcatgtgtatgcttattaggcagttagatatttcacttggtttatgatcc

SEQ ID NO: 114836 - DNA, 1038 bp, Homo sapiens
gcttaccattgtgttacagttgcctacagtattcagtatagtaacatgctgtacaggtttatagcctgggagcaataagctataccatatagcctaggtacatagtaggctatatcatctaggtttatgtgaatatactatatgatgttcacgtaacagagacacctcctaacaatgcatttcgcagaatgtatcctgttgttaagcaatacatgaaatacatgaccgcatttgaaaacttttggaacttagatgccacctaacccttttgatttgaacttggcatattgcattcagtttctgcattgtgtgatgggatggtatttgttatataagaagttaccttgagattttgagatgattaaaggtgtgtatattggtccaagggtgtaggtgaggtcataaataaaagcaaaattcttctgaagtggtggttttagagcccttaagagatgaaatacttccttgaaattaatttgtcccagttaccattatttttacttattaaagactaaatgttaaagtggacatttaatatattcaaacatttggcactgaggacttttttacaactgttgtattactactggtgatatggagcaggcaggactatttgtctggcctactagttgcactttaggatatgagtttgtttgccaatatattcgtttactgtgagagaaatattccactcaataaccagaaatcaaaaacactgtaccttataagtaagattagaaagttcaacaaatgtagaatatttgtggaattcaagtaaagggatagaataatcttaagaaatgttttacctaggctgtggtagaccctattgtacccttgttccgcagaagaaagacatttttctagccgctaggtatttatgtccctttgtcctgttctctcttctttgagcagttctgtatatacgttgataaggcaactttgtaacctaatattttataatattccaaaaggacccttttctcaatctttttgctcatacttttagtgtctctaattacataaattaattttaaa

SEQ ID NO: 114837 - DNA, 3418 bp, Homo sapiens
tgatagatttgactggacaactgaaggagcagaaggacttagttttacaaaatataactaacaaatatcttaagtaaattgcggttatatttgattagattttaaactggcaagaactgctacttcccactttaaaaagaaaacagtggaactttgctatatagaagaagcattaccattaggaaaaaaaaatcacaacttggttctctaacaataaggagccatttttcagttgtcagtttgacttttaaccttgtgataccatcttccttatatgatatatcacattagtgaatattgcaagagaatctagagattgccttgttaaaataaataacagtgacttttaaaacatactcaagcaattcagcaaataaacaaaaggaagccaaacctcaaggtgctataatgtaaccattcccaagacctaactggagatttaatttatagaaaatgactagctccctcttaagtcagaaatggaatcatacacagaaatatatagatgttaaaaataccttcacattttattgtaatggtgaatttgtgtttgtgtgtgtgtttgtctttacatttcataatactgtaaattatttctttctgagaccagaatggatcccagaacattataactttatatcgaagagtaggaactgtttccttcagtggaagttgcttaagacaggattctaatttatacctattgctccctgattttaaattttctatacctatgaaatctgttgcttccttattttaaatttacttctatctaacattgtggttaacttttaaactcctttcacacttttaacacttcaaagaatttgaattattgattaaagttaaatgacaaattattaaattctttttttaaattcattttttcccaatggcatggtatatattttctttcttttttttccatacttatcttagatacagtaaaaacttatatttcctgtttggtatattggcagatttggagctctttatggtttttggctaacagttaaaagtaacctgagtgagactttatgatttgtaactggttgctttattattaggaaaagaatctgatttatccgtgacatctatgaacataaatatatgtttgtatttggtacattataagttctattcattttatattcttacacttatttatatccttaaagagtatgcagttaaattctttttactatatttattgagatctctcaagcatatttcttcaaaccttacctttcaaagtattgtgtcattcatgcttactattttatgtgtacatatttgcatttgcattttactccattttaaaaacataaccttaaaaagataaacaacgtccatagggtttttaataagataagaatacatgtctattactgatattgatatttatctttaaatttcagataagcctttgaaaaaaagaaaacaagattcttacccacaggaggctgggggtgctacaggaggtaatagaccagcttctcaggagacgggttctacgggaaatgggtcaaggccagcattaatggttagcattgatcttcatcaggcaggaagagtggactctcaggcttctataactcaggattcagactccataaaaaagcctgaagaaatcaaacaatgtaatgatgcacctgtttctgttcttcaggaagatattgttggaagtcttaaatctacaccagaaaaccatcctgagacacctaaaaaaaagtctgatcctgagctttcaaagagtgaaatgaaacaaagtgaaagtagattagcagaatctaaaccaaatgaaaaccgattggtggagacaaaatcaagtgaaaataagttagaaactaaagttgagacccaaacagaagaacttaaacagaatgagagcagaacaactgaatgcaaacaaaacgagagcaccatagttgagcctaaacaaaatgaaaatagactgtctgacacaaaaccaaatgacaacaaacaaaataatggcagatcagaaacaacaaaatcaaggcctgaaaccccaaagcaaaagggtgaaagccggcctgagactccaaaacaaaagagtgatgggcatcctgaaaccccaaaacagaagggtgatggaaggcctgaaactccaaagcaaaaaggtgagagccgccctgaaactccaaagcaaaaaaatgaagggcgacctgaaacaccaaaacacaggcatgacaataggagggattctggaaagccatctacagagaaaaaacctgaagtgtctaaacataaacaagatactaaatctgactcacctcggttaaaatcagaacgagctgaagccttaaagcagagacctgatgggcgatctgtttctgagtcactaagacgtgaccatgataataaacaaaaatcagatgacaggggtgaatcagagcgacatcgaggggatcagtctagggttcgaagaccagaaacattgagatcctctagtagaaatgaacatggcattaaatctgatagttcaaaaactgataaactagaacgaaaacacaggcatgaatcaggggactcaagggaaagaccatcttctggggaacaaaaatcaagacctgacagtcctcgtgttaaacaaggagattctaataaatcaagatctgataaacttggttttaaatcaccaactagtaaagatgacaaaaggacagagggtaacaagagtaaagtagacactaataaagcacaccctgacaataaggcagaatttccaagttatttgttggggggcaggtctggtgcgttgaaaaattttgtcattccgaaaatcaagagggataaagatggcaatgttactcaggagacaaagaaaatggaaatgaaaggagagccgaaagacaaagtagaaaaaataggattagttgaagatctaaataaaggagctaagcctgtagttgtgctacaaaaactgtctttggatgatgttcagaaacttattaaagatagagaggacaaatcaagaagttcccttaaacctatcaagaataaaccatcaaagtcaaataaaggtaagaatacttctactgatgtcatttataatataatcgattttaagtgttaagattactaagttttaaaaaggaaatttacaaaaattagaaagctactacatgaaaatataacatttatgtcaaacaacaggaaatttttttcaggagtatagataaaaagtttccagtgaatttttttttccccacagtttttttcttcccacccactactcaaggtagttatgaatgttactgctatttggttacacagagataagttattttgctgtttagttatttcttatatttctgaaatatgcttaagtgaatgttgtattaaaatagctgtctttaaaaactctctatttaaaaatgtcttacaatactacatt

SEQ ID NO: 114838 - DNA, 1940 bp, Homo sapiens
atagagaaggaggaggagtggtaagtgtcttccaacacttctcacttgtattgaggggtaacattagattcaaactacttcagacctacacaaaacaaaatttatgtactaccaagaatgtcaagtgtacctcttaccacaaatccacttgctaatgtcagtgaatctctagtttcagaaagtttttagtcagtgcaaattgaaggcattatatcaaaaatgtattatataattacccttcatttttatggtggtgtcatgtttttaaagtcattacataattatatgtatatatgtacacatacatatatattaactatattgtcactttagggttaagagtattatagttgtgttttattaaaataaacagttgatttagaaaacaaatactaatatttttattatgctaacttagttaaaattttccttttatcttcagatttacattttttttttaaatttacctttcattaataggtagtatagatcaatcagtgttaaaagaattaccccctgaactcctggcagaaattgagtccaccatgccactttgtgaacgtgtgaaaatgaacaaacgcaagcgtagcacagttaatgaaaagccaaaatatgctgaaatcagttcagatgaagataatgatagtgatgaagcttttgaatgtaagtatcacagaactctttgttattattttagagtttaaaagcaggttgatgtgtttttctcatttataatttgggggtttagcaaaagcacagtcaccttaattcttaataacacagtatagtaagtttttttctctatactttaaaaatgcgtgaaagatgagatcagttggcaccaagaaaaaaatattaaataagctacaattaattttaaaacacaggtaggtatgtgtctgtatgcattcagcaaacatttattgagctcctattatatgctagacactgagagtaaaaatgcaaataagatatggcccctgtcttcaaagagccttcagtctaatgggggaaatatgtaaataaataattgcagtatgctgataaaagtacaatgataacagtaaatccagggtgctatgggaacacattggattggcatcaaaatcagagtgggggctcagggaatgcttactggaagaggtgacacttgagttgagtcttgaaggacacgtaggagatagccagatgaagaaatatttaaaaccatactatcactaaattatgaatggattagccacattgcagattatctgtgtggtttggacctggcttctcctttttgcccagctgtgtcctggaattcctcccttgtttcactgttttccagagctggcttcttcactacacagctacctctctacaacactgtgatcacctgtctttgcactagacttgctatacctcgcctgtcttcctactggtccactgaaaaagttcttctcttttatccctatcttccttcttctggagcaagagaattgagcctagccaagaggggtcagcaaccttgtttgacttaaacggcattcagtggaaacagactatgggagatcttcacttgtgtgccaactgacttagtcataatgaccaaaagaagtgggaagaccaccagtgttctactttttccacctagtgtccatagattgaggtgtgacaagcaagggcaggaaggacagatgcatgctgccatttttaaatgtatattgctgatggaagcccttcacctcctccaaagtttttaatgttaatttactgatttttttttaattgtgagctcttgagctatgagcagtagactatgaatactgaacaaatctgaaaaaagttttaaaattgaaataaaatatacagcaaacttaacatttaatcatgtataattgttataattgtattatgaaatgtattgacacacagtatattaaaatggctaaagttaa

SEQ ID NO: 114839 - DNA, 1108 bp, Homo sapiens
attcttttccccttgctttctatcatgaaagctattgtctcatcttatggaggcacatagcttcgttataaagccatggaccctgttatatctatgcccaactatatcgaaaggtaatatttattttaaagaacctaagcttcacacactgctagaagaaaggaaagtttctctggatttttaaagagatgtcaggagtagcttcctgtttttcttcacttatttctatacaagtaactatagaaaagtggacactggaggcaccgatttgaatggtgaaagaagtccaaatgattgttcacataaacaaccaaatggtcacaccacaacagaaacagtgtattgaaaatatagcacaatacaaaatgtgaaactattatgagaacgttaagttgcaagcattatgctgctgagagagagaaaaaaaaatttttgaaacttagcagtttaatcaaattggtttctcaaaatctaaaaccaaggaaatagttttgttgaaggttaggggaaaatgttgaaggataattttgaaagttggggtacacagatttggatggccatagcacaaatataaggtcactgggtgcctggggaaaatggagagaggggtgatgtaagaagctcaagagatacataggtgaaatttggaaagagaagatagagaacacccaagtcatgttttacgtacctctcttttgagtcctttcccctcccctgcttattccagggtaatgagagaaatggagaaagaataagctaaccacaatgagttggtatcctaataacctcattataacacaatgtgttatggaagttgttttttttttaatttgtcaccccatttttatctaaattgtctaaaatttgatgaatgtgaaataaagatttacaagatctgtggatagttaccaccaatacagcatattctatgtaattacaaaccactataagattcttcaagcattttctactcataggattgaatgcttgaaacagatttgttatgaaattaattaaaatgtacaaagactaaagcaggtcatattcaaggttgtaaaatactaatttctggcgcagtagctcatgcctgtaataccaacactttggg

SEQ ID NO: 114840 - DNA, 2679 bp, Homo sapiens
aattcatacctaattatgaagaaaatctcagatatttatatccatttacatttgtgctttacatgaacctttttgctatccaagcctgtgactgtaaagaagaggaaacaaaatgaccttttcctgccatgttgtccatagattagctagaagagtccagaaccagaaaccaacctagattcttgaacaggagtagttagggtagcatttaagaataagattagacagagtatagacatttattacccacacatgaagacactggcacaagcatagagtgcctgggccagaggttggcatccttacatctaagccaagtaggggacttaagcaaaacatttgtcttaagtatttgtgtatttatcatagttagggattcagaaaagagcagttgctagtcaaataacagactagaaagtttatcattgtcagcaacaagtgatcacaacaacaaccagtatatgatttcaaggtaggacacatcacttctctgccctggttttaacttggtggtacctactgcatcctagaacagacatggtaaatatttgtcacttatagtgccccccagctcttactgcagacatttctaatcagtctttcttgctgaactatgatgctttctcagggcttggggttattttcagcataatgttctaggcagctattgccagttgatgagagttgatgtgttagatgaaatctgtttgccaggtctgcctaaaggctcctgtcagtacgggtgattttagcagaatgctaaaatgatggggaaaagattgaaggtaacatacataatcatgcttatgaagcgtgcataagcttagaaacttttcttgggtttaagcaagacttttgttgaagaactgaattcattatgtgagtatttacaactgtacaggttttttctgtctcagtaggcttgtcatgttaggtcaccagggcttatggaatttatcgctgagttgtgggtttaacttagctattaattgatgatgtacatggttacccatattctgtaacactttctcaaaagttgacttttcctccaaaccctgctccccatcagtaatctaagtgctttaaggtggttctgtttttcatctaattcctaaatatagtttgttttacagcctcaattaatcttgaagtttaggtataacccttactgacttactgaataactgtccttgaagtgaacactgtagtttaatttcaagaaccttcctctctgtatttattagcagtaaacactgagttcatgtaaagatctttaaatctgggtagattgtgctaaaattagtgatactttttctatatcataacttaaacttctggatagacaaaatcactgaatttcctagaccctatggaatgaagatttttttccccatgtgattcatttgtaaagtacaagttttaatcatctttttaaatgaggtaaattatttgtcatggggatttgcttctagcctctaggaaacgacataaaaaagatgatgataaagcttgggaatatgaagagcgtgacagaagaagctctggggatcataggagaagtggccactctcatgaaggaagaaggagttcaggtggtggtcgttatcgaaaccgaagtccgtcagattctgacatggaagattattctcctcctcccagccttagtgagggtaattcatcagtgtcaacggatttcttacataaaccaatttaaatttagggctttaactttgaagaatattttatatctttttatgagttaataactaattttcaattaagacaaaaatacttagtttctatgtgcagtgattatcgtttaagtctttaacgttcaggaaaaaaactagaaacaaaaatggaattattttaagttgtcagtcctgcatttcagtacttctttttgttcgttttagttgctaggaaaatgaagaaaaaagaaaaacagaagaaaaggaaagcatatgaaccaaaactaacacctgaaggtaacacgttagtttatttaatttgtctttattcatattcttcagcttcacatgtctacttgtaatgtgagaataatgaatatatttttctctcttgcagaaatgatggactcttcaacttttaagagattcacagcctcaatagagaatattttggataatttggaagatatggattttactgcgtttggtaaaatcaacttaaaatacatttacacatactctaagtgtcttaactgtatcctctagagtaactcagttactctagtgatgtgtcctaccttgaaatcatatactggttgttgttgtgatcacttgttgctgacaatgataaactttctagtctgttatttgactagcaactgctcttttctgaatccctaactatgataaatacacaaatacttaaggcttaactcagttactctagaggatacagaggcatactctgtgctatcaagaaacttgaaatctagttgtaaagtcaaatctagtctgttaccaagaaattaaaaactttagtacaaaactcaagtatatattaatcaagtctggatagtatctaaagaatcatgagtaagtgagagtaatttaaaaagtctttatgcaggtgaggaggcttgaaaaggccctgtataatgaaggtactgataggagcatatatgcagaaataagcatctattcttctgtt

SEQ ID NO: 114841 - DNA, 1046 bp, Homo sapiens
tcatgtattacttttacaatgacataaagattacatctataaatattaaaatgtttataaaaacactgcttgcaatgtatagagctattcttaacaatcttatgccaccttcagctggtaaagtaagtatttgttttgtgagaattacttgcctgagtatcattgtgtttgctgattatttagaatgtcagtttcatcttttttaaaactttacagttctgtgctgagaaattgtcttctgtatcatttagggtccaaaagtacaaagggcactctcaaaataggataatatgaggaggagttatttacaaagagaccagttaaaaagatggaggcaaaataataccagaacccagggttaacagccttaaaccaaaagagtgaggatacagaaaagtcaccagaactcattctgcaggaaaaaaagttgtagagtaggctgccttgaaagaagcaataccttttggtcaggggacagagccagcctgaggagaccttgtaagcaaagagtaagagatataaatactttgaccttacactcctctttgatcttctaacagggcaccctactggccaaacccaaacaaaagccagagggcatgggagactcttgatgtagtccattcaggtcagcctcctgaggcagagaatgtggttgagaaagagtcaagagtatatctaaagtagtaaagataagatatctatctcatcttcccatttcagtcataaatctgacttcaatttctgtcctttttcattcagggtttacttgaggtttatatatagaggcgtcttaggttatttgtttagtttgcatgtctaaaaattttattagaaagttaagcttgacattttgaactattttatttacctaaactttgtttgtgtttgtttggcttgattttgcaggtgatgatgatgaaattcctcaggaactgctcttaggaaaacatcagcttaatgaacttggcagtgaatctgctaaaataaaagcaatgggtataatggataaggtatctcaccaaagtaaaatttataaatttact

SEQ ID NO: 114842 - DNA, 1004 bp, Homo sapiens
gtgttaggaatgattgtcaattttagtactaagtaagattttaccctttgtcattaatttttgctttgttatcacagcagcaagcagaatttataaagtctttaaactatcataatgtttatacccaaaacacaaaattaatttatatgcagttaaagtcataagctaaatcttaaattcggataaagcacacaaaggatataaagataattataactttgtcagtagggtgtcatctagtggtgaaatgaggtagagtatatcacgtttgaaaacattgaaacacaaatcgtgctcaaagtagtatcagtatttgtacctcattctggatattcttaaaagaattaacacacatcataacacttttccaccagtgaaaatcaaatcataattttaatgtatattttaaacctataaatgtgtttatttccatttcattaacaatactgttttacagaataacgatactgaagaagaagaaaggttatggagagaccttattatggagagagttacaaaatcagcggatgcttgtcttacaactatcaacattatgacatcccctaacatgccaaaagctgtgtacattgaggatgtaattgaaagagttatacagtacactaaatttcatttgcagaatacactttatcctcagtatgatcctgtttacagattagatcctcatggaggttagttcgtataatatcaaaattattgtaaatttttgccatgttagatgagtcaaaataggacttaaaatggcaccaaaatttttgaatcatataacttgtaataaacactgattttgattatggatttgactagaatatagtacttgttcaattataatttctttaggaacatttatatataatagaagttatttctacttgtcagggaaaatctcagaaaatactaccttctggtttcatttatcacttcgccctaattttacccaaaatagcagttgtctacaaaatggattgattcaagataaatactcc

SEQ ID NO: 114843 - DNA, 1042 bp, Homo sapiens
gctcactcaataataagaccagcactatattatcaagaatttttcctgttaagagtatgttatatctaaatcgaagaaataaaacttcaggagttttaaaaagacattttatcaggagacaaacaaatgtagtgtaaattccaaactctaaattctttgaaagatgggttatattttcatgcagatattaaatgtttgttatttctttatattcctgtgacatttgtaaactcaaaaagtagagattagaggactgatagctatgatacaatgtacctgttgtatatgctaacgtgctttgaggatgaagggaaacagagaaaagaatagatgctgattaggtggggaaaagaaaaaatgctttcttagtgttttccagtaagcttatgaatgtattggaatttagtaagatagaatgttactgaaatcaactaaaggtgtatactacttactcttcttttttaaacaggtttcatctatgggaataacaccattttttgtggaaaatgtcagtgaactacagttgtgtgccattaagttagtcactgcagtaagtataatcaatttgtatttttagttaccccacaaataaaacaatattgatgtcatttaatccaaatttccaaaaaataatgaagatacctggttttcagtacattcatttcaatctaaggactattttactaagtcttattagactttattaattgaggatttatttttctgtttggttaatttgttgggttattctgtttttgtcacatttaaaacacttccaaatatttgcaaatatttcagctaataattccttgatatttataataaagttagaatggtttaaaatcatttaaattcttgtctgactgcctatagccaagatttcatagtcctttaaatgaaactagtgtactctttgacttctataagaatgttataattaatgataggaaaatagagcagcttaccttagatactgaaaacattttcattctaaatggcaggtaattttttaaatcacatgatattattttttggtttgttt

SEQ ID NO: 114844 - DNA, 2075 bp, Homo sapiens
agttaattttggaagaaatttttacttcacttgcaagattaccaaccagcaagaggagtttaaggaacttcaggtaattaattataacagaggtcaagtttaatgaagaaccaccattatattgaaccgtcatacatttattcttcatttctgtctgatttatattttaataattaaaaactaggcagttacatcagaacagcatgaaaaatagatgtgtgaaataacatggcatatttagggggcttagaaaacttcactgattctcaagggtaaagatctgtggcagggtttttcagtgttggcactgttgacattttaggccatataacactttgttatgcatagctgtctagtggaatacagcatgctcagcggcatccctgacctctacccattaggtaccaatagacacccttcctccttccagttgtgacaaccaaaattatttccaggcactggagagcaaaatcattccttaatatgaaccactagtcagtgagaagatcttgttcatcctgttggaaatatggctcaaaataatcagatcagttcaaagaggattttataagatttttgtgtctcaaaaaaaaaaataaaaaacagaaagattaatggcagtatggagaataaacatggggattaaatgctctttaatcactaagcacactgttaataaggagtgttacccactgctatggtcagcattattgtctttgccatcatagataatcaccggaattatcttaatattcctgagtgattaaaagtgttgacgtggcatataggattgtttttaagattgctttgaaggcttctttcttctctaaaataattattttatcttaatcattttttggactaattgtatactgataaacatttattgtctgttaaacctgaagaaaaactatgaagaaaaactatcaacacataaaagaatccttagattttttacaatatctatagaacaaaagatgtggaaattgattttttataatctgtgctaccaacactagcatagatgatcaagagctgtgtagcagattttaataccaaatgaataacagattcagcagatgaatagcaaaatatatgggcatttggaaactttgaagacttttatcattttcaaaatcattttgagaaatgtttagtagtagtatgaatttttatctgcaatgtatgtaaagcatacaaatttgtattaaatactgtatttttcctttgactattttaattatctcagcatgcataggcatttacttgatgtttttgctaacttacaacaaataattacacataagaacacaataagcactaagatcatgcctagaaatattggcaaacacagtatcgtgaaactttcagacaatagatgacatttaaatgagattatcttgatactccatacaaattttttttcttcattaaaggttaaacagtagtgatatggatggagaacctatgtatattcagatggttacagcactggttttacaacttattcagtgtgtggtacacttaccatcatcagagaaggactctaatgcagaagaagattcaaataaaaaagtaaggaatctattaaaggttttacaactgtacttttattgaaggaaatacctatattctctgtcattcttataaaactgaagttctttttttttctttcttttttttgagacggagtctcgctctgtcacccaggctggagtgcagtggcgcgatctcggctcactgcaacctctgcctcccgggttcaagtgattctcctgcctcagcctgctgagtagctgggattacaggcacgcaccaccacgcccggctaatttatgtatttttagtagagacgggttttcgccatgttggtcaggctggtctcgaactcatgatccaccctcctcagcctcccaaagtgctggggttacaggtgggagccactgcgcctggccaaagctgatgttcttaattagaggttcatggctgggctttaaggtccttttagagcactagacatggtgttggaagagttgagttctggttctgttgtatctatcagtcataaaacatat

SEQ ID NO: 114845 - DNA, 1266 bp, Homo sapiens
tccgtctgcaatcccagcacctcgggaggccgaggctggcggatcactcgcggttaggagctggagaccagcccagccaacacagcgaaaccccgtctccaccaaaaaaatacgaaaaccagtcaggcgtggcggtgcgctcctgcaatcgcagctctcggcaagctgaggcaggagaatcaggcagggaggttgcagtgagccgagatggcagcagtaccgtccagcttcggctcggcatcagagggagaccgtggaaagagagggagagggagaccgtggagagggagagggagagggagaaggagagggagagggagggagagcttaatctttaaatttctgatgaaggctttgaatttttttttttgattgtatggattatatgtttcttaaactttgaggttgacatattttttctaaattctttttttattttcaatccatttctttctgttctgaccaggattatgataaacaactattgatattaaatttgttaaccacatatgttactcttacattattttaataacactctatctgtatttttatttgtttctataaagttttaaaatatgcttagtgtgctaattttggcttctcttattatatataatgtaatagtttaagcattttagtatttaaatatattacccctcttcagtaataacatgacaatagcaacagggctaacttattatttcttgtatctttataaactcactttttttcattctagattgaccaggatgttgtcattactaactcttatgaaacagctatgcgaacagcccaaaacttcctctccatcttccttaaaaagtgagtaaaattaatataaatctggtttttcttttccacagtatagagaatagttcatttttttaaaaagatgaatccaatttcctgccataatctgaaccttgaatacatcttcctgacacttggtttcttgatctttaaaatgaggcaattggagtattaaaaatctaaaattgggatgggactacacgggggaaaaaaatctaaaattttgtgaatttgcttatatgttagactccagaaattaaagtactagattgaaattctgtaatttgtcttcagtaaattttggagaattttcctagtgtacctgaataggaaagtttgtgaagagatgttatttagcctccatatgaatttttttttttttttaatgagacagagtttcgctcttgttgcccaggctggagtgcaatggcacgatctcagctaactgcaacc

SEQ ID NO: 114846 - DNA, 2027 bp, Homo sapiens
gcctgtagtcccagctacttgagaggctgaggcaggagaatcgctggaacccgggaggtggagggttgccgtaagccaagatcatgccactgcactccagcctgggtgacagggtgagactccatctcaaaaaaataaagaatttatggtgatcttttaggtagaaaaacagtgatcatttttttaaatgtgtttcacttgcgagaaagtagtattagtattgcttaataaatgaattccctataattaaggagaaagtggagtttgtgaaatagactcattttaaaccatattttatttaatgtacatttatatattttgttactaaacatagaaaaaagaaaacttagctaacaatttcaatcatgttggtagacagatgactgacatgtgtcacctaaattgacatccttttcattatttgcctttgaacagatgtggtagtaagcaaggtgaagaagattacagaccactgtttgaaaattttgttcaagaccttctttcaacagtcaataagcctgaatggccagctgctgaactactccttagtttgttagggagactgttggtaagagtatagcatttaaagattattagattactagaagacaacataatgaggatgtactctgattcacagatgatgaattctttaaaaatgtgtaaggaaatatgaacattgcatctctttttgcatgtgcataactgtacacaatattgtcagtaccttgtagaaaattttcaaatgttgtgaagtttggtgctttcatttcattacataagataacagtgctttaacaatttttttttttttggaaatgttatattgttaaaagcatctcaacactgagtcataagttactcatttcaaagcaagaaaatgattaatatagactccttatcatctttaagagtatttctacaaatgtatggcattttgtagtcgtcatgtaacacagtaggtaaatgcaaagaaatgttgtgactctatttttaaactacatttgaacttgcacaatacacattgttacaaagcttctgggacctttttgtgaatgggaaaatatgttaatattattcggaaactataataacttttcataggcatcagaattccaccctaagaaattcttactcagtaataccacattttgtgcaaataatacagttgagcctgcatatttaatgagttgtgttgttcttaaggaagtttaatctgtaatttttttagtcacatgaaaatgttcagattccagaaaatcaaaaggcaaaaatgactttatgggacaatatcacaggaaaaaaaaaagtttaaattttaaattatacaatttagattgggaatttatatgataaattgctatttaaaatatattgttataaatctattcaatcaaaaactattttgatatttaggttcatcagttcagtaacaagtcaacagagatggctttaagagtggcatctcttgattaccttggaactgttgctgcacggctaagaaaagatgctgttacaagcaaaatggatcaaggatctatagaacgcattttaaaacaggtactaagataaaagattaaaattatgggaatgaataatagttattttctttgcatgtccttacattagttttgcatttcattttgtgtggattcaaaataagatttttacttctaaaagtgggcttttcaaagccccagtgagaaattttaagacctgagaatgaattatttagtctaacagggacttctgaatggttcatataaatcatttactttctttttgtgaagtactcttaataatgtataatgctgttttatatttgatttaacataaattttatttaagtttttaatttactgaatggtgatttagcatacacaataagattgttttgtacttttgaatgttttgtatcttctcataccaaggaggtgtgaggagagcttttttatactttattacattagagagttttcatcttgggggaaaaagtgttttattgcttttttttttttaatgtggat

SEQ ID NO: 114847 - DNA, 1024 bp, Homo sapiens
tacacctgtaatctcagaagggtggattatttgaggtcaggagttcgagatcagcttagccaacatggtgaaaccctgtctctactaaaaatacaaaaattagccaggcatggtggaccatgcctgtagtcccagctactagggaggctgaggtaggagaattgcttgaacccaggaggcaaagattgcagtgagccgagatagtgccactggactccagcctgggcgacagagtgaaactccatctcaaaaaaagtaaaacaaaaaaggcaaacttcagctatcaatatataatatttttcggaaataatatttttctgttttttccttttagttactgtggttgtattttcatttttaatatcagtttttccttcagatttgtgtttacaattaggtgatttattaaagcacaccagtaatatcttttttgttcttatttggtttattctataggtttcaggaggggaagatgaaatccaacaattacaaaaagcattgcttgattacttggatgaaaacactgagactgatccttcactagtggtaggattcttttcccctgttttggagatactacatgtttatttaaattgggtttaagaaaattgggaggtagcatgatgaagaggaaaacttaagttgtttggaatattgattttcaaaacaaagggatacttgataatctaaacagaaaagaatgctttgggttgatttgtcttatatggaattctggttacagatactgtactgtactaaaattgtgtgacaagagaaatatttggaagtctctccgtaagtgatctttgaggctaggctaggtcattggttctcagagtgagtatgggccgagtggtacatgagatgatctataagcctgtaaaaataaactattggatttttatatgtatatttttaaatataattttacttctatttcatgtatgttacacaatgtaaccaaaatattagtataagaggttcatgtacaaaatttataaactattatttgagaacattatac

SEQ ID NO: 114848 - DNA, 1421 bp, Homo sapiens
gcaaaatttgaaaacagatgaagtcttctaccttcagcattttatcaatttgttttaaactttcctagttgacccatcatctgtttaactttgtcatgatgttgtccttgattaagtagttgataatagtattctatatttaatacagttgtgtttatcaaattatcttgacttcattaatataagtattggaacatagtaaaataataagttttctaacatttaggatattctatattttctggctttcttaaaatctgtttttatcacatggaagttgttttaaagtaaactttaatatttgtattcctgtaatgtgagcactctaactttattaacttggaaatcttgttgctaatttcatcaagctcaagtctgtctaatttctttccagttttctcgtaaattctatatagcccagtggtttcgagacacaactctggaaacagaaaaagcaatgaaatcacaaaaagatgaagaatcatctgaaggaacacatcatgcaaaggaaattgagacaactggccaaattatgcatcgagctgaaaaccgaaaaaagtttcttagaagcattatcaaaaccacaccttctcagtttagcacattaaagtaagatccaaggagaaaacagtttacatttatctccttgatatctatttccctaagttacaaaaaaagaaaaataaatttttaatgactttttgttgcaggatgaactctgatactgtggactatgatgatgcttgcttgattgttcgatacttggcctccatgaggccgtttgcccagagctttgatatttatttgacacaggtaaactggataagaattccttatacagtgatattgatttttctgattctggatgcttgtgagcagtatataatatcattcattgttgagtacagatacttaaaagatcatagatgtagtatttgtttttaggttctccggccgggtgtagtggctcacgcctgtaatcccaacactttgggaagccaaggcaagtggatcacctgaggtcaagagttcgagaccaacctgaccaacatggtgaaaccccgtctctactaaaaatacaaaaattagcggggcgtggtggcacatgcctgtaatcccagctactcgggaggctgaggccggagaattgcttgaacctgggaggtggaagttgcagtgagccgagatcgtgccattgcactccagcctgggcaacaagagggaaactccatctcaaacaaaaaaagaaagtccttgttctacatcccttttacatattcttgttttacaaatatatatttgtatgaatgcacacacatacagtatcagtagagtaagtgacattataaaaacatccaactaaatcccagcactttgggaagccaaggcgggcagattacgaggtcaggagatcaagaccg

SEQ ID NO: 114849 - DNA, 1032 bp, Homo sapiens
gcaggagaatcgcttgaacccgggagatggaggttgcagggagccgagattgcgccactgcactccagcctgggcgacagagcgagactccatcccaaaaaataaagtaataaaatacaaaacattcaactaccaaattatgatttgaatgatactaaatatctttgattcaagttacacatagcaaggttttaatggggctacaggttctgcaaatgaagcaaaacaattaaaaaacaggtttaattggataaacgaaaggctccaaagtatggactatacacttaacacctgtactgatttttaagttaaactttgaatcattaggaaagatcctttactcatttatatacagattaaagagaggtaaataatagatttgttttcttttgcatgttttcatgctatttttaattaaattttatgtattctaaaatttacaaaaatgtcaatgtttgcttggcagatcctacgagttcttggtgaaaatgcaattgctgttcgaacaaaagccatgaagtgtttgtctgaggttgttgctgtagaccccagtattctagcaagggtaaagagcaaaaatgattctttcttttctactcgaattggaatattcactctatttaggtataaattgtttttttctcttcatttttctttagcttgatatgcaacgaggtgttcatggacgattgatggataattcgactagtgtccgagaagcagcagtagaattactaggtcgatttgtcctttgtcgacctcagcttgctgaacagtattatgatatgctgattgaaagaatattggtatgtttgtcatttttataatgattcgtgaatataattttgcctttcaagcatcatgttttgttttaaagtgttaagttagaaaaataaatgtaccaattatatatttatattgtcaaatttatgaactattgccactttctaaacaagtacatattttcaagaatagcccttgcaatatcataaaacaaatcattggtaataattggattccttttttcagttg

SEQ ID NO: 114850 - DNA, 1035 bp, Homo sapiens
gcagtgagctgagatcgcaccattgttaccccagcctgggcgagaagagcaaaactccatcccaaaaaaaaaaaagaagtaaccataagatagtgccaaaggtttgattagattcaggttaaacatttttatgaagtctacttttaagtgatacttcatgtgctgtttaagtgccagacactattctaaagcttatgtttgttttctcatttaattttgacaagcgtatacttctagtcttgtgtccagggcttaactataaaatatgtttctatgtcttagatatcatactttaaaagtaaagacaacataaaaaaataacacatttatagtagcagaaagcatgtaaaaagcaaatatgtcaagtgtgtttatcatgttaacaaatagtgaatatactgcgtatggatacttattttctaatttcatacactaggcatctcaatttttctgactcttaaaaatacctttctgtttttaggatactggtatcagtgtcaggaaaagagtaataaagattctcagagacatttgtattgaacaaccaacatttccaaaaatcacagaaatgtgtgtaaaaatgattcgcagagtcaatgatgaagagggcattaaggtagtgttgactgttttaaatttatttttcattaatgtttaaaataagttaaatgtttattgcacctaaatgttgattttaaatatatccaaacactttacaatgaatcgtttatagtttataaacttaagaaaaatacatactttaattttttttgtttctagatttttatattaagtattataatctgattttaaccaaccaattcctcagtggtaatatttatttaagactggccatagtagctcatgcctataatcccagcactttgggaggccaaggcaggagaatggcttgaggccaggagttggagatcagcctgggcaacatagtaagaatcctatttctataaaaaataaaatgatgaaaataatttttaaaaatttcaccaaacatagtagagcatgcctatagttcca

SEQ ID NO: 114851 - DNA, 1027 bp, Homo sapiens
ctatacttcataaatgtgtacagctattatgtatccataaaaaaaaaattttaagtttagtcctaaattcattagtaaatttacatttatatataataatatgtataattgtcccttttttttaagtttagcaaacactgtaacaacttcttctccaaaagcagtaaatatattttttagtttgatcataaacatttgagtgtatagtatgaagaagttctaggctagggatagtatcacccattcgtattgtttaaaatctttaccaaattgaaaatttttatagttttgagaaattagtagttttagaaaaaactgaggaaattaataccagaaattcctggcagtttgtgttttgattagttatttatagctttgtgttgggcctaatgagaatttggaattgtgaaattgccgtatttgttataattagttaatttgaaatttctcttccttctagaaattagtaaatgaaacattccagaaactctggtttactccaactccacacaatgacaaagaagcaatgacaaggaaaattttaaacattaccgatgtggtaagaaggactggaacaagggtgtggtcactgttgatccagacctaattgaggcctacatgtcttatgaaggaagagacaataatgagatatttcattaatcttgacatttcgtactgctgcctttactttatatttctggagatgctgaagggatgcaagtaacatgtcgttgatgcttccatatagccctacttcttggcattaattgatgtaaacactgatactgagattttcctattcctccagcaattaaaaacagggagggaaaggagaaatggaagaacagatacaatcgcccaagggtaataatctgcaaagatagtaatgcctacttttttcagaaattatgaatatggattagctacattttttattatgcataagctatacattttgtgtttttaatataagaaatttttgccagtcacagcgcatatgcctataatcccagctgctcaggagtct

SEQ ID NO: 114852 - DNA, 1046 bp, Homo sapiens
ataggcactacactccagcctgggcaatataatagcaagatcccttctcaaaaaaaaaaaaagaaaagaaagaaaaattctgtatattcaattacatcatcttctacatttctattgatgtctttaaaatgtgccatctagaagcgtaataagaaaaatatttttgttcttaatgtttaagatattacagattttcctcacagagtgtagttcaagttattgtgccattttaaacttatgccactttaaacatttagtgccatattaaacctcaatacattaaactaatttcttcaatgttttccaagatattttttagaataaagttctgtaacgttggtaaatggttgtgttactgaaaaaatagtttactttaaaaataaacttttgaattgagaaaattgaaacatgtttcaggctaaagcataacaaaagtatattttattcacatttataaatatacttctaactttgattcttttcatcacccttaggttgcagcatgcagagatactggatatgactggtttgagcaactgcttcaaaacgtgagtgttcttttgactcctgataacctaaaatttaataggttagttttttgttgttggtgtttttttttttttggactgtatgatttaaaagaacctttttagttcttttggtagggaaaatttatttcaatatgttaggctggatgattttgttaatttctataattaattcagttgcctggttgtggtttttttttttttttttttttttttgaggtggagtctcgctctctcactctgtcgcccaggctggagtgcagtggcacaatcttggttcacttcaacctctgcctcctgggttcaagcaattctcctgcctcagcctccagagtagctaggattacaggtgtccaccaccacactcggctaatttttgtatttttggtagagacggggttttactatgttggccaggctggtctcaaactcctgacctcaggtgacctgcgtgcctcggcctcccaaagtgctgggattataggcatgagccactgc

SEQ ID NO: 114853 - DNA, 1071 bp, Homo sapiens
gattttgcaaaggataatgcagaaaagaaatctaccgttatgttttataattgccttttaaggtgcaattcagatgcagttattaattatttaaaataattcaactagtattatgtgatactgtgtttttgattggaatagggagaaagggaaggtcatcttttctacatctttcacgtattaccttaggtcttacacagcaatttaagtactttgtagtaaaattgtttgaaagtattggtaaattactggtttataagatatttttaaacatatatatttttgttttattaatttgcactttgagtattaaattgttaatgacaaattgaaaagtatgttacttatggacacttttaatgtgtttatattattattgcctaatgaataattataccgggatttttttttcttttttgtatatatatatgtatatatatatatatatatatgtatatatagttgttgaagtccgaagaggattcctcatataaacctgtgaagaaagcttgtactcaacttgttgataacctagttgagcacattcttaaatatgaggaatctctagctggtaagacattttatatatatattgatctttagttgattttataagatatttttaaatattttgagtaaatttctcatttttgcctctggctctgcttgtctaatgattacttcacttttaaatgaaatacatttttgttatataggtatctgtttgatgttgcatcctagattatattaagattgactaagattatctagagcattgtaataaaagcatgggcctcacctctttcacatatcttttaatagcatattataattttagatgtcatattgaataggagtaaaaatccaggggctaatatgtatctagctaatgatactcatcacaaaactgatatctcctaagtcatataaaattatgtctcaaaatgaaattgttttagctattataaaaatgttttttaaagatttatattacattcctaatatttattatttataattgttacataaagtttgcttaatcttgagctagaaatttattaaaatgtttaa

SEQ ID NO: 114854 - DNA, 1012 bp, Homo sapiens
acctcggcctcccgagtaactgagactacaagtgcacatcaccacaccgggctaattttttatttttctgtagagatgcagtttttgcgtgttgtccaggctgatctcagattcctagactcaaaccttcttcctgtgatggcctcccaaagtgctgggattacaggtgtgagccatcacacacagcccattgattttagataaaaccaatacgacatttattcccaaaagcccattcctaagcttcccaatttccattagtataaaacttgccttctatagagagcatggcctcttgttctttatcttgagtattatttctatatcaaagaaaaaatgagatggagaaagtctagtatcataagaactactaattcattatattgaggcctatactggacctatttaggggataatattaagtaatttaaataatattctgtatagtttccactaccttgtcatattttagtgtcttatttctctgtttgtttttccagactctgacaataaaggtgtgaattctggaagattggtagcttgcataaccactttgttcttattcagcaaaataagaccccagctcatggttaaacatgcaatgactatgcaaccataccttaccactaaatgtagtgtaagtatagagctgtcttattcttgtatcttacataaaacattaagtgctttaaatttagagttcacatgcgtcaaccacattctcactgacagatcaactgtgtcatttacttagatatatgtactatttgtagcaagtgatctataaacatcaagtctgacataaataaagttcaggttccattttgctgtaaactcctcaagccaaaccctcagtagatgcttactaaatgttatagctattgttaagatctcaaaatgaatgaagcagagttcctctctttgagaaatttactatcttttgggtcctgaatttacttttcatttgtctgtcatttataatataataaatataaaaattgatacccattgc

SEQ ID NO: 114855 - DNA, 1640 bp, Homo sapiens
tctactaaaaatacaaaaattagccaggcatggtggtgggcgcctgtaatcccagctactcgggtggctgagtcagggggttgcttgaacccgggaggcagaggttgcagtgagccaagatcatgccactgcactccagcctgggcaacagagcaagactctgtctcaaaaaaaaaaaaagacaattaaaaaattaaccgggtgtggtattatgcgcctgtagtcctagctactcgagagactgtcaggaaaatcgctcaagctcaggagcaggattgcattgagctgtgattgtgccactgcactccaacctgggcaattgagcaagactgtgtttcttagaagtaaagaagccttctgcctggttctgggattctacatgtttatctgtcatagaaaattttaacacagggtttctcaacctcagcactattgacaggactagatgattctttgttgtcaaggattgttctgtgcattgcaggttgttaagcagcatccctggcctctatccactagatgccagtagtggctcccattgtgacaaccaaaaatgtctccagatactgccaaatactcctgtgtcaggatacgggggaagaagcttattcctgattgagaactactgggttaacatacacagtttggaaaatactaatcgtaaaaactgtaccagtctttgtataatgctgtcaatatgtaaatacctttgtttagaattgacttgtgttacattttagggaaaaaatataacattgtgattaagtgaccccaaagtcacattttggtaagttagttgtcggtacatattcctgacatgctggtgcttctccttccataccttgaaaaaaaaactctaacagacttttttttttaactggacctttacgtgcaaaatgccctatttctgcccccaaatacgtaaagctgtatatagtttcttttcaggttttggatattcataaagcattaattttattcttatagacgcaaaatgatttcatggttatctgcaatgttgcaaaaatcctagagctagttgtaccactgatggagcatccaagtgaaacttttcttgccactattgaggaagatctaatgaagctcatcatcaaatatggcatgactgtaagcactcagtttaccatttctttattcattagtgtaaagttctaatgtattttattaaaatttttaaagcaaatatttgtaaaaagctaagtttttaaaatagtatatttttaacttttatctaaacattttctatatcttttaggtagtgcaacattgtgtgagctgtcttggagctgttgtaaataaagtgacacaaaattttaaatttgtgtgggcttgtttcaatagatactatggtaagttcaataccagggttttaaaattattctgctaggtcctgcagggggtcagctcattttaaacacatttgataaaaggctagactcgaggaaattatgaggtgtgattatccaccgtggtcctctcagaaacaatattttctagtgtcttttgtatttcctgaagaacccactgtgattacttcagaaatttatctcctgataagtaaagattggtaaattttttgcgcactgtgaaaagtaaaatttaaattttcttacattagt

SEQ ID NO: 114856 - DNA, 1030 bp, Homo sapiens
gacaagttatatcagttttgtaacagtagcacactgttgacatcaacagctgactttttaaaaaaaatttttttcaatgaaggaaacaatgcactgatttacattccgaaacaagcttctttgtcacagactgatactttgaatgccactgttctaaaataaatggaattggttacttatttttttaataaagttcacacaaattctcattgttttaaggtatttttttcctttatagttgaaaattaatctaagttactgttcatgaacactttaatgtgttttcctccccttaggttaacataaaagataaagtacttgaactattgatgtattttacaaaacactcagatgaagaagtacaaacaaaagctatcattggtctaggtaagtctaaatttctttataatttgtagctatttgagagggatagagcatatttttaaatattgtgaatctaaattgttgatttactttaatatgtttctattagcagtaggatttggtgtatagaatgtaggtctgaggattaaaacaactgggttgcattcttgtcatggccattgacttcctgggtaaccttgagcaagccatttgtctgttcatcagtttcttcattagtaaaatagagataacaatactttcttctacccctcctccatagggtatcttaagaacatttattaaagccctttgataaagaaaaataatatagaagaattctgtgctctttgcatttttttaattgttctttttcattgcaaagctttgtcactacaggaagctgccacatctggttaaaacaatgatcagtctacactgacttatttatataaaagcaaatagtaagcaacccagaaggaacaatttggatatatacctgttttataatgtttttccaggaaggattgatgtaataaaaacatgttttgcaattgttaggcaggtctatgtggcttatatctaggaaggaattagaatatgaggaaataggaggtgaatggcattaaagtacctgaattgaatgcac

SEQ ID NO: 114857 - DNA, 1498 bp, Homo sapiens
ttcagtctggacataatttatacggagtggcaaaactaatagtgttacaagtatttcagagtacaaaaagatgaagttttaacttaagcagcgctattcagaaaatattgcctctagaccagttaataaaagacatcttgcctgggccatagttatcctgagtgaccttgggctagttatctgatcactctatgctttgagtttagtttgttgtttgttaccaataatacttgctatcatcagagatcttcattttttcctcaaataaacattatatacaaataaacatggatgatatattgctacttattaacccgtggttataggattcagcattgtggccttattataatgccatatgaaaaagaaatggaagatatttttagctctggtttattatattgtttcatcaaatgaatatattttaattttttttttaaaataatgtcaatgtagtaccttctgctggggatctgaaaaatgtttgcagacattatttcttaaatcctgaaaacatccctgtgaggtaggtgggtggtaaatattattatccccattttacagatggagaattgaggcacagagagattatgtgactcacccaaggtcacactacaagtcagtggtggagccaggaatagaacccaagactcctgactcctaatccactcccctagccactaggccctgctccctcctcaaggtttcctcttgtgtgaaattctcctttgaaatgcaatttcttgtttttaattcatggggaaagaagtacctgctctaatgcttctctaggtaaggccaccagcatattcttccagtcattttaagttttaattttttgaaataaggagccgtttatataatttattaacatatttattaaatgttttatttaattttaatatgaatatatgatgagatttttcccctctcccataggatttgcctttattcagcatccaagtctaatgttcgagcaagaagtgaagaatctatataataatattttatctgataagaactcctcagtcaatttaaaaatacaagtgttaaaaaacctccagacctacctacaagaagaagatacacgtatgcagcaggcagatagagactgtaagtgaaaatatatttttaaatttcatagctacatttatattataatggctttatcttctttaatctaaatatctaaatttccttatttgttagatgaagaaattcagttaaatagcagtccttatgctgaggtctatagctgggctttagcatattcttaaattctctaaaatagttttaaaattgtatatgtgtgtaaacattaacattttgagggaggaaagagattatagttctcactgggttctcaaaggggcctctgacacagacacacacacacacacacacacactcacacacagattaagaaccattgagccagaacactagctgtaacgttttgtgattttggttatggcctaattttgaaatatttagtaaa

SEQ ID NO: 114858 - DNA, 1736 bp, Homo sapiens
aagtacagtgaatatgactgttatcaactctctgttcctcaaagccacatctgaaatcaactttgaaaaacaattatattttcgtagctttgagtatggaaaacaaattactgtttgccctatattatctttacaaggcaaattcagtcaagctttaaaaactactggattatacatttgtagtctatatcataatcttaaatagatattcttagtgtgagaatgctttatgtttaaagaacctaaaatttacaatgaaattgtttaaattttatcacgtcagtatttttgctggtgctccagtgctttctggatttaagctgaatctcaaaagatctgtcattttaaaaagaacactaaaacatagactttataggaaggcctataaggttaaattcatatatctcagatatatgaaaagttttgacatatgtctaaatagagaatttttactaccatgatatctcgtaatttttttttttatttccagtgtgtgccatatttaattgctatgggcacagacccagaacctgctatgcggaacaaggctgatcagcaacttgtggaaatagacaaaaaatatgctggattcattcatgtatgtattttaacattttataacctaaatttaaacatttttcttgagtaaagcatttctttgataaatgctctgcccacattcataattggaataaaatgtcttacttagtacctatcttctaaacatgcaactaagttagtcttccaaggtgtttattctagtctaaagttaaggttgggctagaggtgacagtaccaagcacaccagactaaaaatcaggaaacctggattttatatcttactatgtgaacttggctgcagtgactctcctgggcctcattttttttttcttctttgaaatgagggaattgtaagagataatctctaatgttccttctagcacttcattctgtgattcgtattattttaattaaaaaaaaacaatgaagctagcctcagaatgtaatgctctaagtatatttttaatttgtgtcttttaatttccctgacaaaaatgagacttttattgatttcagatgaaagcagtggctggtatgaagatgtcttaccaggtacaacaggcaatcaacacatgcctaaaagatcctgtaaggggtttcagacaagacgagtcctctagcgctttgtgttcacacctttactccatgatccgtggaaaccgccaacacagacgagcctttcttatttctttactcaacctctttgatgacacagcagtaagcacaaaaacttattattttaagaaaataagtgctctagaaattttatggataaagtagtcattttttaaatattaccattttattagtatatgatagtaacttcattaagtgttttcttaatcttctaagttatttacaaagtacacagtcagaagtgaaggggaaattttgtatgagaataagtgtaatgaggaataatgtataattttgcctccatactgaatatcctataaactttgataacagtttctgtaagcgtatctttaaataagcaacatcactaaactaatcgctttgggaaccgattacctcaaatattgttagagaataactgttctaggtttttggctattgagatccctagttgttcaacttgatttcccttaatgaagggaagtcacttttctgtatagtagtccacttttgtgtatagtagtcctcccttatcatta

SEQ ID NO: 114859 - DNA, 1548 bp, Homo sapiens
ccagcctgaccaacatggtgaaaccccatctctactaaaaatataaaaattagccgggcgtggtggcacgcgcctgtaatcccagctactcaggaggctgaggcaggagaattgcttgaacccaggaggcagaggttgcagtgagctgagatcacgccactgcattccagcctggccgacagagcgagactccgtctcaaaaaaaaaaaaaaaaaaagaacaaaagaaatactttaattacttgttagcctgacagcagatttttgcaataaagcaaaattataattaccatagtgcagatatcttactagacctcttcaagtactacatgaaatttatcatcaacattatcatcatatcattatcagtattaagtttgcattgtgtataggacactatacgaggagtgccagatgatataatgtagtgcttttgccctgaaaggattttccctccagctgtggggataggatacaaaattaatagtgattacggttagtatatcctgagtgccctgatggtttgtgttgataatattgttccagtccttgtttctgtccaaaagaacttcatttctatgtgatttcactgcctgctttatgtcattgactagatgttttgtcatctcagcatttgaaatgctaaactggaaacccagctctcacaatgcaatgctttcttctgactacctccaacaaagaatgtcagagaaggaacaaatgcctgaaggcccagagggatagaatgagagggatctgctatataaaccagggaaggaagatgttccagtcagggccaaaaaattaattaaaaatacaaagataagaatgtgtgggaaataatgaatagtttgttatttgactggggcagaaaggtcataatgaggaataatatatagaggatcctgtagatggcaaaaaaaaaaacattgtaagtgtgtgaataaaataatgaggacaattgccaaagagcagtttaggaagatgaatttttttagcattgtggtcacactggaggtaataataaattactatgataacagtaggggagaaaaagaatggatagtagaggctgggtgtggtgcctcatgcctgtaaccccagcatttggggaggccgaggcagatggatcacctgaggtcaggagttcgagaacagcctggccaacatggcaaaatcctctctctcctgaaaatacaaaaaaattagccaggcatgatggcgcgcacctgtagtcccagctacttgggaggctgaggcatgagaatcacttgaacctgggcagcagagattggcagtgagctgagatcgcaccactgcactccagctgagcgacagagcgagactccatctcaacagtaaaaaaaaaaaaaaaaaagaatggatagtagaaaagaaaagaaagttgaggaaagaattaaatgagactgtgtgaaaagaatagttagtggacaactggaatatttttatcttgagcacctgaaacaataataggattgttgccaaagtcagattgcaaaggagttggcttgaggagtacataaaaagg

SEQ ID NO: 114860 - DNA, 1600 bp, Homo sapiens
agagtgagagtgatactcttatgaatattaatagcaaggttattccatctgtgctatgggatcttgctgctgctgctgttgggttttatgttgtttccatggcaggggaaggtagatggtaggagtgagtgttttttagttgtgagctttttttttccttgagctataaatatttaaaagaaatttgaatattaatatgcctttctgtttatgatcatgaaatgcttgaattctctattacttctttttaaagcaagcaactaaataatcataatttttctcttaaattttgcctgcctcacagtttttacagtgtgaaactgatagcattgtcaaaacaactctgacattctgaattacatatacacaggaaactgacaaatgtttatgagtacatgggatttgggttttttcttttaacctatgtattagtactataattactagttattttgagggcagaatagtaactgtgtgtaactgatctccatataggttaaactcttagtagcacaatgatataactagaactttcatgtatactttctgatatggtatggatttatcataaagattccatatactctaagaaaacttcaaggaatttcacatggatgcaataaaaaatttcacctcttctcttgagatagcatagtgtaagtcattataaaattaaaaaaaatgggcctaagattattttataaaattccatttctgttcccccttttccctttttgttacacctgtctccctttccctttttcccccctctatatttctctccctcctcctctccctctgtctctctgtgtctctccccactctctccgtgtgtgtctgcttatctctgtctaacattaagtgaggtgaaagtgccctgtattttttctaaaaaaggttttttggttgggtttctagattatccgctaaacatgtgtgctttttcttaaaatttacagaaaacagacgtgactatgctcttgtatatagcagacaatctagcctgttttccataccagacacaggaagagccgttgtttataatgcatcatatagacattacactctcagtttctggtagtaacctactgcagtcattcaaggaggtaagttacacacattactattcttaatccatctgtcaaagtgcaggcatgctgttttcactgttttgtttctcattattctttttatcctcttcacgagtatataaaatctttctaagtgaacttaatgaaatctgggcaatacttgacttgggagaggatgtacattgccactttacctctatttagaaacatctaaaatagatatatggattgttctgttgataagccatcacatttatttctctcactttaagcactgaccttaagtgtttgcatccattcatacattcatttaaactccattttaaaacattattctgtaaatcttgtaatgctgtaatcacaacattacacatgaaaatatatagcttatttacacttaaacagaaaatttatgacaccattgactttcttatccctcaactacagcaccgttatagagtttgcatatgtgtgcccaaaatctttgctaaatttcttgttgaaccttc

SEQ ID NO: 114861 - DNA, 2943 bp, Homo sapiens
ttctcttgtatcgtcttagcagagagcaaagaggggagataactagaaaatgtctatcagtaattatcacctgattgcttgatgacttggaccaagggtctgaaaactctggctgtttttgtatctaacccattgcctgtttttgcaaacaaagttttattgaaaacattcatgcccactcatttatttgtctgtagctgctttcatactacagtggcagagttgggtagttgtgacagactatttgaccttcaaaatgaaaaatatttaccacctggctgtttacagaaaatgtttactagcccctaatttagatgatggctaacgtctgtttcacccacaccaaactactgccatagaaaacatttaggaatttgacaatcttgcttgaaatatttacttaaaattctgaaataatatctgttttttgtagttcaaacttctcatggaacatctggaccctgatgaagaagaagaagaaggggaggtttcagctagcacaaatgctcggaacaaagcaattacctcactgcttggaggaggcagccctaaaaataatacagcagcagagacagaagatgatgaaagtgatggggaggatagaggaggaggcacttcaggggtgaggcggaggaggagtcaacgtatttcgcagcgtattacgtaaaatgatttttatgtgcttatatatgtcagtctattaaatgtacaccaagtaatgtaatacttaaaagagaaaacattttgtagatagagattctctacttacccgtttatacatccttttgtagaaagtttaacataaaagacaataaaaaaacagaaatgagatttatccagcataaagggttaatttttctttgaattgtattaatgtgtgttatttttattgttgctaagttttatgtagctatatggttcatatgtatatataattttatatatcaataagagtaaagacacgggtacaaattaagagttatatggttttacaagtatatgttaaccccttggcgctggcggtcacggtgcgtctcattgccggcaatggaagtgtgccgggaaatcccaactcccggcgtcaagggattaaaagcaataaaaacaataatttcactaaaattcttttgtgtaacacttggtcttttttcccccctcccaatgttttagtcattgagaaggtcaaaacgaaattcagactctacggagttggcagcacagatgaatgaaagtgttgacgtcatggatgtcatcgctatttgctgtccaaagtacaaagatcgaccacaaattgcaagagtagtgcagaaaaccagcagtggcttcagtgttcagtggatggcaggctcctacagtggctcctggactgaggctaagcgccgtgatggccgcaaactggtgccttgggtagacactattaaagagtcagacattatttacaaaaaaattgctctaacgagtgctaataagctgactaataaagttgttcagactttacgatccctgtatgccgccaaggatgggacttccagctaatgaatttgtacatgcagccaaatttacaggaatttttttaaaaggcagaaaaacttgaaataccaacattctggcaaaaaaaaatcagttttatgaagagtaagtggaacctgggatgcaggaacaaaagaaggaaatgttgggcaaacatttttgtgggagctcccttcgctgttgtgcagcagaaacagattctcagttcatttttactcccactgtattatagtttaacaaaaattgtttatatcttggaaaaaaaactttctgtttaaaaaaaataaacaagtgaatgttggaaattagtctgttaatgttcttaataaagtgttcttggagtttaacctagcagcggatggctttctttagcttagcccagtttccagggaagcattgttttttccaggctgtaaaatggcagaatctcctggatatataatttattctgttgaaaaaaaaaaaagcatgcagtatctatgacctatctgcagaaggagtttttgtaaatgtagattttgatgtattaggtcaccctgaaaacaatacaagaaaagggatccccaggtaatctggtggagcgaatactgcaataaatttttttacttctctttgttacttgtctgtttccatttgaatttcttattgtaaaaatctgtttaaatccatttatattattttacagtcttttatgtaaaatttattatatcactggttttcaaagcaaaacataaaatattgtttatacagtttgtataggctgacttctgaataattggtatctattattttcattcccataagagggtgtaaacaattaactccagggttttattgtatcctgcaatatttagtattaactatatatgatttagcactgtgccaaacacattttcaagagtacattttgatataaaaagaaactatagtttattccttgtatgcttcaatttctttctagtgatgtcatgatgctgatatttattctttaaacctcgggtaaaggtaacctgttatttggaaaaccagcatttctcttggttaaaatgatgtccggttattttagaactagagttgagatgaatatgacacttcataattacactcactacatttttcacaaattattttttaatgctgaaaagagtaattttacttgttgagatgtttattcattttctaatctatgctaaaagcttttatcataagtcttgggaacagttgtcatttacacattacttactgcagatatcttgactaaatcaggagggaggtgtttaatcatttgatatgtatagttgacactcaggaatagtaatgcctaaaatttacagtggatgaggtctgtttcaagtttaattctttttaaaaatgttttacttatttttaaatcactttgaaaaaattgacctc

SEQ ID NO: 114862 - DNA, 1052 bp, Homo sapiens
gtcctttctgtaggctttctcatgtctttttattccttgcaaatttcttatattgaaaacacaagtatttttccttgggttcttaagtagattctaggggctgggcgcggtggctcatgcctgtaatcccagcattttgggaggccaaggcgggcggatcaagaggtcaggagttcaagaccagcctggccaacatggtgaaaccctctctctactaaaaatacaaaaattagctgggcgtggtggcacgcacctgtagtcccagctacttgggaggctgaggcaggagaatcacttgaacccaggaggcggaggttgcagtgagccgagatttcgccattgcattccagcctggcgacacagcgaaactccgtctcaaaaaaaaaataaataagtagttgattctaaatggagagtctagttgttttctgatttttaatcagttttcttacctgaagttattgtaggcttgagagatattggatctctttcaaattcataagtagcttgagcctgtataactagaacagagtaccactacagaggtaatgaagtacggagataggtccacttttcaggaagatggtgataagcattgattaatcctttgatttggagttggcaaataaccaagcaggcagttggagatagagatttaaagtaaggaaatggaagctgaactagatgccagaggatgccctataatcagagttccttttgttggtcagtaattttgtaatacatactgcttgaaataagttgactgcaggctatgatttttttaatgatacagctttcagggtgttacagtttttgttgaatggaattttgcccttttgtgacttttttcagtcattgtttaaatctcaatcacatagaacttaaaatgaaaagttagtgttgctttatcaaaccctttacattgacctttcttctgctaagaaataccagagtaagcttttcttgattataacatgcctagaattgtaatttagccttaaccttactagatttaaatcctggagcaaagaacagaaaaaggttattatggt

SEQ ID NO: 114863 - DNA, 1039 bp, Homo sapiens
ggttttgtgttcttgaagtcattataatctaacatgaggccttgcccatagaaagctgtaggtatttgtttcattgttcaatggtaaccctgcctctgaaagttagaaatgtgtatgactccaagtttctagcttaagtgcttagctagactgtgactcacaaattgacacaagtagagcaggaaaagaagcaggattttctttgggaatgatggaggtaataggtttagttttatcatccagtttcagatttctcaggctagactctgtagacactgtttggtgttatgttataaagaaactgagtgtcagtgcccaccgtcctagagaaagagtacttcctttctgagggaagccagtgtacttggcagcctggtttctgctgtggggtgtcttcttgatctataacttacctttcacttcagaaagctttcactgtccagtggggcaggtacactttaccttgaaaagtcttatgcatgctcagtttcacagaacttttctcattatatttttatctcaaattggatatcccagataaaccctggaaaaatgcattatgatctgaaaggaaggaaattacaaagccatctctaggtaaagtaaggtgagagaaacccagtgatagcctctcaaggtttgtaataccccataggtgaagatttatcctaaaatgcaagactcttaactgtaattttagcagagtaggtggtggtttgatttgtcattctttctagatgacaataattatgttcatttggacaaaacaagaatgtcgatgtctagatgccaaattaattgtagccaagatgagtttgggattagttgatgtttgtagcctttgttgatctctagtcatatcgtgaatacttgaaggaataacttcagcaccccacctccacttgttcccatctactttgaagtggaagcctactcttgtggttatgttgcttaaccactcattggtttctctttcagtctcactttttctgttttaacggctgttttttttttaacacagtgtttgttcacatatgca

SEQ ID NO: 114864 - DNA, 1113 bp, Homo sapiens
ctttaacccaagaggtcaccatcttcgctaatctcacctacttccccatatgcagcccagtcgttattggaagagaatccttcaagctttttttcgtgaataggccagcaggggcctctcaaatactgatagaaagtgtctctttaatggaccttctctttcctaagtacataggattaatatctttttctacctagtaaaaagctataaggggtagaactattactattacgctaatcttagatttatgtgaaatatttctctcttagttaaattgaattagttgctcttaacccacaaatgcccagattctgagaacgaaaataaaatccttgatttggaggttaataaattaaatagaacaatatgttttcaagaaaacaggtatttcatattaaaaccatgtgaatgtgtaagtcttagggacagatttggtttatctcaagataataaaatcttaaggaatattttttgagaagagatgtcagaacacttttccctatattaattcaatcctgtttttagaattaaacatatagaagaattaaacatttagaatgaaacatatagaagactgaatagattaagtgtttttctctgaagacatatagttaatactggacaagacttaaaaattatattttgggacacattcttacaggtaaattgcttctcggatttaaataagatattttctaaaatatattactttcagatcaccagagatttgttttttgtttgtgtatattttataaagtaaattgcactccagtactctaaactgtgtactaagcaaagaagggttgtgccttctgacatattacactgagtactcaggatagaaaaagtaataatcttatactggctgggtgcgatggcccatgcctgtaatccaagcactttgggaggccaaggcaggtgaatcacttgagctcaggagttcgagaccaacctgggcaacatagcaagaccccgtgtctacaaaaaatacaaaaattagcctgcattgcggcacacacctgtaatcccagccattcaggaggttaaggtgggaggtttgcttgagcccggaggcagaggttgtagtatgccatgaccatgtcgctgcactta

SEQ ID NO: 114865 - DNA, 1050 bp, Homo sapiens
caccaggggagagattttctttttcctattttatggacaaagctgtccttcagtgctctaagatacatgaaggtagctcagtttttccctcattgcagtgtacagaaccacatctcctattcctcagtagactatcccagcatcattgcccacttactgctccagctatgagttcctttttcttttctggcaccatgggatttctctgtttagaaagattggtcgtatattaaaatttttttttgtaatttagcatgtctatgtttttatgaaagggcataggcctatgtacttcagctcagtctaataaatcttgtttatttactgtgggagagctttaacttcaaattttttattaaattcattatacagtagaaagctattagcataatatgtgacaaacttctaatatctgggttgccagttggaaatagtggcaattgtcttttccatgtgatcttttttcctctactattttattttaattgtaatatatactctggattagtgcgttttttgacccatatggatgaagaagatcaaagtgacaaaaaggagacttcagaacctgaattttcaataacagaaaattattctggtcagaaaacctgtgtgtttcctactgccgattcagctgtcagcctttccagttccagtgatcagaatactacttctcctggtattgttctttactttttcatttacacatactcttattctccattataatgttactgaacatgatttactgggaatatagttatgaaaggtttgtgaagtcattttgtaatatttattttaggggaaggaaagttaaaacttttgctagtcacatgaagaactgtgacatcttgtcaccttcataagacatactgcaattatgtatcatatcttggtgtaacttattaatatgaaatatatagcaactggaattactgtaatagttgatttttacaaaaattgaaaaattaaaactcttccaattataagaactttgaattttaatttgaaaacaaaatagtagccatcatttcttgagcctctaccatg

SEQ ID NO: 114866 - DNA, 1050 bp, Homo sapiens
ttttaaaaaatgctctcacattattataatgtacacataaatacaaacatcttcacttgcctaacttaagaaaacagcttatagtcctggaagaggcccagggatactctgggcagacactgagtggtaaatagtcttgaagacctgggttgaccgtgttatgccactaaaaaagtcattgaatctctctgggctttgttctctcatctttaatacgaatttgtctagatagtaattaaggttcttcattctaaaattttatgatacaattttcctgagccttttaaaagtttataactcagttaagctacaaataagtaaaaatttcctctgttttattgatccctaccatttagcttatattggatttaatcccatttttttcacttttgcattaatgcaagtgtttaaaacttacataaaactgtttgttattttgaaattatcaaagtattactgttgttttgttgtgtgtgttttttctacagattggaccagtggatcacattgaattctcttctggccctgaattcaaaaaaacattagcttcaaaaaccattagcatttctgaagaaggtttgtaggggctgataggggctggctgaagtcttgctttagttgatctgaaagaatgtgcattgttttgtggagtgccagaagtaggagtagttttcattatgtgagctgaagtcataagcttcccagtttttagattaggattatttttttgtaatgtgattagcttccacctcacggcctttttttttttttttttttttttttttgagaaggcagtaacctcctctggattttatactaggatggggcaagtgtggcctggagctcagtttttgtggattccaagccattggcctcatagtgctgaggattgcacagagctttgtgctgaggttgctgtttgtctgtgatcatcagctgagctggaatttgaggttctggtaaaatggccaggcagtggtgaggtattaagttttttcattttttattgaaagaatgaaattagaatagttgtttttaccttctgctgtg

SEQ ID NO: 114867 - DNA, 1018 bp, Homo sapiens
aaaaagaactattgcaaatttgggagaagaatcaactgagtttaagaataagaagagtcattggctttgattttggttttaggaggtttaatgtttgcctgagatctcatataaagtcagtaatagccaatattggggatagcttttaacgtgtgatgtttttggttttcaagtagaatttgaaaaagtcataaaaatattaaagttgctttttgatgaagtatatgtttgtagcaagggatgaaagtaatattcagacttccttgtttgtggaactttgttgtagtaatttatgtattcttatcccagaaatcaagaagctgaaaaggaatttttaggtatatttaattaaaactgatttggaaagtagtgttgtgttggtttaaaatgaagtcatcaaaaaatgagatcatcaataatacctcttctttaattataatcaattctgcttttattcttattaatatttaggtctgccaaaaccagagttccgattcaaaggacagagcacaaagtcagactctgcagaagattatctattgtggaaacggctgcaaggtgtctctgcagcttgccctgcaccaagctctgcagctcaccaactagagcatctcagtgctaagcttcagaaaattgacgagcagttgctagcaatacagaacattgctgaaaacatagaacaggatttccccaagcctgaaatgctagatctacattgtgataaggtagactacctttatttttagttttttgtttgctactgaattattagatttgtagtgtgatataactttggatacctgatttttcaaaataatgagaactttgttttctttaagctagggtttgtcaacctcagcactattgacatttgagccagttaattctttgttgtgggggactgtcccatgcgttgtaggatatttggcagcatccctggtctttacccactggtttccagtggcactgctccctagttgtaacagtcaaaaatgtctctagataatgccaaatgttc

SEQ ID NO: 114868 - DNA, 1031 bp, Homo sapiens
gacattgaagctaatgatcttctacaggaattacctgtgagagaagagccttcaaatgataatgttatcaaacagcaaagcgatcatctagcagttccatcgtctgcagagttacattatatggcagcttcagttactaatgctgttcccccacataattttaagagtcaaggtaattttttcctacttttaaaacaaatataatttgaaaagttctttaatatagcattgttatccctactcacatctcttacctctcctcctacaaacccactgtatttttggatgtttacatgcacagaaatgttctgttaatcttcggattaccttatttagaagtttagaatcagtctttgaatgcttttcatagtcttgatagaatcagccaattcctctatggatttattttctaaacctgcagaagtaactccagcttgtctggatggaaaaagcttgagagcaggcattacagaagtgaaggagcctagtgtcacctcacctacaccatcagacatacagcagaacaaaggtaaacagccaagaggtatagcatgaccctctcctgaattactgttgtattggaaacaagcaccaaaatttggtaattgcaaaagaaaccagaaaaagggttgtcccttgctaaggagcatgggggcaagtaggtaaatgaaatagagacatgattccaaagctgggaaccatggatattttgtaagaagtcacagatctgtttatgcatatgtcttttctcaattaatagggctaaaaataaatattctttgtgagttcatgagtgttttgatgttagaaagcaattctcatattgtaaaaggtgggaaattctcaaatagcacaccaaaaataaacaggcatggtagccaacagtactttttttcccaacttttatttcaaattcgggacacatgtacaagtttgttacataggtatattgcatgatgctaaggtttgaggtatgattggacgcatcacccaggtaatgagcatagtacccaataggtagtttctcatcc

SEQ ID NO: 114869 - DNA, 1446 bp, Homo sapiens
cgtggagttaaacatactgaataataaggcctctcaaggctcatctgggatttacctgatgaagatggaatagactccaggtgttttcaaagactgtctttataaaaaggatagaaaatatttctgtcattatattgtttctggtaatattccctgagccccctaaaaagtcaatagcttattttttaaatgatcagttttctcttcatcttcacttatcgctagaagacattgaagaatctgttggaggtttcagaagtcccagtcttgccatttgcatgatgactttaccacagcagttagaagaagtaagtcaataaatagtggatataattattcttctttcattttgtatagtgtttaaattatacatgtttttattcattgttattaaatatatcaaagcagggctagctcttaaaaatgcaccatgggttgtagaatatagccatgctgtgtggcatttttctttccctgaaattctagtacagtgtagtaacctgtccaataatttcaggcaatgaagttttcacatcataaactgctttagcaaatttatttaatcaagagtagcaaatgtgtcctttatttaaaaagtatggaagtatggccaagcatggcaactgatgcctgtaatcccagcactttgggaggctgaggcgggaggattgcttgaggccaggagttttagaccagcctggtcaagagaacaagactccatctctacaaaaaattaaaaaatagccaggcatggtggcatgcgcctgtagtagtctcagctacttagaaggctgaggtgagaggatcatttgactccaggagtttgaggctgtagtgagctgtaatgtgctactacattccagcctgggcaacagagtgagaccctgtcttttaaaaaaaaaaattaaaaagtataattcagctgtagtatactttttatacatatatatactttttgatattatttttctcaaaactctatacactgaatttccagggggaacatagacatttccaattattgtaacaattctgtgtttttgtttttttttttcgagatgagggtcttgctcttttgcccaagctggagtgcagtggcacgatcatggctcactgcagcctggaattcctggaataaagtcatcctcttgcctcagcctcccaagtagctgggtcttactataggtgcacaccactatgcccagctaatttaaaaaaaaaaaaacatttttttgtagagactgggccttgctatgttgcttaggctggtcttgaactcctagcctcaacctctcaaagtgctgaaattacaggtgtgagccaccgtgccctatctgttgtaacaattcttttttatttttatttttatttttatttttgagacagtcttgctctgttgcccaggctggagtgcagtggtgtgatcttggctaactgcagcttcca

SEQ ID NO: 114870 - DNA, 1023 bp, Homo sapiens
cttgatcattgcttcagcaacaaatattgagttgtagaaatgcagtaaatatttgataaatgaataagaggattattcagaattcctgtagaaagaatgaataattttaaaatatggtgaaaaataaagggttcaataaatactaaatactttaaatggtttgctttagatggtagagaatcgtgacactgggtgtcagattggacccaatattgagagggagagcaaatcagatgctggcggttcagttgcagtagcaactccaggtggaactgaggaaagaaatggtcagaataaatcttgtcaaaatatcttgaagtaagttgccgattatactcttcttttcaatataagacatgtagtttgatggcatttgggcttaaagggaagatcaaacccttgaaagttaaaggaatgagcattttttgaagtagaggagcaggcagtgagctttctgaggtgctttaacaattcattgcaaattgtatttcttccctcttggtctagcttatatcttctgagagagcaattaattcatcctgagggattcctttatcaatttatttcccatatcagaagttgaactaatcctttcatccatttttatatatgaagcaatgctaggagtaacatagctttgaataccaaggcaaaacccattatagcatgaagagtcctttgtgagaatgataattttagttgaaattattccaatcattcgagtaaataaaaactatgatgtttagttatttactgaacaatctttacctgagcttctgtgtatcagaattttttaaagaaagattttataaatatgaaaccaaagtttgttctttgcttttaaaaaactgaattaagccgagattgcgccattgcactccagcctgggcgagactccatcttaaaaaaaaaaacaaaaaaaaaacccaaaactgaattagctctttatctccaagaatagttgtaattttagttgctgcatttttttcagtagaatgccaactgaagcaaaaaatcctgata

SEQ ID NO: 114871 - DNA, 1047 bp, Homo sapiens
agtacagtccagtaattcgtgtaaagacctctacagctgccattcttacatcattatggcttttggaacaaccctattttgctacatataaggcaaaaaatgccattattaaggtaagcatatcaattgtttattacttacaaatgagaattctcattttagattaaaactatgtttacatttcccatcttttaaagaatcattaaataatagaaaattaatgacaatgttgattataatcagtatctcctatttttttcttccagtggttcctttaattcttaacaataaagtgctttcagagaggctgtgaggttttgaagttttatgtgtatttataaaaaagaaaaaaaggaaggagataattttaagtgatattacaagtggtattacacgtatattatttctcctttcagtttcaggttttggttcagatgaaggaggactaggtggctctgtagttttaattactgatgtctcatcaagtccgttaggggatagtttttcttatactctcaggccagaagaggttggagaaccaaacacagaaaggcagatgggggagtcagtagaggagttagtgtttaattaactattctttcttccctagtcaatggcaagtgcttttattctgaagtagtttattctaggctgaaggatgtgagtgtgtgtgtgtatgtgtgtgtgtgtatgtgaatatgtgaatttgttttattttttacttattcattttttgagacagagtcttgctttttgttttgttttgttttttgttttttttgagatggagtctcactctgtcacccaggctggagtgcagtggcgtgatctcaactcactgcaacctccgcctcctggattcaagcgattctcctgcctcagccttgtgagtagctgggactacaggcacgcgccaccacgcctgactaatttttgtagtttttagtagagatggggtttcatcatattggctagggtggtctcaaactcctgaccttgtgatccgcccgcctcggcctcccaaagtgctgggattacaggtgtgag

SEQ ID NO: 114872 - DNA, 1274 bp, Homo sapiens
atatctgttagtgacttataagtcaatctccatgacttttatataaggacttttatataaatttacaatgagcatgtgttcattttataatgaatgaaataaagacctttattttgaaaaaaatgatcagcagagttggagttgttataatattaatgtacatactcatgtgattttctttcatatttgtgttcctgctttaggttgcttcagagaactttgtgctctgtgttggatgctgcatgtccgtgataagttatcctatagttgcaggcaatatcagaaagcaagagaaaatgtaaaaggagaaaaggtatttaccagggcaaaaataagaaaaatgaacacacgttaagtgggaaattattgtttaaaagaagattttattgtttgtagcaaaactttcttttgaactcattctggtctaccatctaaactaaaaaggaaatgaatgtttttcaatatccttttaggaccttgaagtggagtttgattcttgtatgattgagcactgtcttagtgcagtggaatgggcttatagaatgctgcctttctctcggttttttaatatggaagaacttattcaggatataattttgagccttattggagaactgccaccaatcagaaaggtaatgtgcttgtaggtgaaagtaaactacatcagaatcagagactttaaaagatttttatttaattttaattaaggatgatgttgcctttctttggattatttcacttagcataatatcttgtgggttcaaaaaggtaaatactgtaggacctcacttgtgtgtggaatataaaaatgttaaactcacggaagcagagagtggaatggtggttgtcagaggctggggatgtggtggaaatggggagatcttggtcaaagggtacaacctttcagttacaagatgaataagttctagggatccaatgtacaatatagtgactatagtttttttttttttttttttttttttttgagacggagtctcgctctgtcacccaggctagagtgcagtggcgcgatctcggctcactgcaagctccgcctcccgggttcacgccattctcctgcctcagccttccgagcagctgggaccacaggctcccgccaacacgcccggctaattttttgtatttttttagtagacacggggttttaccacgttagccaggatggtcttgatctcctgacctcgtgatctgcccgcctcggcctcccaaagtgctgggattacaggcgtgagccaccgcgccgggctatagtg

SEQ ID NO: 114873 - DNA, 1084 bp, Homo sapiens
tttttttttttttttttttttttgagacagggtgtccctgtgtggcccaggcttgagtgcagtgatgcaatcatggctcacttcagcttccaactcctgagctcaagcagtcctcctgcttcagccttccaaagtgctgggattacaggcgtgagccactgtgctcagctcattagcctatctttattttcattttaacattctaaattttctcattactagccactaaaatggattgttttattttcctcaggaagatggtgatgatcttcttttaaaagctgaaaaaaataatcgccagaaggtatctggaatccttcagcgtgttctcctgcttttccgggcggctcagtgttcttttcctgtagcacagtggtatatattgcagttgaggtgggcaagaaaagtcatgcagaaggtatggaaatatcttagtcatttacatgctgtgttaactgaaattactcatatttatattattgtttttataattgttatattttcccaaggagtcctgccctataaatccacaaatttcagatttattcataaacaaacagaccagattcttcctgttgaaaggtgaggactctgaacagggtctctaggttagttccaccatgtctagcaaaagatagtgtaatctagtccattaattccaggcaattacagttttttttttttccaactcccctgtcattaaagattgaaactcagtccagggctttctcccagttctccttgaggtgttgtctgtgttctgtggggccttctgtgggttcagagaatggaaagttatagttcattctcgtctgtttccatccggtagcctccactagtcagggtctcccccttgctattttctgagatgtgcaattcagtttgattcccaggtgttcatccccttctatattgacttcagctgagctgtcgcttcattcttatcagatatctagccagataggacacctggtaggtctttttatctagctgaaaatcctttatatgcctgctgtctctcttggaaatgtggaaataaatttcatcatctccaaatatttttaattcagcctaagtaaaatta

SEQ ID NO: 114874 - DNA, 1034 bp, Homo sapiens
gtgggaaaattggtagaacctgggaggcagaggttgcagtgagccgagatcctgccactgcacttcacactccagcctgggtgacagagtgagactccatctcaaaaaaaaaaaaaaggaaaagttactctcacacaatcttttatattattttggtgtctttcttgacattcttttcccattaatattttttcaattatttttgactcagaactacattctaagaatatttttattgtatagttgtttctacaatatcttgtataaaaatgtctcatggtcttacctataatcttaaagtaacaagatagtttgtaatttctgtctgtaagtttggatgtttgtatgtcaaccaatgtgttcattcttgacaatgaatgtttttagatttgaaattttttcctacaaaatggataagaagtttaatacaagctttaactattttaccaaatttttgtatttgatagatcccattgaagaggaagatgcaaatctgctatttggttcagtacaagaagtactgaaagcatcagttatggccgatgcagatattctttcggagacatttcaacttctgatagactctgccaaggacttcagtaaaagactgtggggcttagtgccattcggcttgtatcttccagctcctccattgtactgtccccagccagctattcttagtgaagtaagcttatagcattaacttttaaattaatttaaagttgattttgtcaagtttttaaaataattaacttgataataatcatcaggttaaaaattcaagctctaaagacaaacgtatagatcccagctttgctgttcactaattgtataatcttagggaatgtactaaactgctgtttaagtttccgtatcggttaaatgcagatgataatagtacctctcatggcatttttgtgaggattgagatatcctgtaaaatcttctagctcaggacctgggacatatagtaattattcaataaatgttaaaattattgtaacaatatagcacaattaatcttaatatccaga

SEQ ID NO: 114875 - DNA, 1985 bp, Homo sapiens
ctcacgcctgtattcccagcactttgggaggctgaggcgggtggatcacctgaggtcgagagttcaagaccagcctgaccaacatggagaaaccccgtctctgctaaaactacaaaattatctgggcgtggtggcacatgcctgtaatcccagctactcaggaggctgaggcaggagaatcgattgaacctgggaggcggaggttgcagtgagccgagatcgtgccattacactccagcctgggcaacgagagtgaaactctgtctcaaaaaaaaaaagtataatatataatatatatacacgtatataatatatatcgtatatattatatattatatggtatattatatatgtatataacatgtatatattatatatattatatgcatattatatattatatataatacatgtatattatatattatatttttatatgttatatattatatatgtatatatattttttatatattatatatagagagagagcttgtttggtaatttaacaagctagaattgatgatactaaatatgcgatttaactgggaaataacagattcatgaacttaaaaaaccaaaacgtatttaaaatatctgcttggtattcttcgtatgtgtggaccagcattttattatccaaaccactcttgttagaaatttcactttgaagttttattgtcccctctccccactctcagggtggtgtgctaatttaaatagtataaaagtataaaaagagaaaaataaatatgtaagaatattttcagttatagtcacagtcaatgtcagtattttcttaagagcataaactacaacctgattacccatttgagacctgcctctggctcagaaaaaaattacttagtcttaagcttaatgttaaggataaaaagtataagcaagatctcaatattttttactggtttatgatgaggaatatatatatgtattttagtatcttgatttattttcagattaattttatactaaagtatattaaatttatctacagttatttggagactgctgcctgtgttcatttactttttattctggggaatgcctgaagttaacatttctagcaattcggtggcatgagaatgtatttacatctgtaaggtgaggtaaatgttttcttcttccttttcttactgatttttttttcttttggaggcagggtcttgctgtgtcacccagactggggggtagtggcacaatcatagctcagcctcctgagtacctgtgactacaggtttgtgccaccatgcctggctaattttttttttttttttaacagacaagttcttgcactcctgggctcaagcagtcctcctgccttggcctcccaaagtgctgggaatacaggcatgaggcatcatacccggccccatattttctatccctttttaaacattattatcttttgatccatatacatgtaataaaatttgtaaatgttattgtgagtttcaagttctgaggctttacaaatcatttcttcccctcttatttctaaatgtttaatccagaaagtttatcttgttttgtcttgtttcccttctttgaagtgagaatttgtaaaagataagacaagctatggttttacttgtctaagactataaaagtaactattctggaaaagaattcagttgaaatttaaaagggacataacttttgatttcctattgtaccttttaaatgcttaagtgttcttttatttaaaaatagttttattctaaaaagcctaataaaatagaaaatatgcattttttttttttgagatggagtcttgctctgtcgcccaggctggagtgcagtggtgcaatcttggctcactgtaacctccgcctcctgggttcaagtgattctcctgcctcagcctcccgagtagctgggactacaggtgcccgccaccaggcctggctaactttttgtatttttagtagagacggggtttcaccatgttagtcaggtggtcttga

SEQ ID NO: 114876 - DNA, 1320 bp, Homo sapiens
attgaaatacaactactaggtagccttacctattaattctaacgaggtattttaaaacaattcaaaatgttcaggctactatagagtattaagcttaatgttcattttatgatttgtggtacaaatggataatctttcttaaatgtcgctttgatttctgggataatttatttaggcagtaagttgaattaatttctggcacctcttgagtccttcacatgtttcttctcttaggaaaaagaagccgtttttcttttggatgataaattcataaatgaaattaatttgctatcaggaaagataaagaagaaaattcctagtctgcagcctttcttgaaggatgttattgtcctaacaacatccagtaatggttaagtagtactgatattttcaaatggctaaaactatattttttaataacttagggtgatgttaaaggaaatactagattgtaagtattgcatttcatttttggaaacagatgcctggctggctggggtactaactacaggagagcttttcctttggaacaaagatcaagattgtttgaaaactataccaataactgaaaagcctaaggaaatgatcaaagctacagtcggtgggaatttttttatttgtttaagttggtttaactaggaaaaataggaaaagaggatgaaacatttttctgttactgtcttgaaaatgtatttctgtgtatgtgcatatgtatatctgagtgtgtgtatatatatatatatatatatatatatatatatatatatatatatatatatatagttttggttatgtttatctgtgatactgagactcaacttgaagaagaaaattctggcatgcctaacatttctgtgataataataggtttctaatatcacataatatatacttgataaatgttgctatttttgtacttttttttttcttttttttgagacggagtctcgctctgtcgcccaggctggagtgcagtggtgggatctcagctcactcgcctccggggtccacgccattctcctgcctcagcctcccgagtagctgggactacaggcgccagccaccatgcccggctaatttttttgtatttttagtagagacggggtttcaccgtgttagccaggatggtcttgatctcctgacctcgtgatccacccagcctttttttttcttttttagagacaggatcttgttctgtcactcaggctgaagtatagtggcatgatcatagctcactgcagctttgaccttttgggctaaagcgatccgtctccttaagcctcccaaagtgctgggattacaggcatgagctgccgtgcc

SEQ ID NO: 114877 - DNA, 1026 bp, Homo sapiens
ttgaacccgggaggcggaggttgcagtgagccgagatcgcgccactgcactgcagcctgggctacaagagcaaaacttcaactcagaaataaaatataaatcaaaactttatgaaaattgtcagttaagatcttcagtggtccatgcgcagtggatcgtgcctgttatcccagcactttgggaggacgaagtggatggatcacttgaagtcaggagtttgagaccagcctggccaacatggtgaaaccccatctctacttaaaattagccaggcgtggtggcacacgcttgtagtcccagctactcgggaggctaacgcaggagaatcacttgaatccgggaggcggaggttgcagtgagctgagatcatatcactgcactccagctggggcaacagaacgaaactcttgtctcaaaaaaaaaaaaaaaatgcccagtgaatattatgcatcatttatattttattactattattgtttacagaatcttgggactgttttacttaattggtcattgatagcttaacaaacatggagataagattagaaatcttgacatcaacaggtattaagcagaaaaaaccatggccacgtgtctcctggttgggaaaggtaggtttttctttattcacgcaataccagttttatatatgttatatgtgtgttttgcctgtaatataggagtgttctatgatcttaaataaataaaacatcatctactggaggaggatctacaggaggatcacctacctgcacactgaacagggttttgtgtgtgtttcgtttttattataatgagcaagttagcttttccagaatgttaagtggtttatttagaagatttttacttaaactatttttttcatattatgtttaagtcaagtttaagttaagttgagatggcatatatcaaaagggaatatttaatgtcctgagctttcctttactggaacagttaatggagtgtttcctcctattgtggttttcatgattgtgctatgaagtgttcttggaaactaggatggaa

SEQ ID NO: 114878 - DNA, 1106 bp, Homo sapiens
agccaggcatggtggtgggcacctgtaatcccagctactcgggaggctgagtcagaagaattgcttgaacctgggaggcagaggttgcactgagccaagatcacaccactgcactccagcttgggtgacagagcaagactctgtctcaaaaaaaaaaaatgtaactctaaatatactcctacctttttcctcaagaaattacagattcctagtgtggcattataagcactgcattttagttgagcaaaaataaaaataacaaaagtctcatgttagttttagcaaaagaataatttattggccctcaaaactaaaatgtccatgtataggcaacttccacctgactacatccccagcctcaatattttcagggccttctctagctcagttcctctcttttcatgtcactctgctcttgcaatttgtctacctgtgactcctgggagagtatgggcagtgttacatcctgttagctctaacctggagatacagttaacagagaagtcctaggaagggctctgatcaacgagtccagcttgagtcatggactagtcttggggcatagtggtcatgcaaaccatatggaataggaaagaaatgctttcctaaagaattggatgctgggcatacatgtgatctcagctatgcacatcagatatagtaggcacctcagtccacctgcattgcataccattcacttactgtgctttgatgaaaactataagcttacagatccaggaaactcaatgaacccagagcagaatagacaaaaccaccatggacacatcataatcaagctctcggcaacctaggaataaaagggaacttagcctgataaatgacacctatggaaaacattcagctaaaatcaaacttcatggttgttgggaacaaggcccccaaaatctggccataaactggccccaaaactggccataaacaaaatctctgcagcactgtgacatgttcatgatggccataacacccaccctggaaggttgtgggtttaccagaatgaaggcaaggaacacctggcctgcccagggcggaaaaccacttaaaggcattcttaagccacaaactatagcatgagcgatctgtgcctt

SEQ ID NO: 114879 - DNA, 1103 bp, Homo sapiens
ttgcccaaggcacacaatatataaagcaaaactgttagtaatgtactttttaattattccttaacaaaatagaataaccaaaccaaatgcttcaaagtaatagcaacaagagagaagaagagtgggaatgaccagagctaacaaaacactctattcctttctctcttttttttttttttggagacagaatctcaccctgtagcccagcctggagtgcagtggtgcgatcccggctcactgcaacctctgcctcacaggtttgaagcaatttgcctgcctcagcctctcgagtagctgggattgcaggtgtgcgccaccatacccagctaatttttgtatttttagtagagatgggtttcaccatgttggccaggctggtcttgaactcctgacctcaagtgatctgcccgcctccacctcccaaagtgttgagattacagacgtgagccaatgtgcctggcctattcccttctctctttatgctaccacaaataattaccttctgtttattgtaagtgatgcatgtctaacaatttgtacaatacattttgaatatatttttccttccattattgtcttttcccaagaccatagggttgccttctctacatttgttctcttagaattcagctcccttttccctataatcttctaatgtagaatatttaatagaatgccagaacgtcactcagtgggtactactacctcttatttttcaacttttcagtttcttaagtttagcgttttttgaatatgtaaagtgaatgtatgcgatacattaattcgttttataaatttaaaattctgtcatgtctacttaaaaggaaggccttgtctgaatgttgtaatttaggtgtgactccagttctgctagagataagaacttcatttttgttttaagcacatttacatactagcaatatgttgttatatatactcagctcacaacattgaaagtacatgttttaaaagggctgtaggcttccatggttagatggtctgttagagtcagaaatctgaacactgtccttttattcacacagcatgctttgagaggttttaggaattccagccccacaacagatgcttgcaataccttttgg

SEQ ID NO: 114880 - DNA, 1406 bp, Homo sapiens
aaaatcttcaggccaggcgtggtggctcacacctgtaatcccagcactttgggaggctgagatgggcggatcatgaggtcaagagatcgagaccatcctggctaacacgtgaaaccccatctctactaaaaatacaaaaaaattagctgggcgtggtggcgggcacctgtagtcccagctacacgggaggctgaggcaggagaatggcgtgaacccaggaggcagaggttgcagtgagccgagatggcgccactgcactgcagcctgagtgacagagcgagactccgtctcaaaaaaaaaaaaaaaatcttcaaatggaacccacctacacccaagttttcttttttactttatttcttatttacttaatcacatggtctttcctctcctgtgagaattaaagttgccagaagttggtggggaagaagtcctgcaggaggaaatgtttgtaaatgtataattaatcatgtgtctttttcgttgtaggagaagatttacaaatctctgcctggatgctgtttgtggttaccttgttgagctccagtctatgagctcgtcagtagcagtacaagccatcactgggaattttaaatctcttcaagctaaattagaacggcttcattaattactgtgatatactttcatccgttttatgatctgtaaaataaaaactcagctgggtccagatatcaggtgttctaaatctaagaatgtaagaacaatcttaatagaaatatgtttttaataagtggctaatatctacaaatagtacctttgctaaatgaattcttttttatgactattttgttttttagtaattgggtgaaaaaacaactgaaatgagattatttattattttaacataaggattaaaaaaatttagaaactcttattttgaattgtactgcaggcagaaatttcgaatttatattattcattttcaagttagtccaaggatattggcattaaaactccactaggcggccaggcacagtgacttacacctgtaatcccagcactttgggaggccaaggtgggcgaatcacgaggccaagagtttgagaccaacctggccaacatggtgaaaccccatctctactaaaaatacaaaaaaaaatagccaggcgtggtggcgggcgcctgtaatcccagctactcgggaggctgagggaggcgaatcacttgaacccgggaggcagaggtttcagtgagtcaaaatcgcaccattgcactccagcccaggcaacagggcgagactctgtctcaaaaaacaaaaaaacctcaaataggctaagcagatccattcccataatagtggattctaaaaccgtccttaaataggcaaataactgactttttcaaaactttttttaggtgttgggttcacccttgaaagaactgtcctc

SEQ ID NO: 114881 - DNA, 1050 bp, Homo sapiens
tcttcttatatctttctgagttttctaggttctgtaattttaattttaggacattttcatcatcccaaaaagaaactctgtgctcattagttgtcacttcccattccttcacaccctccagccctaggcagccactaatctactttagatttgcctgttctggtatatatcttacttttatttaaaaaaaactttttttttcttttaagctgagagtgatggtgcacacttgtagccccagcttacttgggaggttgaggtgggaggattgagctcaggatttcaaggctgtcgtgcactgtagttgctcctatgaatagccactatttctagtctgggcaacatagcaaaaaaaaccccccgccccaaaaaattgcaattggatttcagaagatatccccctagaaactattcagttatgaataagacctaccttttagtatcaagagctaaaaatccaaatttccgatctttttttttcttcccagattttattgtacagtttttagaacagcaggtttgtactttgaactgggatgtgggcttcgtaatacagacaatgaatgaaattggagtaccattacctagactactagaagtttatgatcagttgttcaaatcacgggtaaggaaaatattaaataacataaaattattttctttaattaaagtaactttgtagatatagagtggggtattttgattgcatttttgtatcctatcacttagtctaattacacttggttgagtcttggaaattatgcttttgactttttaaactgataatgagagttgctttcctgtatatcatgattaaaatgaaatattatttttgaatattaataaatatgctttactcttggtgaaagaggctaaaccaaggtgtgggctaaactcattacattaagaatcatcatttgctttatttttttttttttttttttttttgagacggcgtctcgctctgttgcccaggccggactgcggactgcagtggcgcaatctcggctcactgcaagctccgcttcccgggttcacgccattctcctg

SEQ ID NO: 114882 - DNA, 1093 bp, Homo sapiens
agacactttggcaagatatcatagagaaaggtaagtgttcagttataggtatgttagcatacgttatgtagtgacttggtggaggaatgcaagctgctagtaactaatataatgcaagctgctagtggctcatgaaaattgtgtatacctaagaagagagtaagtggaagtcacctgggtatggtggaggatgatcatacacagaatgacccaagtgaatattcgggagaatactcagtgaaaaggttatttaatttatattatttgtgctgccttataaaagatactgagacactcacctcagaatctaataaccagtataacctggtaagacatgagagtatctcagacaataacagaaacaccaaatctgttaatcatattaatgtgactatctgttctaaagtattttgaaccttgaaacagaattaaataaccaatgtaaacatttcacattaaaagtaatttgggtttcaaatgacatgtctttttgttacagaattgagtgacagtgtgacattgagctcctcggatagaatgcatgctcttagtctcaagattgttctccttggcaaaatttatgctggcacaccacgcttctttcctttaggtaagctgtgatcttaggtgcagtcacgtattttctgttctgatggttttctccgttgatatggacaaataacgatctttcgagtaaaataaagagtttctttgctatttagttcagcactttaattctgcctctccggaaagacttccaaagaatggcagaatttgttaatgaagagttgagtatgaaactttctgtgactaactttccaagtttatattacctgtcttaggattgtgctgactgacaaactatgattatattgttggtaaccctatacaagtttctgaagagaaaagaaaaacggttgatgtttttgtgcataggtaatctgtgattgattcaactgttctttttttatgttgagggcatgtttttctttaaaatagcaaataattatgttaaaacttagtgtttgaatccctttcttaatgagatatggtggctataatttttaaataaggtagctaattatgagctatt

SEQ ID NO: 114883 - DNA, 1032 bp, Homo sapiens
tttttttttgtgagacagagtcttgttctgtcacccaggctggagtgcaatggtgcaatctcagctcactacaacctctgcctcgctagttcaagtgattctcctgcctcagccttttgagtagctgggattacaggcgcatgccaccaggcccagctaatttttgtatttttagtagaggtggggtttcaccatgttggtcaggctggtctcgaacccctgaccttgtgatctgccccctctcagcctcccaaagtgctgggattacaggcgtgagccaccacacctggcccccaatgaagaaatatatttaacagttgccttttaggcatattaagaccttttccttctgaagacctatcagaaatattttatgttagcagggtgactattgtacagtagagacataaccttgatcattattttcatgtgccagctaaggaaaaatgtatccaacttagtagtaagtcataggtcttcattcttttctttcccatcagtgagattttatgagggtgtggtggaactttctcttacggctgcagagaaaaaagatcctcaaggtcttgggcttcatttctataaacatggagaaccagaagaagacatagttggacttcaggccttccaagaaaggtgcattccattacgttagcagattgtcatctttatggatacagacttttctttgcataatgttttttgttttttgttttatgttttttttttttttttgagacagagtcttgctctgtcacctgggctggagtgcagtcgtgtgatcttggctcactgcaatctctgcctcccaggttcaagctattctcgtgcctcagcctcccatgtagctgggattacaggtgcacaccaccacgcctggctaatttttgtatttttagtagagacagggtttcaccattttggccaggctggtcttgaattcctaacctcaagtgatccacccacctcagtcttgcaaagtgctaggattatagccatcagccaccgtgtctggcctctttgtgtaaaggt

SEQ ID NO: 114884 - DNA, 1086 bp, Homo sapiens
aagaaaaatcactaaatttagaaattaaggaaatttaggggataatttatctccttagcttaaggaaaagtactaaaacttcaagtaaatcttttagtgaattagagttaatgggggcatttttattgatcctttcctacaggtggaaaaaataaataaatcagtgtcacatggactgcctgctgcccaataatgtattgactaggcaagagaattaccagacaaaagttctcttgcttaacatatttgggagaggaattaagaatagctaggaatctttggtcaaaaacttttctgcctaaaattaagaagtaagtttgtagagttgttttcattttaatggtaataaccatatataaatttagacatagactaaaacttagttgacagcatcatctgtctgcttgattttatatatttttaagttcttgttatctcctcttctaggcaaatgagcttctccagcgttcccgacaagttcaaaataagactgaaaaagaaagaatgttaagggaatcattaaaggaatatcaaaaaattagcaatcaagtggacctttccaatgtttgtgctcagtatagacaaggtgagaaataaaatgtttcttgtatcttttactcaactcaaaagacaaacaatagtgtatgaatgaagcaagctaatgatgaaaagccactttccagatgcaaatcttctttcagcatcagaggccgagtgaaaggacgtaggaatgtggtatcattgtgttgcaatatttgatgactacactgacctgcagaagctgtaatgttctttctattttttgaaatgtacttttttttttttttttttttttttttgagagtctcgctctgtcagccaggctggagtgcagtggcacgatctcagctcactgcatcctctgcctcccaggttccagcaattctcctgcctcagcctcccgggtagctggtattacaggcgcacgccaccacgcccagctaattttttatttttttatttttttattttttttattttgagacagagtcttgctctgtcacccaggctgaagtgcagtggtgcgatctcagctcactgcaagct

SEQ ID NO: 114885 - DNA, 1401 bp, Homo sapiens
atgtggttgtttttgcaatcagtctatcatgttatcttagttagctatcatgcctaatatatatttctcttagatttgagatgtatgatttcattcatctcatttgcttaaaagtatgaaacagtacagagcccctttataaatttcctgtttacaatttattatacagagccttttgatttttcttcagtaatatttcattatctgaaaaacttaggtacatcaggtatgaaaattttctagtattccactcttctagatagcttagtaaaatgttaaatgaaaccactgcaagttttaaaaactgaataaagccattaagttcctagagaaagaaatttattgtaattgtttttattcatttacagcacaatcattaaaacttttttttttccagaaacatttgggatgcaagcttagttgtggagagaatattcaagagtggcaacagagagatcactgcagtaagtgtgtataatattattttgttatttttgtgtagccagttgatggtataaatggttagattgtttcacatttcctgatattacacaaataagatggcaaaggttatttttttttttttttttttttttgagacagagtcctgctctgtctcccaggctggagtgcagtggcccagtctcagcttactgcaacctctgccctctggggtcaagcgatcctcccacctcagcctcctgagtacctgggattacaggtgtgcgccaccatgcctggctaatttttgtagtttttgtagagatagggtttcaccatgttgcccaggccagtctcaaactcctagactcaagcaaaccacctgccttggcttcccaaagtgctaagattacaggcagggggcctcagcgcctggcgggttattcttttatgtatatgtttgcattcttggacaacaaactgcttaccttcaggtttaaatctcatctctaacattgattaactgtctgaatatgagtaaattacttaacatttcagagcctgatacctcatggtaaaagaaggggcgtagtatatctccctcataaggttgtcatgagggataactcaagcaacttaatattgctcaaattttactatgtaatactttgacatatatatgaacgaaaactccatggacccagcactaatttctatgaattggcatactttacagactgctttttgctcttgttgcccaagctggagtgcagtggcacagtttcactcttgttgcccaagctggtgtgcaatggcattatctcggcccatcgtaacccctgcctcctgggttcaagcgattcttctgccacagcctcacgagtagctgggattacaggtgcgcgccaccatgcccagctgattttttgtatttttagtagaaacagtgttttactatgt

SEQ ID NO: 114886 - DNA, 2442 bp, Homo sapiens
acttccccaaacactatgccaattctgcttaatatgtatcattagtattgaaggcttctgaattactttaaggaaacttggtaccaaagagatatttctatttagaaaatatttaagaatttgaaatgtgattttgttagaaacgttttttgaagtactatctaaccataacctagtatgaaaattacaatgccatttactcacaaagtaaattctatgcattgcatatctttttcttagaagttatcagagtcccttataattcttcctggtagcagtttcaagtccacatttactgaataaatatttattataagtcttatgcatatactttactgtcagcacaatacattgaagtctctaatgtttaaagcatttacttggaagctaaacaggaaaaggaacaattccagtttttaagatggatggtttgttttactgaataaactcaacctcttgtcataaaaataggtatggtggtgaagcacagatgagatttccaaccactcttccgcctccaagtaatgttggtcccatcttggggtctcctgtctattctagtgagtatggaacattgaaatgaaattgtttctaatcgtttgaatcttagaacctttatagcaatttttatcaataagccttttcattatgttttatttactgctattgtataattgatgaatacatctatagattctgattcttaaaagtgatctattaatattgaatccttaatgtaaggaagcaaaataagatgtaaccaatcatatttacataactcatttggtatatattcagagggaaacagatgaatgatttaataattaactcgcacatcagtgttttccaaggtgggagttgttagaaacttactaggagatcagtccctaattcttgcatatatcgtggacaatgtaactccttatgcttagaaatagcttctgtggccaggcacaatggctcacacctgtaatcccaggactttgggaggccgaggcgggcagatcacctgaggttgggagtttgagactagcctgaccaatatggtgaaaccatgtctctactaaaagtacaaaaagtagccggcctgtggtggtgtgagcctgtaatcccagctactcaggaggctgagacgggagaatcgcttgaacccgggagacagaggttgcagtgagccgagatcatgccactgcactccagcctgggccacagaaagagaccctgcctcaaaaaaagaaaaaggaaataccttctttacctaattttgatcacattcaaaagattgagatgttcttttctaaatctttatattcttctttccctttttaggttctcctgttcctagtggtagtccctatccaaatccatcctttttgggaacaccgtctcatggtacctcttttctttgttttggattggattcattttgaagtgctaacattatgagttaaccttaatgcttagtgtgaaaaagatgaacttgccttattcccttgaaaataaatataattttagaagcgctgtccaagcaagttttggcatttggatgtgaatgcctttatttaggaggaactcctcttataataagcctggaaagcccattatttggctaccaggattaaattgaaccctaaaatctgtgtaatcagttctatttcactgtcagcattacaagcagtactggcaagtttgtttccttttcattctgcattgtgaacacttgcaagtctatctgggagtacccatccacatttaaatctctcttcttattaaggaaaaccaagttaaatatctatgtatttcattgtttttgtaaatacctttgtgtctagatacacaaacttgggttatgagaattctgaattttatgggttctaagattaagagatttatgggttctaagattaagattaagagatttatgggttctaagattaagattaagagatttgtttttcttatgtgtgtacaaggtatacagcctcctgccatgtcaactccagtgtgtgctctgggaaacccagcaactcaggccacaaatatgagttgtgtgactggaccagagattgtgtactctggaaaacacaatggtatttgcatttacttttctcggatcatggggtaagtttgtcatgaaataatgaattattgctcaccttgtcccatcttgagtagttaaatatttttaactctgaatttgggacatcatttattcctattaaattttagttttagctcacttgttgatcaataaaacttttctattattccagtttttgttatctaactatattcattgctgtgttttatttctcttactctctcataatctatttttgtagcatcaaaatacagttgttccttaacacaggggttaggggatgccaaccaccattcctcaaccttcatgtagtcaaaaattcatgtacaacttttgacttt

SEQ ID NO: 114887 - DNA, 1045 bp, Homo sapiens
acatttgaaagcaggattaatatgagtcttgtagtgagctttcagatttttattctctgttgttgataaattcttttttttttttgagacagagtctcgctctgtcgcccaggctagagtgcagtggcgtgatctcggctcactctaagctccacctcccaggttcattccattctcctgcctcagcctcccaagtagctgggactacaggacccccccaccacgcctggctaattttttgtatttttagtagagatggggtttcatcatgttagccaggatggtctcgatctcctgacctcatgatccacccgcctcggcctgccaaagtgctgggattacaggcgtgagccaccatgcctggcctgttgttgataaattcttattgaagtctgctagtaagagtttcttgttcaggttatatgataaatgccttttcattaaaagcacaagacatttagggacaagttgtttttggtttgtttgtttgtttgtttgtttgttttggcttaatgacctgaggaagaaacctgaggcaacagtgtagagatcttagtatttcagagccacaactggaattgatacggttaaaattgggagtagttcaaagttaagtatacagactctggattcaaagcacctgtgttaaaaatcccagctccaccactgaggtaaattacttgacttctctgggcttcagtttccttatacattataataggatgtggtatgaggattaatatatgctaaactcttaaaatagtacctgacacatggtaggtattcagtgttaccacttaattgttattttctagaaagcagaaagaccacaggaagaaaattggagacataagccggaaactaagtcagaatctaggttaaaaggaaaagagaacatcctgtaatcctagtgcttatgatgaacttaaaaccagtagtgtttacttgtctttttaacactaactgatttcattcagtcagcaagtatttattgaatgcctgctctgtgctagatacagactttaatactgcatctagcagtaca

SEQ ID NO: 114888 - DNA, 1033 bp, Homo sapiens
tatgatagttttattttgtcctttaagtcttttgatctatttggaatttactctggtataaggtatgactatgtttctagctttttttttttttttttttgcctaaattgatataaatagtagcaacatgattaattaataatctaactttaattctctggtttaaggggcagctttgccggggcaattgcattaagttttctttatagatatatagatctactggaggttgagtagagaagtagatgatctttttgaccagttgtactttttatatcacctcagccattcctcctgcctcagccccgtgatgtgctggaaatacaaatgtgggccaccatacccagcctactttgtattgttgaatggttttttttgtttgtttcatttattttatcaaataaggtagagtcagttgctatcagccaatcttggtaaatctcttgttcatgttctttcttcaaatttcttaggggagccttatgtttcataaacttagacctgtagatcaactgaggcatctacttgtgagtaatgtgggaggagatggagaagagattgaaagattctttaaattacatcaggtaattatatatacttttaaaaaatgtgatgctattttaaacaaacagtgggagtcatagtttatgtaaattgggactggaatactgtaataaatatatatatatattttgagatggagtttcgctcttgttgcccaggcaggagtgcaatggcgcaatcttggctcactgcaacctctgcctctcaggttcaaatgattgttctgcctcagcctccccagtagctgggattacaggcatgtgccagcactcccaactaattttgtatttttagtagagacagagtttctccatgttggtcaggctggtctcgaactcccgacctcaggtgatccgcccacctcggcctcctaaagtgctgggattacaggccgtgagccaccaagcccagccataaatagataatcttaacaatattcctttctttgcctaagtcactgtatgtgaac

SEQ ID NO: 114889 - DNA, 1051 bp, Homo sapiens
acatggtggcaggcacctgtagtcccagctactcgggaggctgaggcaggagaatggtgtgaacctggtaggtggagcttacagtgagccaagatcgcgccactacactccagcctgggagacagagcaagattctgtctcaaaaaaaaataaaaataaaaataaaacaaattagacgggtgtggtggcacatgcctgtagtctcagctacctgggaggctaaggcaggagaatcgcttgaacccgggaggcggaggttgcagtaagccgagatggcgccactgcactccagcctgggcgacagagctagactccatctccaaaaataaaaattagtcaggaaagttatgtatggttttagcagagtgttgcattgctgtatgtaattgcttcaataacacatttacctcaggtccttgttttctattactgatgcataattttaccccatcttcaggtgttaggttatattttagcacttgtccattcagacagccattagcacggcctaatacactgacgctggttcatgtccgcttacctcctggattctcagcatcttcaaccgtggaaaagccttcaaaagtacatagagctctttatagtaaaggtaagttctgaaatactatcagatttaagattatattcttaaaattgttaaaattatatggtgttgtgaagtatttgaaaataccctatggcaacagtagaaactgggaactactagaagggtcagggaagtaggggagcaagggttgaaaaacggactattgggtcttatgctcagtacctgagtgatggaatcagttgtaccctaaaccttagcaccacgcaatatacgcaagtaacagatttgcacatatacctcctgaatctaaaataaaatttgaaattgtagtgaaattcaaaagttgaaagtgtagttttcactgctacatttaggtttttgatctgttttgtgataatttttgtatgttgtgtgaagtaggaatctgacttcatccttctgcatgtggttatctagctgtctgagcaccatttgttgaaaaga

SEQ ID NO: 114890 - DNA, 1029 bp, Homo sapiens
gcaggttctgtttaacttgaattatcaaattgtatcagacttcttttagtaattttaaaatgtatattatagaagctgttgactatgttaattgtcagtaagaattgagtaaggctgggtatggtggctcttgcctgtaatcttagcactctgggaggccgaggcaggcggatcacgagatcaggagatcgagaccatcctggctaacacggtgaaaccttgcctctactaaaaatacaaaaaaaaattagctgggcatggtggcgggcgcctgtagtcccagctactcgggaggctgaggcaggagaatggcatgaacccgggaggtagagcttgcagtgagctgagatcgggccactgcacccagcctgggtgacagagtaagactgtctcaagaaaaaaaaaaaagaattgagtaaacatatagattctgatgataatgcaaagatttttaaaaactgtggagtagctaataaactgatttatgtattctttcttaaataggttctggagttcttaatgatagtttgtctggtggaatgcagttgcttccagatcctttatattctcttcctactgataatacttaccttttaacaataacttccactgataatggcagaattttcttggctggaaaggatggctgtttatatgaagtagcctaccaggtaagtctgacatttgtaaacgtttttttttctctcttgatggagtagggaaagataagcctttattttgttttctaattatataaggacattaatatatttttatggtaaatattcaagcatacagttgaagctgtagtccccatgactacaccatgcctacaaaactcagccctcagaggtaaaagtcattattctatgtatgtcctcgtggaacataaggcacacatcaatgtctctatagatatctatgcatatgtgtttgtgtgtatatacacatatacaaatacaaaatgcacttttgcaaatatgtgttttcacttggattattgatttaattcgtaattgcttttttttt

SEQ ID NO: 114891 - DNA, 1034 bp, Homo sapiens
tgtgtgtatatatatatatgtcattttttttaatgcatctatcgatggacacttggattttgttttcaccttttagttattgtgaaaaacactgctatgaacatgggtatacaaatatacatctctatattttaatatatttaaactattttgtaatataacacttttaaaatagcattaaatactgaagtgattgttttctaaggtggttcttttccactgctattaactttttttcctcttcattatcttgatgacattcaaaatttacttatttaaatgatcatacataataatatttttaacaacagaattgactaaactgcatccagacttttcatataccatttaattagtagctcactttaatggtaataaaagcttactctgttagtgcttaaatgctgaaagtattcctgccctgtgtctactttatcttaggcatctttcaacctcatgtgcgacacctcctggttttggcgacccctgtagacatagtaattcttggactcagctatgctaatttgcaaacaggtatggcaacccacatgttaacgttttttaaaataatagtattttggccaattgatattacagttaaaagctaatctgggtgaaatgttgaattccattgactcacattaatgattattactgccaaatcctcaggctcttttccacaagttaacattgggttagttttttgttttgttttgttttgttttgttttttgagacggattttcgctcttgttgcccaggctgcagtgcaatggcgtgatcttggcttaccgcatcctctgcctcccaggctcaagtgattctcctgcttcagtctcttgagttgctgggattacaggcatgcaccaccatacccggctaattttgtttttttgtttgtttgtttgtttttgataagggagtcttgcactgtcgcccgggctggagtgtagtggtgcaatcttggctcagtgcaacctctgcctcccaggttcaagcgattctcctgcctcagcctcccaagtagctgggatt

SEQ ID NO: 114892 - DNA, 1023 bp, Homo sapiens
aaatacaaaaattagccaggtgtgaagtggagattgcagtgagccaagattgtgccactgcacttcagcctgggtgacagagctggaccttgtctcaaaaataatagtaataataataataaagatcattgtaagataatacttggttttctgtttttcttttcttttcttttttgagacaggctctcactttgtcacccaggctggagtgcagtggcatgatcactactcactgcagcctcaacctcccaggcctttgcgatcctgccaactcagtggcctcacacccccatgcctggctaattttttgtttcttttttgtagagacagtctcactatgttgcccaggctggtcttgaacttctgggctcaggcagtcctcctgcctcagactcccaaagtactgggattaaagacatgagccaccacatctggcctatttgctttatatgtgtaacatgtttttcttcatttattcacagaggagaccttgcctattttgatggacttagtgagactattcttgctgtggggcttgtgaagccaaaagcaggtaagaaataaaactataaggaagagattatgtttgtatatgtaaactccaaatggtatagacctgaacaacaacacacatttttttcgagatggagtctcgttccatcgagtaggctggagtgcagtggcgcaatcttggctcactgcaatctccgcctcctgggttcaagcagttctcctgcctcagcctcccgaatagctgggattacgggcgtgcgccaccacacccagctaatttttgtatttttagtagagacggggctccgccatgttggccaggctggtctcaactcctgacctcaggtgatccgcccgcctcagcctcccaaagtgctgggattacagatgtaagccaccgcgcctggctgacaacacccttttttaaacaattgtattctccattgaagttttattttgaattctaattagaaatatgtaaagtgattattaatgtttaactgtttactt

SEQ ID NO: 114893 - DNA, 1047 bp, Homo sapiens
cctccacctcccaggttcaagtgattttcatgcctcagcctccggagtagctgggattacaggcctgggacaccatgcctggctaattttttctatttttagtagaaacaggtatcattgtgttggccaggctggtcttgaactcatggcctcaagtgatccacacgtctcaacctcccaactttacctatttgtacatatagtcaattaggtaatttttcctatataaagcctatatgtatagttcatagttactttacatttcttgtctgatagtttggattcatagctgagtctggttctattgattactttgtttcttgacactggggttttttttcttgttattttgtgtctcatgatttcttattgaaagccagaaatcatgttaagacagtagatactgtaagtaagtagcaagtggtatttattcttagaaatgggcatgtcttttccttggctaaggtatagcagatctttattatatggggaattgcctttttccaggtcaggacttgagctggatttgggttctgttgttgtacttagggtgcaagttggtttactggagattttttctcagtgttcctcttacatcctcagtcttaggctcttcctgtgattccatccttgtaagatggccctcttcttacccttatccctgccccagcagtagattgctattacttgatgtgcagccctgttgtggagatgtttggaatggggagcagcattttctatttttgtatttccctatttttctagttcatccttagccataagcaggtctggatccctgggtcttggaactgaaacagttttctttgcttgtttattttttcattatatatataatgaaaaatatttttatatattcaatatatataaaatgaaaaagttatatatatatataaatttttcataaagaccaagtctcactgtgtttcccagggtcttgaactctcctgggctcctgcctcaccctcccaaagtgctgagattacaggcatgagccacctctcccagtcttttttttttttgagacgg

SEQ ID NO: 114894 - DNA, 1476 bp, Homo sapiens
tgaggtcaggagatcaagaccagcctggctaacacggtgaaaccccgtttctactaaaaatacaaaaaattagccgggtgtggtggcggacgcctgtagtctcagctacttgggagactgaggcaggagaatggcgtgaacccgggaggtggagcttgcagtgagccgagattgtgccactgcactccagcctgggcgacagtgcgagactctatctcaaaaaaaaaaaaaataaaataaaataaacatttcctttgttacagagcaagttttttgagatatgactttccctttaggcctgaaaccagtaactgttcctaccttcacaagggaatatttcaggactactttgtgttgggtcaaaactagaatattctctctgtacctttggaaccaacacacaacaatttttttgtggcactcaatccttttgtttgcccggttgatgagcagtacattattataaatacttcattttctttttgtagataatcccaccgtttctggcatgtcagatatggattatcctttgcaaggacctggtttgctgtccgtacccaaccttccagagatcagttccatccgaagagttcctctcccacctgaacttgttgagcagtttggacgtatcctattactttgtatttattttaaaaatgttaaaattggtatttttcattcttataattcttgttctatgtttaattaatgtgttatatattcatttaagggttttatttaaaattcgtttaagtatatgggttccatgttgtattaaagagtggacacattgtgattttttacgtaaatattaagtcaaaagctattgaaacaagttaaagaagaataagattcacctctgtctgccttacatccacactacctcagatatgcagtgtaattgcatgatgggtgtgttccctcctatcagcagagcttggctcacaattgacagtgatatattcatgtggaactatgaggatgggtatgtatttaaggctggtttgctttaagggtgattggaatttatataaactttactgtagctagtgttctcattagaagctgcttggtttatctttcattcatctagcctttgggtcagtgcttctcagtatcagtcatctggagatgttcaaatgtgcattctgtcttagtagtcctgagtgaggctcaagagtctgcatttctaacaagctgccaactgctgctgctggtttaggtgccattcttgagtggcaggagcccgggtcccaagctgttagcccgtagtaaaaatagatgttggcaattcattgagagatgattggacatttttaaagacttctgttttccttgcatttctatggagtaggcatgtgatatttatttattttgttgtcattttgtgaatttgacccgtgtgtaaattatatgtatagaaatgattctgagtgaaagcctaaggtacttttgcttaaatacagcatgttggtc

SEQ ID NO: 114895 - DNA, 1838 bp, Homo sapiens
attttaccctgccacaccccaaaaccctcaaccccctcgaaagcatcagcagcctcctagctccacccacaacctctagccccctcccaacagcttcctcttcccaggccagaacggcgtcttccagttccccaccggatgaagcggaagtgcgtcatgtcgaggcgccaaggcgctcgtttggcgcgcgcgccctaggcggcggatctaagctaacttcttggatcttttcttgtttctccttggtttttgactttttctggaccctggtgtctacgatttccgagatgccgtcttctttgttgggcgcggcgatgccggcctctacatctgccgcagccctgcaggaagctctggaaaatgctggacggctcatcgaccgtcagttgcaagaggaccgcatgtacccggacctttccgagctgcttatggtgtctgccccaagtgagtgatagtgaccctgctttctcaacctaaaggactctcgcctgacttcctaatttgctacttatccccagcgttggtcccggcgaggatatgctgagatttatggcactgttggctgcatttttggagaacagcaagcagcttcttttcaggttttttcctttcctcactttcttcattgtagatacttgagagggcaagagtgaagagcaagctcccagttgaagcagaaagaggcaaagacctcaaccttaatgagcttctcgccgctctcaagtgcttatggctaaggccatatgagaagcatctccagatccaagtcccaaatttgttcatttctcctgttagtgtttgagtagatcgtaagagcaaacgaagttaatttggaaatttagcatgttatcttaaagatacgctttgctttatatttatttgtttatttattgagacggagcggttccctcttcgcccaggctgaagtgcaatggcgcgatctcggctcattgcaacctccgcctcctgggttcaagcgattcttctgcctcagactcccaagtagctgagattacaggcgcctgccaccaagcccggctaatttttgtgttttttaagtagagacggggtttcaccatattggcctggctggtcacgaactctgacctcaagtgatccgcccgcctcggcctcccaaagtgctgggattacaggcgcaagccactgcacccggccaagaaacgctttattatgtgtagagatgtgtgttatgaaatgctggaggatcttaaaagaactaccagtggaataaagaaagagaacagggaaatcacagtgcttatgtacagggagagtaaggcagaatatgtgttgacaatataggtgactggaaagtaatttgtttaacagttttaagttataaccagctccccacggcttatggaattacatcagttgctagaaaaagtgacccctttgtgagatggaatttggagaaaaccagcgaagtgtaagaaagaaaagattgttggtgagcaagaaccaaagtaatctaaataggataatttgtgcagtgtaaaccgagaacacttctgattatttataaaaatcattgatagctttgtaatcaaagaaatgatagaaacaaagatagtatttgctccctacagctacttaccaatgagcgtgtcttataatacctgattggcctattagcaattatcatcttgaacaacattactcattttggcctccttaggtgtgaaaacaagatataaaaacagtgcatgcattctggtccttctcttacatatctcatgcctttacacacaccttcctctttcacccagtctcttccccttcttttccatccaatttttcatccgttgctctgatta

SEQ ID NO: 114896 - DNA, 1034 bp, Homo sapiens
tcagatcttgccgggcacagtggctcacgtctgtaatcccagcactttgggatgccaaggcggatggatcacctgagattggtagttcgagaccagcctgaccaacacggagaaaccctgtctctactaaaaatacaaaattagccaggcgtggtagtgcatgcttgtaatcccagctatttgggaggctgaggcaggagaatcgcttgaactcaggaggcggaggttgcggtgagccttgattgcgcattgcactccagcctgggcaacaggagcaaaactctgtctcaaaaaaaaaaaaaaaaaaagaaaatatatatcagatcttgtcacttctctgctccaaacgtctggtttcttcctatcacttcaggttctttgccttggcctctgcaaatcacactgactttatccccttctaccccctggcttgctcactcctctctagccacattgatctttctggttttctttggagacctctattcttattcccgcatggaaactttctatttactctttcttccacatggaataatacccagaacttcacatggctcccttattttgcttggatctgtgctcaagtgttaccttctctgtccatcttatataggtcccccctgctccccatcccacctcttttcctatcactgctttatggtacttatcattatctgacatttttgtgtattggtttattgtctttcttcacataagaatgtaagttctatgaggacagtctgtttttttttttttttttttactgctgtatcctcagtggcttgacagatacctagcacatagtaggtactcaagaaatattagttgaatgaatggaatggccatccttggctgtgggcatggctactttcttcctaaacatttcattgaatcaaagttagcttctgatctagtcacaattattctttttttttttatttttattgatcattcttgggtgtttctcgcagagggggatttggcagggtcataggacaatagtggagggaaggtcagcagataaacaagtg

SEQ ID NO: 114897 - DNA, 1022 bp, Homo sapiens
aataaaagaattatgacatgaaataagcatatgcactatagcaccaacagttcaacagttagcggatccttcttttgtgcaattttctaaacaattaagatgaattaactcatataatcctcctactgctccagtgaagtggaggtacagttatccatcccctttcgacaggtgaggaaactagtattcggaagtgctaagttctctaaggccacgcagtggtaaatggcggagtcaggtttcaaatttagggaagctactccagaatccatgtgcttaaccattatgccctactacactactggttgtgacctgttctgcttctcagggtcatctcgaatctctcctacatttgcctcatgccctatctgtgtaaactgtgaacagtctttggttctgactgtttcatgcattccagaatactttttcttctctctggatgctgatcaatacttagtacacctctattcagtggcattctatgtaagctgtgacgcttgtaaggtactttgtgacagacctatctctttcatcaaggaagacctttttcatttttcagaattatttttccctgtgaaaacagagcattttctccttgtgaaaatcttcactgactcacaaaagtggtgttgaataccttctcttttgtgctacctctgatttgttatattcctgtcttacatttttagtaacagaactgtggagatatcagggtgaagtgtgtattaatctttattctacttctaaaaagatgctttgtttcctaaatgaatcaatcaacaaatattctttgtagagagaaggctaaggatttgaggctttgagaagatggttcaggttgttaatttgtgtgcatgagaatggggtatacatgaggttggtattgccactgacatcctagatgagggactttttcagaaataggaaaaatggtgcaactcagacccagctcagcaggtgaaattctccctctctcttggtggttgtaaaagaaagtcttctccttggggtgggagtgagag

SEQ ID NO: 114898 - DNA, 1041 bp, Homo sapiens
agtgagtaaatgaaggtattagttcattctcacactgctatgaagaaatacacaagactggataatttgtaaaggaaagaggtttaattgactcacagtttcacacttctggggaggcctcaggacacttacaatcacggcagaaggcaaaggagaaacaccttcttcatagggtggcaagacagagtgcgacatgcaagcaggggaaatgtcaaatgcttataaaaaaccatcagatcttctgagactcactctcaggagaacagcatggggaaactgcccccatgatccagttacctccacctggtcctgggaatgtggggattacaattcaagatgagattttgggtggggtcacagccgaaccatatcaatgaagaaatgaattaatgttaagttagtgttattagatctccatagtttcactagaatagactttaattctggttgcctgcactggtagctgtacttcagtgatttctgcgagaaaatagcgctcattttcaagcttctttttggcagtccttactgtcttcccccagcacccagcaactttgtagcagatctttgttattgggtagaggtttaattatggcttatagttgtatgtgaccttagcctagaagggttgtttctgatttgtaagtcatttgaaatttctgtaaggatgttcatcagatagaattgctcatattattttagatatatttaccatcattgttgttattgggtgtagaccacagagcctgggaaataatcctttggttggttttcaaaattaagccaaaacaaaaaatggtatattttcctctcttccattgggactgtagctcttgttatgaattctggtaataaattacttcatcgaagtcaaatagtttatgatgttccttggcaggaaaatcttgaaaatattttactgttatagcaaatttcacactaagctatatttcaaaaagtcattagtaaaagttctggaaaaagaacagtcaccatcaagtgatatgctaccaaaagatggattgctactattttagatga

SEQ ID NO: 114899 - DNA, 1032 bp, Homo sapiens
gcaacttctgcctcccaggttcaagcaattctcctgcctcagcctcccaagtagctgagattacaggtgcccatcaccatgcctggctaagtttttgtatttttattagagatggggtttcaccatgttggtccggctgattttgaactcctgacctcaggtgatccatctgccttggcctcccaaagtattgggattataggcatgagctaccttgcccagccgctagtgggtatttagaacccatttgaggttgatgttcctgattttgtggaattatcaatttgtccatttgtgtaacatttttttttctggcaatacttaatgtagtaaaattataaacattgtgcttagtatcttaccaactttccttttcttttcgtacagccatcagatcaagtcattacagtatagtaacacaggagacatgattcttgttgtatctggaagctctcaggccaaggtgattgacagagatggttttgaagtaatggaatgtataaaaggagaccagtatattgtggacatggccaacaccaaggtaagcattaaacagaatattttaatgaattaattcagcacacatttattaacaactatttgagttatcatgtaataattttccccaaaagttagtgtcataaaacaatagcaatttatttgttctcacaatcatgtggattgattgggtggttctgcttcatacagtatcagctggagcactaggatcgctgtaagatacaaaaggggcccagatggtttgcagtcagtgtcctgctccatggcatctctctgtgtctttgcctcttccttacttctaccccaccccttcccttcttgctggctctctgtctctctgtctttttctcttgccacatgtctagtttgggtcttttcacagtgtggtagtcttaggtgtattagtctgttctcatgctgctaataatgacctatttgagactggataatttataaaggaaagaggttaattgtttcacagttctgcatggctggagaggcctcacaatcatg

SEQ ID NO: 114900 - DNA, 1057 bp, Homo sapiens
gataaaatatagaatttgattttacctcatagtttgaattaggttatgcatttttagaaggactatgacagaaatgatatggtgtcctcctttcttcatcataccaggaagtatgtgatgtcagcttcagtttgtccttgcattggtgatgttaacctagatcacttgtttaaggtggtgtctaccaggtttttccactataaagttactgtcttctcattgcaattactaagtaatttgcagggagattttgaggctttgtaaatattcattttcaaacttttctccacaattttagcatctattgatgattctttcctgaatcagttattactgtgatgattgcaaaatgatgatcttttaactccatcatttattttatgtttatcagtagcattctactaaaaggaagagctttgtttgtttgtatatttattatattagtatacactcaatggtccttgttttagtgaatggtttataattcgttactatcattatttattgtgatgccctaactattccagatttagccagcagaaggctcttcaacgtgtgctttatccttttaacatgtctccatcatctttgtagtactttctttttttttttaatacaacaaaatgttccacgttcatcttgctcgtttcctaccccatctctgtaatcaataatttttgcaagaagccctggttccttttaaggagaggtgattgttagagaccaggatctctgtgttagttttgctggaatatattacttctagacattcttaacatacagaattagagaataactaacacatatatacatatacaacaattttatctacctattaaaaatcatgagttcacattgatacccttaatttctatttaacatcagagagttcattctagtcttccgccttttcacttttgtaactatcttctccaacagggctaaaccttactccagttgtccccagcacatttcctccttggcttagttcttcattatattgaaggcagtttcagaattgctaatgcataccactgcaaaaaagaaacaaatgtat

SEQ ID NO: 114901 - DNA, 1048 bp, Homo sapiens
tgaacataaatgctgaacaataattcctatatagggattatatactgtagaagatgcaaatcagtattttcttttttatcctgaaatcaatatgaaaaatagttaatattatcattagtacatcttgaagtgttaagtcaatttgattttaaaatatttatttatgaatttagaccagatgcggtggctcacgcctgtaatcccaggactttgggaggctgaggcgggcggagcacctcgggtcaggagttcaagaccagcctggccaacatagtgaaaccccgtctctactaaaaatacaaaaattagccaggcgtggtggcacactctgtagtctcagttcctcaggaggctgaggcaggagaattgcctgaacctgggaggcagagttgcagtgagctgagaccatgccactgcactccagcctgggcaacagagtgagactctgtctcaaaaaaaaaaaaaattatgtatgtgtttatttttaaagaagaatgtagaagtctccaaagagttggagagtatacttgtttacaggtttccctatattaacagaggatttgatagaggttgggttgaatttcttctagggatttctaggtcaggcaaggtagcatcaaggacagccaatccactgcatgtttaaattcacacatgattaaataaatctgttcatgtatgatgcaccagtattcttgtgtgtggtgaccctgttggccatttatcaaatagtagtatatgaaggagaatgctgttcctatgaaaattcatgaattgaatttagttgcagggatggaaataaaggtatttccatattgtggactttgcagttcttgaagttcataaagttaaaatatctctttgttttgactttgacttttctgcaaagacttgcatattataataagtgggttttctttttaaaactgtcctttaaatttctaagtttctgtgacttactacatggcaaatttatttgtatactatttctaaatcccttcttttctgttatgtttttatttttaaagtttattttattttttgtggg

SEQ ID NO: 114902 - DNA, 1063 bp, Homo sapiens
tggattattaatttttcttaccctgatacttactgtcataatttggtgtattctttttttttttttcttctttttctgtttttgagatggaatctagctccgtcgcctgggctggagagtgtggtggtgtgctcttggctcactgtaacctctgcctctcaggttcaagcgattctcctgcctcagcctcccgaggagctgggattaccggtgcccgccaccatgcccagttaatttttgtatttttaatagagacagggtttcattgtgttggccaggctggtctcgaactcctgaccttgtaacctaccctccttggcctccctaagtactgggattacaggcgtgagccaccatgccaggccaattctgtgtattcttatgctacactatcctcatcactaagcaagatgtattgaacttttcttataatttggcctggcataatttatcatatcgaatttattcttagcccttctctactcttccactctctctcttctacctcctttctgtcttcctcccccacttttcctctctcatgctttttcctttacccattctcctcctccttcatctcacttaacacaaatattaatccagagcatattcctgtaaagttttatagaaatattgatttatttgggtgttgattgccagaaatgtgttagtcagtaggagtataaagctttttgaggccgggcgcagtggctcacgcctgtaatcctagcacttcgggaggacgaggcgggtggatcacctgaggtcaggggttcaagaccagcctggccaacatggtgaagccccgtctctactaaaaatacaaaaattagctgggggtggtggcacacacctgtaatcccagctacttgggaggctgaggaaagagaatcacttgaacccaggaggcagaggttgtggtgagctgagatcacgccgttgcactccagcctgggcaacaagagcaaaattcagtataaaaaaaaaaaaaaaactttttgaaagccttaggaaattatgaattgactcttactgtcccttaataacataaactaattgtttt

SEQ ID NO: 114903 - DNA, 1053 bp, Homo sapiens
aggggatgagatcaaccaggcagggagcttttcacttttgagaaaaggacccaagactgaatcctgaggaaatgacgatatttaagagacaaagaagagtccacagagtgctaagatcaaccaagaaataggaggaaaactgagagtactgtcacagaactaagagaatgtgtcaaagatctgagaatagttatcaagatcaatggctgctatgaggccaagtaaagtgttgtctgaagaaatgtcttttggttttagtaacatgttcgtaccctttgtttctaagcacaacttgttcctcccacttagaatgttctttacccatttttgtactggctgaacacccagtcttccttccagatgtttctcaaatagtccctcctctatgaagccttccccagcaaaattattttcttgccctagtttgatagctatagtaacacatataaggttctcatagatggttttgtgtacatctctgtgctctgacaagatattgaattcctgagttcaccaagtttgtatgattttttttttaggactggcatcttgtgttactcatctttttattcttaatgttccacacagtggctggcaagtaggtagtgcttgaaaatgtttgtggatttgaaagcttgattttgaatatggccttaggcaaaaagcagcgtttcaaattgcatattaaaagtcacttcaaaaccgaaatttctaagtagcgctgcctattggatgaactttatcatatactcttttctctaacaacattcaaatacaaattgcaatctattccaaaagatgcattgctattgaacataggagaaggaggtagataggtaataatctataattggccaagaatagactagtcttgtactctttagtaagtgtttggatccaaaatgatctttcaggaaagtgccacaatatttaacagtcagtcaaagagtctgttgttgcctagatgttggaataaatttgataacttctggaggattattttaagtccatgtattcatttgtttaagttaagtatattaagccacttcctac

SEQ ID NO: 114904 - DNA, 1118 bp, Homo sapiens
tttgttacagtattagttagtaactaatagttactaggtatagtaagggtcattttaagttatagaatgggtcatttttagaatgggtcatttttactgttgcattctggtcctcatttctggagtaaatttaagagttgtgctgtccattgcatttagactagttaactatagggataggtgaaaaccaaactatgaaagcaagccttttaatatttcaggaaaacgtgtattgattacagcctctggaaactggactaacaatactgtaggaatacttttcgaagtccctgtatcagatttccctatatcagcaatataacataagaatgctctgcttgcttagcagtgtctgacccaattttatataatgattatacaaccatagattcacacacagttatcttttagatgttaaagtagaagggtatgctttgcaaccaggttgacctggattagaatcctaactctgctactactaactgtgtcaccatgggcagattatataacttctcacatcatctctcaaatggggataataaaagtaaccatggtaaaatgctgagcttagatgagataacatgtgtaaagcccttaacatagtgctgatataatacagacctaacacatgtttagctttgattcatattattgtacctaatggtggagctgtaagcaacgagcatctctgtgattgttggtgtaatcctaaaggtcttaagtaactggaaaacatatggagagtatgccaagtttcatcttgtttcagcatgggctgtccttgtgcgtagcacttctttaggatgtcgccaccagtactttttatcaaatagcctgtttctgatggtaaaatgctgcttaggtggttccacttgctctgttgatcctagtagttcatagcctctgtgcaaagttttaaaagcttttctggatctactttattttctcatttgaactctgtgccttagctgttggtgattttttctcctacatgcagttcttccgcccgtacacatagaaaatgtatccccctagagttatttaagagaatagaggctgggtgtggtggctcatgcctgtaatcccggcactttgggaggccaaagcaggtggatcac

SEQ ID NO: 114905 - DNA, 1142 bp, Homo sapiens
gccatgctggccaggctggtctcaaactcctgacctcaggtgatccacccacctcagccttcaaaagtgctgagattataggcgtgagccaccacgcccggccccaaattcacctttttacatatggataaccagttatcccagcatcatttgttgaaaggactactctttttacattgaattgttttggcatctttgtggaaaatcaattggccataaatgtaagggtgtaagtggttatttattgcagcattcattcctaagtctagatatcataagacctttttatttttccaaaccctttgattgaatgaatattctgagtatgttccagagccatgtaacttaaataactgtaagtagaaaacatgagcaccaaataaatttctcctaaatgcaactgtattcttagtgcaattactgtgtacatgtataaaaattgtgtccaaagtgtttataaacattactctgggttttatatagaagttagaacattttcccatttctgtgaattttaatatcttaatatttgggcattttttaaaagaaggtcttccttgttagattcattctgccaagcaagcctgcaagttttagacttttatatcactcaagttgcttatgtagtccttcaagaaaaattaaaccaagatctctaaagtgatttccatgcaaaattaatgcttccctttacctctgccaaactctgtgatgcatttatgcggcagatgccagaaagttcagaacttgtaactggaaagaattcaaaattttaagacagaaagcatttgcgcctggggcaatgtaatgatcccacctgtgtcgttttcttgtcttctggatgttttcattgtgtgtccagaaaggcccaggcagatccttattctatttttaaatcttttttatgaaacacagttttaattttacaagaccagatctcactccaagtttcaaaatatgtgttcttcagcataaaatgttttgacagatatctaatggcctagcactttagcatccattttttaggcatagactcagagaactggagccataaaatcatagtgtaattggtcactatcagatgctggataaatttgtacttctaggtgaactgctttctttccctttcccttattgtgaaa

SEQ ID NO: 114906 - DNA, 1050 bp, Homo sapiens
ggaatgatagaatccatataaataatgaatacaaaagcccttggctagttctgtcaattaccaataagctgtaaaaagcttcttgttttatgtatagatggtaaaacaaagatgtttgttaaatggaatgagtctagacaccagtgttaaaataaaattctacacaaacacattttggatatccttattttataaaagtttctggccacattattaattcagtaaatgtttactacatactataaactaggcactgttctaggcactgataatacttatcaaaaattcctgtcctcatggagttttcattctagttaaatatatatgcatatattccacctttgtctatcaaatatttacattttgaaggggatcccaggaaacacaattgttttttcaggcagatgtgttggaagaaggttaaaaagtgttgatagacgggaaaagaatctatactgataatgctgaaaatatctttggcattttctgtttgtcagatctttttatttctgttttcatctctactgtaaacctcataaagcttcataacagcatagagatcttaaaaacttctttgaattgtaaactgagttttaaccaagcagtaaattttttagtaactggttttcatcatctctgggtgctgttaacttaaacacagaaattataaaacatgcagttttcttgtgtagctttaatagtagtgttttttgtatagtgtatatgtatgtgactttctcttaaaacccatactttttataaagttgaatatagtttttaaagatttgtcttgtgtatcttgaaataaggagtatctcctattttcagttttgtagaaagaaagccattggaatgccactttctaacaagtatctcttaaagccattcagctaattacagtctttgattgttttgttagaatgtatttaataaatgaatgtaagtttattataccatatctcatttgttatattttattcatatttttacatttggatacaaatgtgtgtcaactggaaacaaatcaagttgaaaagaaaaacttgccag

SEQ ID NO: 114907 - DNA, 1049 bp, Homo sapiens
tgcccaggctggagtgcagtggctcagtttcggttcactgcaacctccgcctctggggttcaagtgattctcctgcctcagcctcccaaggagctgggattaccaggtgcccatcaccacgcctggctaattttcatatttttagtagagatggggtttcatcatgttggccaggctggtctcaaactcctgacctcaagtgatccaccagctttagccttgacatagggaaaagtgaaggaggaagtgggaaaaggttgaggtgggtggatatatcagatcaaatagggctgttttggctatgtagagtttggatactcttctgaggttaatgagaaaccattacatggattttaggagaggagaggattggcattattcaagttacatttttaaaagaatcattctggctgttctgcatggagaataactacaagaagagaaaggtggaagcagggtgactggttaggggctattttagacataaaggtaaattcctggacaagggttttagtggtgaaggtaatgtttggattctgaagattttttgaagccagagctaacaaatggataatgtaaggcttattttttacagaattttaaattatgcctttttaaaaaagagtcaggcaatgatataaaatagataatttaatttggaaaatgattttataaaacgtatttgctcattccgtgtcatggtgccttattttttaatggttaatgggctctttgaaagtgaagaatttgggttgcatgaaataggggaagcatgttttgaatttgtgttattctagccaattttgatcagttaattttattattatctggtatcaattggcaatatggagtaaatgctccctaattcttaaaaaaaaaaaaaaacttttgacatattacaaagcacaattagtcctctgtggttatctagatagggctatgtcatctaaaatgttcagactctctgcaggatgactatagtctctaaaaagcctatataagggatgcctctctctagtagagatatttcctgagccatgtttctcagc

SEQ ID NO: 114908 - DNA, 1019 bp, Homo sapiens
ttaataaataggctatattgtgtgtggtttttttcattgagagaatgatggagttaaaaataatcacaataataattttaaaagaacatgctgacatttagatctacagactttctcctctaggctataaagtcttaaaagtaggtcatactttgggtttaaactctgaacagatacttgctctctatgttagcttaccttttgatcttaaagcagcatttattcttaacttcagtaaattttaaattgtccttccaaatttggaaattctgtatgaaatgaaaaatcaccagtcatttaaaggagaaaattaaagaaacaagtttggcacttttctgttctgtctccttgaagaattggaacttttctttctatcagtgatctaagctagaaatatgagacagttaaaaaaatacggaagttcatcttcacttgaataaaattgaggtttgggtagcgtccttaaattctctataggttaaccagatgatggtggaaaaagagaatgtctgtaggttacatcctgcctcactgagttagcataatcgtcaattcacttgcttcccagtactctattcattacaagaaaactgctgtgggtctttggaactatttttcctcagctctatgatcactacaaaccaatgacctttagccttttctcttttatttcccttattcacagcatgcttttttccccctgacacaatttcactctgtcacccaggctggagtgcagtggcacgatcttggctcactgcaactgcaacccaccccttctgggttcaaacgattctcatgcctcagcctcctgagtagctgggattataggcctatgccaccatgcccagctaatttttagtagacagggttctgccatgttggcgaggctggtcttgaactcctgacctcaggtgatctgcccacctcaacctccccaagtgctgggattacaggcatgggccaccacacctgtccacatcctttttttttttttttttttttttaagacagactct

SEQ ID NO: 114909 - DNA, 1009 bp, Homo sapiens
ggcagagcttgcagttagccgagatcacgctactgcactccagcctgggcgacagagtgagagtccgtcaaaaaaaagaaagagaaagaaaaagaaagtattggatgtaagagacagatgatatcaaggactacttggtaaagagtcagagatgatgcttagtgactgagaagagtattgtacattaatgaaaaaataggaagtcaagactgggagatgctttggaagtaaaaatgtatgcgtttagctctaggaatattggttggaggagatatagtacatgtaagtggagatattcagtatcattaacataaaaggctttgagagcaaggtatggaatagaatgagattttaatttagggattatttgcatggtaggtaattgaagccctttgcattcttgagctcttggggcaatgggtatggaggggagagcagatgggaaaaccatgcatatatttgctcctttacatactctccgtcctgtgctctggtccctgttttgaggaggaaaagaaactgttctttataactactacccatccacccacttgtttttaaaattctgccttgaaatgcaacatttccttcaacaaaacttcctttcagaacttcaatctacagaatgggcttcattttttttttttttatactttaagttctgggatacatgtgcagaatgtgcaggtttgttacataagtgtacacatgccatgatggtttgctgcactcatcaacccgtcgtctacattaggtatttctcctaatgctatccctcccctagccctccatcccccaacaagccccagtgtatgatgttcccctccctctgtccatgtgttctcattgttcagctcccacttatcagtgagaacatgcggtgtttggttttctgttcctgtgttactttgctgagaatgatggtttccagcttcatccatgtccccgcaaaggacatgaactcatccttttttatggctgcatagtattctgtgatatatatatgtgc

SEQ ID NO: 114910 - DNA, 1011 bp, Homo sapiens
aaataaagttttgctggattgcatagccttatccatttgtttatgtattagctatggctgctttcatgctacaacaggagaagtgaacagttgcaacagagtctgtatggtcctcaaagcctaaaatatgtattataagcccctttctagaaaaagtttgctagaccttgctctaggtatatgtttctccagtgaggtccagagaatgttagttcaatccatgctagtctgtacgatctgaaaaaaaaaaaaaaaaaaaaaaaaaaaggttctatagtcaaataagctttagaaatgttaaggaggttgatttattctaggactactacttaaaagactttggcttttaatatactcatgtttattgtgaatcttcaagacaaggccatggtgtgcaaataaactctagtttcgcaggcttacttggctgtagtcccctaatatgatgatgttacaaaaacaaacaaagcaaaacaaaacaaaacaaaaaacaattctctaggaacccttgctcttgggctttctctctggaaggactttctttctaaatcattcctcttggtgatttaggtgatatcctcatttggagacctacagaatatcatatgaaattctgtgttagttgtatcatttttttcccagtaaaaattatattttgcttagcatcagaacagtaaaatataccagatatttaagtcatctaatcagataatatctgcctttttgaatgattctgtatgatgtctgaagattataaattagagtctcaaagtccaagaaagacaggatgtttcatttcatgccttcttgaaattctaaaagcatgggtcttctgtaggacttaaaatgtttttttgcattcagatttctgaagcataaatttagagtgcctaagtgatataccaactggtctcaactagggtttataagaagagagattaatgtgaaggtaacttgtgcattagccataaggggtttgttttatagactaaagtaaacaccttcaatttc

SEQ ID NO: 114911 - DNA, 1007 bp, Homo sapiens
gtgaaattagtactttgcttataggtgtgtattattttcatcgtaataaagtgaaatgttcttgccacaaaactgttctcttctgaattgaggtgagatattaacactttgtttgtctttgtgaataggttcatcctaagttccactataaacaggctcatgactcgggcacagacacttcttgcgtgactttttcctatgatggtaatgtccttgcctctcgtggaggtaggttaaaagctttctttttgatgtatttctctatataaaataatcatctttaacaaatatgacaataatatcctagtgcttagtaaagcttgctttgatttttgttaatgcacctttgccagtctgatttcttcattaaaatacatttctaactttgcaacattgtttgtattaaaaattaccaagtaaaatgtttaaatatttacttttttttggcctaagtttttcatttagattcaaattccataagagtttgaagcctccacaaatgatccttgcttctgccttgggaagtttatagatgatcacctatattctttctataccattttataattctgtgtctggtacttcaaagtcttctatttgttgcttgaccattgcttttttttctctgccagttcaaatactaacccaatttagtttttttaaaaaagtctatatctagatgagatttttaaaaacagttctatatgatcatattgtaagtttacttatccacatttgtatggttggatatagcttcctaatttttttgctaaatctttatcacatagataggttgtgtattggtagaaggagatggagaatagtgaaggcagcattatgggagagtatgggacatagctgaagattttcctacagacctatttgtggggagagaaaagaaatagcatggtaagtagtttggagccatgttacagagggtcttaaatatcacataaggaaaagaaatactaatagcatggttaagtagatgggaactatgctacaga

SEQ ID NO: 114912 - DNA, 1002 bp, Homo sapiens
cagcactttgggaggccgaggcaggtggatcacttgaggccaggagtttgagaccagcctggaaaacatgatgaaaccctgtctctacgaaaaatacaaaaattagctggatgtagtggcgcatgtctgtagtcccagctactcgggaggctgaggcaggagaatcacttgaacctggaggctgaggttacagtgagctgagatcatgccactgcactccagcctgagtgacagagcaagactctgtctcaaaaaaaaacaaaaaacaaaaacaaaaacaaaaaaaaaaacagactaaaagcaataaagtaacattccaaaggtgagccttacaaagttctcccagtacaagcaggtcctgagtccagccaattgtggattagtgcacctgccaaaagttgggtttcagaggaagcttcgctgtaaaaatggggatttttactgaactctttactctcctcacttgcacctgattctcattccttattggacccaaggggttgaggcaggtctcagctgtgggcactggggagaaagaacagcgaaaacattatgtatataagtttggcttttctgttcaggaattcgtcctatagaaatattaaaaagggatttttaaaaatttatttttaagatacatatggaatacttcacaaatttgcatgtcatgcttgtgcaggggctatgctaatcttctctgtatcgttccagtcttagcatatgtgctgccaaagcgaacacaaaaagtgattccttaaaaatactcattattctttaaatagcttggcaaagctgtactccccagcaaagtgaagaatgatagctgtaggtagaattacactggagagaagggaatcacatggctcacccttattaatgttaatggatagctttacccatacaccagtgggaaaaggaatctgttgtggattgaactgttttcagtcctgatagttgttaaattaaactcttctcaagaagtaacgtatgctcaaatacacc

SEQ ID NO: 114913 - DNA, 1050 bp, Homo sapiens
tgtcttttttttttttttaaagcagaggaagacacattcagatctaagttttgaaatggttaattcttgttgaaatacaaggtttagttatataagatttggtgagtctgtgtagatgaagccagaaatttataatttgggagactgggtgaatgttcattgacgtaaaaatacatagagataaaataaagcagattttggaagaaagacagtgaattctgttcttgatatgttgagcttgaaatacctataggacttctgtgtagagatactcagtatgcagatggtttaataagtttggtgcataagagaaagaagagacagttttggtaaaaacatttatagtgcatagttgaaatgttgattgctgatgagtttgattaaggtaagggaataaaggatagaaaaatgagccctaagaaatgtcatcatttaagagacgagcaaatgaaactaagaaaggagaaatttcattaaataaatagaacatacaatattgaatcatctgagaaaagctggaagacaaattatgagatccattgtaatagatggatgaagagagaacttcaaataggaacaaaaccacacaccccaaagagtcctattaaattgttgatttagtgagggtgaaggcttgttgttattgttaacatcaaacagcatcatttttctgtttatatattagaatgctatgttaaataaatggggcttttaacagtccgtttgacctattgtcccaagttttacgtcttcttggaatgtaaaaaaaaaaaaatacatttcttggaatgaataaaaggtggacactttgctagaagagccaaaagacacctcttttataattttgtgttggaaataccacactccaaggtagtaaggaacttaactgtgttgagttttaatttgcataaaaggcagcatctcagattcttaatatcagcagttagtagtgtacttgtttgactaaggcacagacagtgatggcattatgtctatcctagatgtgttcatttactggacacatataattggttacgctcttcccacgcc

SEQ ID NO: 114914 - DNA, 2081 bp, Homo sapiens
ataggacagtatacctaacataggtgtgtggagcacttgctcactgagaacagaaaggtggagtttcagagcactggttgtttcttggtcttccaagatgtatgaatatttgataggaaaactgggagcaagtagaaaatgatggagttttagtgtaaatttgccagtacatgtttctttctctgcccctatcttttttccagggtcaagagccaacttctagcatggcttattaggacaatgttttactgtcaagaagtgcagtggtcactcagtactgctatctctaggagtattttctttaatcactgaagaaaagagatgccagtggaatatggtgaaaaacaatgttgcatttttgctgccttcataatttggactacaagaccaccttgaaaaacttaaatctttttggggaatttcctaaagcaagcagcatacacatataatttaaatgggaatttgaattcagctgggctcacctactaagccagcatcaataagacttgattaaattacttcttggttctcattcacctagaggtatcatattatgaaggttccagagcagttgttcttcagatttgaagaatacagttgaatgtttatttgtaggcacatgagagtaaagaggaaagatacctcagatttcttggtggtttaactgttaatatctacgatatcaaatcttaacatgtttttagttagggaagatgacaggaactagtttagtgctgattcctttttattattttaaaaaattatgatactgtaaaattgatctttttaagaaagcatacggttctgtggtttttaacacatgtatggattcatgtaatcactatcaacacaatcagtatacagaagagtaccccctaaaaactcctttttgctatccctctatagtcacacacacaccccctcttccacccccaactcctaagccctggcattcactgatgtgttctccataattattgtgttgtggtttcaagaatgtcatataaatcagcggtccccaacttttttggcaccagggactggtttcgtggaagacaatatttccacagacagggccaggattagggtgaggcaagtgagatgctttcctcaatcacaaagtttacagggacactaagacacttagtaatcaagataagtaacattttaatgcaacaatataaaaaatgcaaaaaatctatggtgaataaaataccaaattttaaaataaaaatgggatcagtaacagtgctgtgccaagctgtattacagcctaaggcaaaaggaaaactcagttggactgatcccgtctttatttaaaatgttgatgttttgtttgccatagattttttgtttttatttatttattattattattattggtggaggctagagttggggaaatggtaactcacttctgcttgactgatactttgaattatggacttcttcccaaatccacctactactgtttacttttcagagtcctcagataggtctctgaaaagtatgtaggtctctgaaaaaccctatgccttctgtcctggtttttaaacaacattcagagggagagactgaatggagtatgtttctactgtctacaatggtgatggaaaaaacaaaatgaaacagtacagattatagcaaatgtgcttaggaggaagcttctaagttagctgcacatttggagggacattcatatggtaggaaataaaataatgtcattgctcctagaatgagtcacccctcttacttgggcagtatgttcccttgacataactgtgccacaaggcagagctactggcttttgcttaattagctgccattggtattaagcatacttggcccagtttctcaatattattttccagagctcattcctcttgcctacctgcacactacgacgtaactctcctgtataaaaattagacttaacagattttacaacttccctaaagagttcatttctgtgtatgaaatcccttaccgtcagatcatttttttctttatttttagcctcacattctcatgtttagagcctacatcctttgctctggtcctcatggagttggagaacagct

SEQ ID NO: 114915 - DNA, 1051 bp, Homo sapiens
gtttttaaaaatcaatttggaatttcagtgcatatattttttcttttttttttttttttttttcttgagacggagtctcactcggtcacacaggctggagtgcagtggcacgatctcggcttactgcaacctctgccacctggattcaagcaattctcctgcctcagccttctgagtagctgggattacaggcacctgccaccgcacctggctaatttttgtagttttagtagagacggagtttcaccatgttggccaggctggtcttgaactcctgaccttgtgatccacccgcctcggcctcccaaagtgttgggattacaggcgagagccaccgcacccggccacattttcttttaggattgataaaagaagtatacatttattttaattgtctactactttaaaactttagatgatccttttttcagattcattgcaaatagccaggttttgggttcattagaggaaacacagatttactgcagatgcttaaaatactggtaatttaaactctagtgaatataatttgttttggttgttacactgttaatgaatatgatatgtttcctggatctattttgtaaaatatactctgtgctttgaagcaaaagttatttgtttgaatttgacactttattttatcagaagtctaatcattactcttcattagaataggggacaaatactgatgtgatatagtacttatcactttgtttttctcatctttattatctctttaaaaaaaaactttttaattttatttttattttttgaaacatagtctttctctgttgcctaggctggagtgcagtggtgtgatctcagctcactgcaacctccacctcctgggttcgagtgattcttgtgcctcagcctctctaatagctgggattacaagcgtgcactaccatgcccagctaattttttttttcttagtagaaacagggtttcaccacgttggccaggctggtctccaacccccaatctcaggtgatctacccagctcagtctcccaaggcgatgagtgagccatcgcgcctggcctcat

SEQ ID NO: 114916 - DNA, 1018 bp, Homo sapiens
gaagaacaagttctataattaaaatgcatcccgggatagtatttttcctttttggaaatgatagatagtggtcttgtaggaggatgggttgtgagacccccaaaggactgaataaaagagtatgatatttaaaacatctttacctgtactatagtaagataaataatattttacatatcctgcgtagttcgtctatacaggaagattcagcttttcctgtgttttcttggttttacatacttaatgatttccaagatctgattacatatatttcttatctagcagttagagatttaaaaagtttcatgcattactgttttatttatataaacataggattgatggtcattatctttatgcctatctctgttgataaatgaagaaatgtaaaggagcccaggtctgtgtagaccaaacatagaaaaaccaggtggagttgggtttacactgtgggtcttaaatgaagagaaatagccatatagtgcttcccatgccttctcacaacctggtctccataataaatgataatatgtcatataaacagataaggctcctcttctctagaaatgactagccccagtgccccaggctcctcttaggcatgaggggctccatatcttgatacacctaccatatcttggtatcccattctgtgcccaccagtgggaagctctgctgcatctaagtggatcccatgaggtgggacctctggggtcatttgccttgcaggacgaccacccacctgggtcactcaccctgtggactcctgttcccagtctcctgtttgtttcctactcacagactatcattaataagaataattaccagactttcttcagtctttacttatgccttctttgccttcacaaattcttctcaagtaacagggttggagcaaacttttactgttttgaattagatgaacaaaattgtatttaattttacttcccaagagaccttccattttctctgagaactttttctcatgatgaaattctttaagcaggtttattatcag

SEQ ID NO: 114917 - DNA, 1478 bp, Homo sapiens
ggcattttttcttttcaccattgcactcctatctggcctattagagaatttttcaggatagggaagggagaagattgagaagatttctggcaaaaaaaaaaaaaaaaaaaagacagttgccacaagtctggcccatggtagaatttccttggaactggaggaatgtggaggaggggaaaaggagaggcatatgctcacttagcaagatgtgtagagaaaatgtctgcctttaaacttttccattgaggggatatctgtagagatcaggaggtggtgatgagtcttagttattggagactggggcttactcaccatgtttgcttcctgaacttcagagggatgaagccaagtcttgtggcccatgcatgtggcaaggccatcccaagtttgagaaaagcaaggctttgggagagagtggagggaacaaagacaggacaaatagcctggaaaagttgaaacaattcccattttactctcatacttccctggcccaatattttaatatagaaaacagtttttctttctctgtgaagaatatcttgggcttgtggaagtctgaagaaagttctttctccagtattttttttgtttttatctgttttctttttatttgttttgggttcacatcttgatcttctttcttagtgtctggaatctgcacacacaaacacacacacacgcacacacacacacccattcaaatgtgttggatagtcccaaggatgtctgtaactctaagactgcctctatacaagtctgcaaaattgtgtaacagactccttcacggacaggtgtcaggcttttcatttgaaaattgtgaaaaatgcttgttcagggaatcactgcattagcttatccattcttgtactatatgacaaaaaccaaacgtgaaaaaaccagatggagtttggtttacagtatgggtcagcagctgtggaggatccggaaatggagtttcaacataatcatgtttaaggtataaagttatgaaggctgttggctttcttttagcatgtagaataagggcgttgtttagatatgtgcattgcagatccctaagatgttacgcaggcattgatttcttttatagtaacatttgtgaactgggaactagtgggctttttaaaaaaatgattttagtaataactcctttttaatacaaacttgctaaggtttctactgggttaggtgggtttggatatgattaaatgtcagctaccttctttctgccccatctttccaaatagggctttgcatggttaagtagtaagggaatgaacagtggagttggagaaacctgcttattgacccagctcctctatgtgcgagttattatgtgaccttgggaaagttaccactctctacagcctcagtttcttcatctgtgagatgggatgagattattaattttgtagtatttgtgaggactcaattatattaaataatataaagttccagtacctaataattccctttct

SEQ ID NO: 114918 - DNA, 1013 bp, Homo sapiens
tatcaggcctacattgtggatcttttccaattctgcaccctgctcacttgaaaacatatttgagaactagtaatcttagactgctgagccagacctctagagaaccaagaaagagaaataactctaatactgtgcccttaatattgtcctgggccatttatgggtggctgagatttctgaaagcctttgacagccgctttcattattctgtgattcatgtacattctctctctctaggaccacattaggaggaatctaaccctgctacatttgtaggatacctgagtataataatgatatgaggaaatcaaattatttctcatggagtaatgattttaatttgaaaattgtctccagctctacctagcaaagcaatccatttaggcatgggtgaactgtagcttttaattcattcctttggtgaacattttttgagcaccagacactaatctaggcacttgggatatgttgccaaacaaaactgactgagatctttgcccatgaaatatgtgttctagtggggaaggcagacaatcagcatcattaataaataagttatatattatattaaaagatgatacatgctataaaaaaagaaaagcagactaaggggagttctggggcacagttttaaattgggtggtttagatagcaatgacatttaagcaaagactaaaagagatgagtcttggctcagatggatttcttctacatagggtttcataaacatgacttcatgaagttatgtttgtgactctccttatgtttccatatacctggctgtggccatctgggaatttccagtggtctatctcaaattagtctcagtggtggagcacctagaagctgcactttgtagaccatgagctattgatatacttaattacatcttcccaaccaggagcaattttattaggagaaaatgtgacttttatatgtatgcattataaactaggttttacaagcataggtacaaagcaacaacaaccccccccccaaaaaatacccaaact

SEQ ID NO: 114919 - DNA, 1050 bp, Homo sapiens
gactcttttcagctttctccttagttcctctggaatctcaggtaagggtttgcagccatttacctatttttttttggcctatttttttgccattcacatgggagtcagaatttttatttctttgtttttttctttctttctttctttcttttttttttttttaagagacagagtctcactctgtcacccaggctggaatgcagtggcacaatcatagctcactgaagcctcaaactcctaggctcaagcaatcttcctgcctcagcctcctgagtagctcggactacaggcgcgtgccaccatgcccagctgggaatcaatgttctatcaaaaaggatctgagagatttcaagatattctgtcttaacaaaagagtggaatgagtagagacaaggaaccaaagaaattcagcccaaagtagatttaggagacgtagtcatgattttcattttaccactagaactataaaatgctaatatctaatcatacccttttcccctttagtccctatatatagtttgacaagtgatagattattaataaacattgaattaatgcttccactcatatcttgttctatcagagtgagttctatagaacctagtacatggggtttctgtttactaacattagcttcatcttttttccctttaattctgtccacgctatccctcccacctctgccctcttaccacagacaaaaattaaaaacaggttatagttctcactgagaacttgtggttcttttcagccccagagcaccacttattttccttaccagtaatgaattcataggatcataacttccagtgaaccttctcttaaacagcttttcatttaggttaatgtcaagtctttgtattctgtatctctgttttacttctgctgttgtcctgctgttttatctcatagatagggagacattattaaatgcctacaaatgtgcattgtttctgaaaaagctttatgagatttggatctttgtgaactaaaaacaataaccacctggtctcaatctgctgtccagagggacatattgtatgtgtgtaa

SEQ ID NO: 114920 - DNA, 1065 bp, Homo sapiens
aatccaattctttatttattcatgcaaaagagatttactgaacaccaactatgtgttagatactgttctaagttgtaggggtacagccattttatggagcttatatgctagtagagacagacactaaataaatatataaatattaaatggtaataatgctaagaagaaaactaaaagagggatatatcccttttataaaaagataaaagggggacatagataaaagagggataaaagggggacatagagtaatcaggcggagaaaaggcgctattttagatacagtggtcagggaagaacgtctacaaaagttacctttgacctgagtgaaatgagggagtgagccatgcaaatacctaggggaagagcatcccatgcagcgaacacaagaggcctttactgaattccttcatctctatgaaagtgatcatggaatttttctacttcgatctatgaatgggatgaattatattactagatttcctaacaccgagccatcctggcatctttgatacgaccgttatatgattgtagtttattctttctaaggtgttagactggcttcctaaaaattttgtgtatttttcttttctatatgtaccctcaaactgttttgaatacatttgaacttatccattttataaagatttgatagaattcacctgtaaaatgtgaaagcttttgtggagtggagggtgagtagtaattccttaatttttctctcttttccatcccctcctggcaaatagtctattctgagttttctgactcttctgaggctgcttggtaattaatattttcttggacagtcattcattcagattttcaactttctttaaataagaattaattgcagctgaaagtgtttttgttcactttcaaaatatctaaagatatttttctgcattagagatgattcagttatgtttacaaatgaattcgtgctagcataatagcagctcttgcaaggtaggtagatcaggcattgtcatatcctcactttacatgtgaggaggctgtagcttagagatctgcaattaacaatgactgaaactagaactagac

SEQ ID NO: 114921 - DNA, 1047 bp, Homo sapiens
catgtcaaatcatatgtctgaggtcacagccagagagggctgcatgacagcacccaagatctctaaacatcagtaattaacaaatagccccaagttttctgttccttttgaaaaacacttcattcagaatcaattacagaccaatattttgttccagctgcttagaatgtataaatttattacttcttgaataaaatttactgaaagcatctcacattttcccccatcttaacataaacattgcaccatatggaagtattcgtcttgtacagccaaaagttgcagtggagggttggaggaggaataaaaacttgatcatagtggtcttggcggagtcagctatgatgtaagggaagagaaaggcaaatttcgcacgaagatgattttctcatcgttacccacaacacaagtgggccttttcatatttaagaggatctgtctcactgtagagagttttataaagaattattttttccacagaagattggcaacatgcacatacggatttcaatttcaaatttggtaagggaggagtttagaaccaggaatggacaaatagtgtgtgttcatttgacctgcagtcctgtcaccagagtgggcatcaacagttatttatcttacagtccctcacactccccatgtccctcaggcctcgttatcttcccccatgcaaccttgtatttggtcgccttcatttctagttgctcgaaggaactggcagtcatcctaatgactcctccctcaccccccactcccacccatttaattatttgccagtttcttcccatgctgtcttctgaatctctcatatttgcccttcctctctttccctaccacccctctagaatttagaccctcttttagccttcaccagcaccactcaggagcctcctgcccaaatgatcttcctgtttttcattaggtcctcatctaacccatctttcattctgtcatcagagttggccttctaaagtcaaaatctgtcatttcattcttttgcctagagccttccagaagctctatgtcagtactcatgcgtttatgtgg

SEQ ID NO: 114922 - DNA, 2379 bp, Homo sapiens
gtgtgaggttaactgattcagaactcattctcttgataaactatttcttgaaagcatttattttaagtctttatttcctgctgaaatgaagtttcatgctgtcatgcccatcttatttattctagaagaaaattttcatagaagaaaatgatttatggccaaagttacagaacattcatcttttagacttagccttagaatatcattggaaattacttggcttgaatttggttcgtttttatctttatggattatgtaccagggctattaataatacttaaaccccttattttgctatggtggttagatttttttattccttttcaattagtgctattaattattacatggtcgtattcatgcttattacagatgaactatttttagtgccagtgtaaaggattaagaataacattcaattagttggctatttcaggctttattgtacatggtaatgtttcagggagtgtgatttggtctagaatatatccagatccttgtaattatgatattgggttatgacaggattctattatttttagctatgaatggtgcttatttttccctatattaggaatgttaatatttggattatcagagtccatgttataaacagaatttacctatgcaagacaaattctaactgtgcaacattttcatgagaattaaaagttgtgtgttaaggggaaaaccctctgaatgtttttatgtgtaagtgcctaaagaaccgtagaaacagtacatcaaaagctcttataaaagaaaaactgattgaacattagccagaaacaaaatatgatttacatttttttttttggttgctgggactgaataccctaaaaactaagagatgtgagtggggaaaatgtctaattgataagaaagttgatttatattatatttacatgcatcttctaagattgcctttacagtagccaatcagaactttaaaaaaaaaaaagctaacaacatagatcctatgtgttgcccttaagactaaaatactttgcacacgtgattgaatggctcacttaagttgttgaatttccttatacatttaaagtgtacttccgttaagaattattccattttaaatgggtaactttcagcttccgaactattttcctaaacattccagttgtgtattataaaagatcaaaatatctctaggtggtagtacaattttcatttataacgtggaaaagttaactgttaggtttaacattagtattagtgtttttgcaattgctcatagaaaagaacactgaataatggttttcatacaatttttgtaaaacattcttctcccagtttgattccaaatgcttttccccaaattgtctaatatatcataagctagtgtttccttgtatttaatttttccttccaacacaatatttaggaaaaatatgaataacattgtgagtagcgggagacaacacgaaaaagaaacctttcattgttgtggaggggtaggtgttatgtgattgatgcccttcctggcgtttgttttatcctgttattttctcaaaaaagagcacggctttttcttaaatacatttaaattcagaattgcttgcaaaagattggcctggatagatagacatcctagatttaagatagtaccatcttaaaagtatgttgaaaggtaaaataaatcatttcaaaatacttaactttcctaataaggatgttaggttttcttctctttcattagctggccataagtcaaggtccttataacactaggaaattacctttttttactttcaaaattgcattatagtgaattactgtttacaaaatacacatactgtgaacagatataagtttctgtcttttataaggtttgtagaatgaatgtttttttaaagtgagtattatatgttaaatattttaagttttttataaatactagtaactgtttactaatttttgtttggtcaaatgcttgtaaatgtagctgaaagaagatagggagaaactgcggatcccaaactgttccctttttcatttcttgaaatgttaccactacagacatttttttaaggtgaataaacagttgtgatgtgctgtacctaaaatcatgtttaatcgtataaggaaacatttcaatacacttatacaggaagaaaactatagatgaagtacatgtgtgtgattcagtctgattcacagaattctgagagtaatatggaataaaacaactccacttagatgataactgaagcatttcctgccttgtgaaaatttggattttaaattgctgttagaatgggaaatttggacactttatatcattgtataatttcagaatttagtttctgtatcttttggaaaacatgattatagcaaaaacatagaaaataatctattact

SEQ ID NO: 114923 - DNA, 1500 bp, Homo sapiens
caattaattttttttgaagctcatattgtatctttttaaaaaccatgttgtggaaaaaagccagagtgacaagtgacaaaatctatttaggttctctgtgtatgaatcctgattttaactgctaggattcagctaaatttctgagctttatgatctgtggaaatttggaatgaaatgcaattcattttgtacatacatagtatattaaaactatataatagttcatagaaatgttcagtaatgaaaaatatatccaatcagagccatccctaaagagtgttctcttgtcttcctttgtatcctctttggctccttcccttagcttccaccccagacatcagacctggggctgccttctctccctgccaaagcttgctgttagcattgtctgcttgccctcaactcctgccttgttccctgttgaaatgtatcaatcccgtactttatctctccaggacaaggataagtgtggctacagtaaaagtttattgctctaaacggcgctaacctgagataatgagaaaaggccagaagagattgtttgatctctgtctgtcaatatatatgcatttcaactgtgaccatctggatccagggccctttctaacctatataacgactcatttgtttggttaatgatgaatatcactggggctcttaagtcctttcgttctatccaagacttcattgtttttttctgtatgaaaaaagtgcagaatatcactcacctttcccctacttttggatcccctacacgaggatcactagcttaatgagaagcagagtaacgctattaagtctgggcaagctccttataagttgctgtgtgcttaaaagaatgtgatttatgtctggggccaaagcagttttccttcttttccctcattgaattcaagacagctagacccttgtgtagatcccaggatattacctctactccccccaacctgtgtgtgtagggagagtaacaacacgggaagaggggagggaagttggaaggagattggtcacatgttcagttgtctgagatactggtaaatgtgcgctgtttgtcaatgaaggttgcatgcctgcatttacaaggtggtctcatactgattgtgctctgtccagttagattcgtggcttctcccttggaagctacaattaaggactagttagaagcagaggctagatgtgttctctccagcccttactaactgggaaaataattgagaaatccctcttttcctcagtgaaagcccagtcattggttagaaaaatctaattgtcaaactagcattatgttccatcatatctgtgggatagtaattcatgtaagacacatttttacctctcttacaagtcaattcacttacaagccagtttcaaatcaagcttcccttgcgaggaatggagatcattatggggcttattatgactacatttcttttatgagtgaccattttaaataattaatattttatttaatattaaattattaaagacttagctagactt

SEQ ID NO: 114924 - DNA, 2386 bp, Homo sapiens
aataatcttaaaactattaaatttactgtaataattttttatttaaaggattaaagaaaccttctaccctgatattccaaatccagaaaactgtaaagcattacagtttcaaaagagtgtctgtgaggtaatcttttattttcttatatttatctttgatgtgctggcttctttttttaatcttttgtgaaaagtttttaacatgcaaatgtcattttaattaaaaagtattgggaaaattatatactttaaaacatctcagtttctaaaattattaattttaaattatacagtgctcttttttctcccacaagtattaataacaaggaaaatactgatacggaagaaaaaagtggctgtgctgttgtgtgaaatacagagtagtagagacacctgtttacaagcagattggggaaaaatgtgtccctttttataggaggagcattgcaatggcatttagtgctatttttaatcactgtgtttaaatttatttctagggaagcagtgctcttaaaacattggaaatgaatccttgtaccccaaataatgttgaggttctggaaactcgatcagcatttcctaaaatagaagatacagaaataatttccccagtagctgagcgtcctgaagatcgctctgatgcagagcctgaaaaccatgtggttgtgtcctattgtccacccatcattgaggaagaaataccaaacccagccgcagatgaagctggagggactgcacaggttatttacattgatgttcagtcgatgtatcagcctcaagcaaaaccagaagaagaacaagaaaatgaccctgtaggaggggcaggctataagccacagatgcacctccccattaattctactgtggaagatatagctgcagaagaggacttagataaaactgcgggttacagacctcaggccaatgtaaatacatggaatttagtgtctccagactctcctagatccatagacagcaacagtgagattgtctcatttggaagtccatgctccattaattcccgacaatttttgattcctcctaaagatgaagactctcctaaatctaatggaggagggtggtcctttacaaacttttttcagaacaaaccaaacgattaacagtgtcaccgtgtcacttcagtcagccatctcaataagctcttactgctagtgttgctacatcagcactgggcattcttggagggatcctgtgaagtattgttaggaggtgaacttcactacatgttaagttacactgaaagtgttcatgtgcttttaatgtagtctaaaagccaaagtatagtgactcagaatcctcaatccacaaaactcaagattgggagctctttgtgatcaagccaaagaattctcatgtactctaccttcaagaagcatttcaaggctaatacctacttgtacgtacatgtaaaacaaatcccgccgcaactgttttctgttctgttgtttgtggttttctcatgtgtatacttggtggaattgtaagtggatttgcaggccagggagaaaatgtccaagtaacaggtgaagtttatttgcctgacgtttactcctttctagatgaaaaccaagcacagattttaaaacttctaagattattctcctctatccacagcattcacaaaaattaatataatttttaatgtagtgacagcgatttagtgttttgtttgataaagtatgcttatttctgtgcctactgtataatggttatcaaacagttgtctcaggggtacaaactttgaaaacaagtgtgacactgaccagcccaaatcataatcatgttttcttgctgtgataggttttgcaagccttttcattattttttagcttttatgcttgcttccattatttcagttggttgccctaatatttaaaatttacacttctaagactagagacccacattttttaaaaatcattttattttgtgatacagtgacagctttatatgagcaaattcaatattattcataagcatgtaattccagtgacttactatgtgagatgactactaagcaatatctagcagcgttagctgtccatatagttctgattggatttcgttcctcctgaggagaccatgccgttgagcttggctacccaggcagtggtgatctttgacaccttctggtggatgttcctcccactcatgagtcttttcatcatgccacattatctgatccagtcctcacatttttaaatataaaactaaagagagaatgcttcttacaggaacagttacccaagggctgtttcttagtaactgtcataaactgatctgaatccatgggcatacctgtgttgcaggtgcagcaattgcttggtgagctgtgcagaattgattgccttcagcacagcatcct

SEQ ID NO: 114925 - DNA, 2589 bp, Homo sapiens
tttggttgtggtggttttcatgcttttagtagcagaaatgggactattattgattgcctgctgtgtgccaggcattatgctacagaatgtgtgtgaaaacttcaaacagcttaagtcatgatattctatttcatcagtagaaaaactccacttgagagtggtttaaataaggggcccatacgacacagctaatgactggcgtgggggtagagcttgaacaaggtagtggcagctccagagtccttggctgggatggcctcagctagacccacttagaagggcagttggtgagacaggtgtgggtaaccatgcatttgaaacgggttagagattagtgctaacatacttcattttaaaaataggtcgttctgacataaaagttaagaatattactgacatatcccagaagacactgagaattgctgatcttcaaggtaaaacaagttaccacctggtcttgcgagcctatacagatggtggagtgggcccggagaagagtatgtatgtggtgacaaaggaaaattgtaagtttcaggttgctgttgaggtgctttccatcctgcatgcgtagtgttctagtgattcttggtttatgtaggaacccctccccgccctttctaaaaaacattcacattttgttgcagtttttggctggtagagggaagggttaaaaagctgtaagattacttcatgtttattcttgtcagttatttgaagttatttccaaatgagtacctaagaaattaatgaatttgggatacatctgaagtctagaggtctaaagtcatattgaatttatctaacggtcaacatttaaaaatattttgctccagctgttatgtgatttctaacatatctagggaaaagtgaaggagatattcttaaaaaaattttttgtaaagcacaacactcaaatttgagagaagagtgatggccttgactatctttctgcggtaaagaacttcacttcgatcataggcttatcctctacccctgagttggagttcacacacagctcttatataaagagccatgaggatatggttctataaagcagtgattctcaacggagagtgattttgtcacctaagagatacttggcactgtctcgtgtcatttttggttgtcataactgggggatactgctggtatctagcggtgagaggccatggatgctgttaaacttccagtagtgcaaggactgtctcccctgatcctctagtgaagatctgtctggcctaaaatgtcacaagtatcaagattgagaaaccctacttggaagagtttaagtatttgtataaaaattatcacaatacctgaaagtttgattttaatagtttttcagtgtccctgcagcagttaattttgtttttttcctaaataatttaccaacctaaataccttctaacatacatctattctgtacttcacactaaaaatggcgattttaatatttgcaatactctcgtttcagctgtgggattaattattgccattctcatcccagtggcagtggctgtcattgttggagtggtgacaagtatcctttgctatcggaaacgagaatggtaatagttctgcatttactcttgctgttttcttcttaaaggcatgattataagatttgtaagattagtttatgtattaaataagtgtatcttttttgttgtaataagttagttaaaaaatgttttaattagaattaatgttggatttaatattaagaacatgacatattatttaaaggtcttaatagagtcaatgtgtaaattttttctactatttttcctaataatttaaagtcatagcagttactattataaaaaatatttataggctgaaatatggcaatagctatctacaagattaagcataatttaatgattaagatctcacttgccctggtgacctatttagaaaatctggtcattttaatcatttgctcatttattcaacaaatatgaatgacctcttccatgtgaagggggatatcatatcgtggtgcacaaaacaagccatggctcttatagacttggagcacagtgtgggaagagggacagtaaaccataggcatccagcaagtgtgtgcttgcagagtgtgagtgggtgctaggaagactgaaccaggtaccctgaggagaccagcagggggctacgtcctgcgagctggtcggccatggcccgtcacggctggtctgcggtacagttccaaagggtaaggagagggaaaagaatgttacagacagataattatttctttgagggccctgaaattggaaagagtcaaaccttcagagaaagtgggaggagctgtgtgcctggtgaaacaggaatgagtgacatgaggtgaggtcagcgggagctccgtgggagagagggccatgtgcatggtcacctggcaagagctgtcctggctgggtatggagccagtggctgcattcatgcttagaccagtcctcaccgaccttaaaaatgccatcatttatgacaagagaacatattttagcaatcctggcttataaatcaaaatagtaatagttgtagaactatagaatagtctattttggtaaccatattctcattaccaaa

SEQ ID NO: 114926 - DNA, 1039 bp, Homo sapiens
ataacactaggtaaggaagggatttatagaggcatgatgtggacctcgaatgaatggcttagtgaactgacccaggaagttgatgtagacttacattttgttcattaaaatcaagcagttgccagcactttgggaggccaaggtgggtgggtcacgaggtcaggagtttgagaccaacctggccaagatggtgaaaccctttctctactaaaaatacaaaaattagccaggtgcggtggcgggcacctgtaatcccagctacttgggaggctgaggcaggagaatcacttgaacccgggaggcggaagttgcagtgagctaagatcatgaccctgcactccagcctgggcgacaaagcaagactccgtcaaagaaaaaaaaaaaaaaatcaagcaatgatgatttcttcctggaaaaaggaacaaaatgtaagccttaaatcatcgttgttctcttcaatgcaatcccatcttatattactaaactttttgttaaaatagaagtaaatttaatttttgtttagtcaattttcttttgaatatttactagtctttaaaatatatatgtattttttaataagaaaacatctttaaaattagctttggaaattttagagtatgttatgaacttgatgtttctaaaatagatattcatagtaatatatttatgaaagtttgctgatatgttcatcctatagatgagtttcgaccaggtataagatataattttttcctgtatggatgcagaaatcaaggatatcaattattacgctccatgattggatatatagaagaattgggtaagttaaatgggtacttatttataagagctcaaggcaacatgagaaattataaattggcaacaatggtatgattgaattctaaaaataagatgtataattgaaggaaggtaaaataatttgataaattaaaaagtatttgattactacttttttctcctcctcctctttttttttttttttttttttttttttgagagagggtcttactctgtcacccaggctggagtgcagtggtga

SEQ ID NO: 114927 - DNA, 1013 bp, Homo sapiens
gcctttacccattaatgaagctaatggaaaaatactttcctacaatgtatcgtgttcatcagatgaggaaacacagtccctttctgaaatccctgatcctcagcacaaagcagagatacgacttgataagaatgactacatcatcagcgtagtggctaaaaattctgtgggctcatcaccaccttccaaaatagcgagtatggaaattccaaatggtgagtgcttgagatgatttagtatataagaacgggaaactaaagtgagaaatgtctgatgttacttgctcttttgtcatgtcagccttcttctcgtataccttgttgctgctgacctagaaggcagaatgagcagattgatgtctacagttcattgagaaagaagtcattagtattgacttgaagcatgtgcactgatggatacaatcattactgtactcagtaactatagtggataatattggagagttacagtggtggatagtacttttaggaagaaatattttaagagtttattcaaatgatattcagacgcttctccaagacacttccccaagactaggaaagtttattttaggtcagctaggctgttttgcaaattgttgggcaggaaaaaaaaaaaacgcttattttaattagcaccttttttgataagaaattccttattaatagaaattctttattgattaaaaaaagtcttcttaaggtataaattagatcttcaatataggccttagaaaaacaactgtggtgtagtttttaaaatttagtgcctttctttaaattttacagatgtccagtgattaatacattcttcccagcttctgccttgacaactttgagagttatgagctttaaacggccacttccacctcttcttccacagacctctgtgctccagtcattttctgcctacccacctttgctctcttgccccgatatgggagcacctttctgtaaccacagctcctagaggaagaaaaattggtccagttagggtcctctaagtagctttcc

SEQ ID NO: 114928 - DNA, 1049 bp, Homo sapiens
agaagttctaagtgtcatattaacaaagatgcacaaaaggtaatgcctgcctccaagaaacttccaaatatcatccaaataatacatttattcctcacagtcatctcaaattataaatcacattaaggtttattgcatcaccattagccctttgattatcaaaattatataatcctttagataatttaattgaccattattacttagagccagtatttggattaaaaagataacccaattttttattactattacagggcataatttcattggcttggcaggtatataagaattaaaatattacagtggataaactgctttgggtgttacatatacaaactcattgacattccgttggtttgtgttacaaatgtgaaggctttcttaccaaaaaaaagtgtatgtatgtgtatgtatatatatatgtattcatacacataatatatacatatatatatatttatttgttttccaatagcggaatgtcacaatcaaaggagtagaaaattcaagttatcttgttgctctggacaagttaaatccatacactctatatacttttcggattcgttgttctactgaaactttctggaaatggagcaaatggagcaataaaaaacaacatttaacaacagaagccagtaagttaactaagtgatgtatggctaataattactgtgtattctgaagttttacaacttctttaaaaagaagatgttggccgggtgcagtgggtcacacctgtaatcccagcactttgggaggccgaggtgggcagattacctgaggttgggagtttgagaccagcctgaccaatatggagaaaccccatctctactaaaaatacaaaattagctgggcatggtggtgcatgcctgtaaccccagctatttgggaggctgaggcaggagtgaatcgtttgaatctgggaggcggaggttgcagtgagccaagattgcgccattgcactccagcctgggcaacaagagtgaaactccgtctctaaataagaaaaaaaaaatgctattagagtccttaaaggtggggga

SEQ ID NO: 114929 - DNA, 1097 bp, Homo sapiens
taagttaatttctttgaaaagaaaattagtacatttcaaatactgtcctctcaaatttttccccttctgtctgtccttctatttatctcttatttgctcttgttatttagattttaatatttcaacttaatatctaccaaatcctaaaataaccagcattttaaatatattccatatttttggtatgtggttttaatagagtgactgaatatttggccttagatttaaaacaattttcagaataaatatgtcaatgtttgtttacttatctaattgttaaactctcatataaacactcattaatcctcttaatgttacctgaaatatcattgaaggatgttatccttatctctggggaaggtatgaaattttccaagttttggttgataaactaaggagtattttttttttaattcagatttgtgaaaaaaaaattttacagaatttttaaacaagtagtttttttaaaaaagaacttttacctaaagtgaaagatagtttggataaatatgagagaggaaataccagtttctatatgtgtatggttaaacatgattacagaaatatgaatttctacaataagcagtgtcagactgcagacttttaatttatcactttttttttttttttttttgagacggagtatcgctctgtcgcccagaccagattccagtggcacaatctgggttcagtgcagcctccacctcccaggttcaagcggttctcctgcctcagcctcccgaatagctgagacttcaggcaccctccaccacacccggctaatttttgtatttttagtggagacggggtttcaccatgttggccaggctggtctcaaactcctgacttcaggtgatttgcccaccttggcctcccagagtgctgggattacagatgtgagccactgcacctgggctcatttatcactttgaaggtctcgtcttaaaaaaaaaaaaaaaatttcttttaatttttctagtcctgccttaaagctggggagagcagttttgataaagagaaaaacaacaaaagagccgcagtcagtttgtatatactgagatgcagaattttaccaagagttttctaaacaacagtac

SEQ ID NO: 114930 - DNA, 2073 bp, Homo sapiens
gaatgtttcaatgaatagcaacatcttatataatacattagggcctaaagttgaagaagtaaacaaatgaatcatgattattgttactctgctattataccttacacaaaactgagttgtattaaaggacaaaacataaacttagctgatgattgtatggaatctattgtgtcttttaattctaaaggaaagcaaaacatattgctacttggaaatacagttttgtgtttgtgttcatttttaggtgacccacaacacaactctgaatggcaaagatacacttcatcactggagttgggcctcagatatgcccttggaatgtgccattcattttgtggaaattagatgctacattgacaatcttcatttttctggtctcgaagagtggagtgactggagccctgtgaagaacatttcttgtaagcttatatttaaagaatgtttgtttcagatgaattaaattagtctcacttaagagtaagatttagtttgagctttcacttctcataacctcattcagctgcatgaggattacctgggagcgtctaagcccaccatccctggagattttgatcaaaaagtctgagataggcttcaggaatctgtattttgaaagaactttctgagtggttggataaacatccaggtttgaaaatcactgtcataggaattgaagagcattaaaaattgtgtgtagatgatactgagatgaaatctatgtttaaaaaaaaaaaacaaaacagttcccaatttctggctcacagagcagacccctagaggctgcatagttattgccaggaacacggggatctgcaagcataccaaaaagcatccgtacattaagtaaaactcatatacagggagaatgttggcagtttcgaatagggggcctggaaaattgttgaccataaaatgaaatcctgaaaggctggtagtcattgtagagatagatcactctatggataaaaggattagaggaaggaaggggactagattaaagtaagttgttttttagggtgtggagtacttgggcatatatttaggctgatggaaagtaagacatatgccctaaatacattgaataaaaggaatggaattatttaattagtgatttttggggggtgtggattgttcacatgtatatataaacccactgaatttcaacccttagacttcttagacataaacctgtggcattaactttagacactgacctgtaatctgcttctgcttcctcaccattatcccttcataagtaaataaaaccacatacacttttaaaaaatttatcgtatatatcttgctcctacaaaacctgtggaacacaccttatctttggaccattatcattacaaagcacctaacagtttgtagtgtatatactgggctattttaaaagtcatcttatgaaaagaaagtcttaaaatgcagaaaagtttatgtaaaatacttctatataaaatgtttataattcctctttttctttctagggatacctgattctcagactaaggtttttcctcaagataaagtgatacttgtaggctcagacataacattttgttgtgtgagtcaagaaaaagtgttatcagcactgattggccatacaaactgccccttgatccatcttgatggggaaaatgttgcaatcaagattcgtaatatttctgtttctgcaagtagtggaacaaatgtagtttttacaaccgaagataacatatttggaaccgttatttttgctggatgtaagtatatgattttaaagagagaattcctattaacctgttttggtcttccttgaaagccttaattcttctggagtgggggggtgggaggagtgattctgtttctttctcatttctttgttctttaatataaaggctatacaaaggcactagaatatttgcttgttttaaaatgaattgcaagcttgttttccacataacctgtatctgtgtaatttgttggttttgtaatcagatttgaaacatctagcttctaatgtttagtttaaattcttagttaacagctttgttaaggataggatataatatttcttaaccctgcattgtt

SEQ ID NO: 114931 - DNA, 1101 bp, Homo sapiens
gagcctgacatgtttacacatttggtggaacttaagcacggggccactgtgaggaggtgcacagagatggcactggggacttaggctggcatgaaaaagctagagcctcatgccctgttcaacttgggacctttccctgtaggccagggagagccatggaggattctaggcatacaaaactgaatttgtgctatgggaggatcagaagtcctgagaccggttagaagcattgcctttgtgcaggctgagggaaagaggccccaactaggcccgactctggaggtttgtccttatttacctggtaaagttgagggagtggcacaagtggtagtcataactagaggcatcatgctgcctctaccgtcttctatcatgtcctttttataaagcttctgattaaacttacataataaaaaaggatttgttatttaaagctctcaaacacagatttattgatgccttaccctcaagttgctaaacgttcaagtgtccccacatgtgggtacttcttctatgaaataggtagtagctggcacttatggtgagatgggatttactagagtaagatttacattgagcaagaatttatgatgacttgggcagtaataaaaccaacaatcataatttatgtttcatgttaatactttgatattagattatctacttatttttcaaactaaaatgaatcctccaattttaataccactggaggacacgattttagacattatgtgtctgataaagtgagaagacaaaaaagtagtccttcttaatatttttatggccatcttacaatattggcccagcttattaacctttttttgtggttttcccgtgtgttgctgctaaatcatatctcctcccatctgtatttgttcattttctgtgtgttattgttatcaacattatcatttcattttggaccctgacatccatgctgaatttattttattggatttatttattagaatcctattattacaccctgtatatttgctattttgcccatttttttccatccacagataagttggatatgattcctatatcttcatgcaactcattaatgaagataccaagaaaaacagaagtttttgatat

SEQ ID NO: 114932 - DNA, 1070 bp, Homo sapiens
tggccatgatttaagttttttaacttatattaataatcttccatggtgcataactgcacactagattcagtttattcatccattattcagtttacttaacaaatatttactgcacactttttgtgtgccaggcagtttttctagctcttgggggctatagcgctgaagaggagtgctgaacaggagcctgctctctgtctcttcctccccacctatgctgaactctcaggtcatgctggatattcagtactggatactcatagagctcagcatctaggtggggagggagggacaataagtcaggaattatgtatgcatagatacctctaggtattgatgtgtacgctgaaggatataaaataggataccacaaggaagagtgagcagtgtgtggttgtggtgcgggatttgggggagggaggcaagcagggaattgtccccctttctaggtgatgagtagaggccttcctgaggaagtgagtgttaatttgaatgatgagaagagtcaggggaaggtgattccccatgataggaatgacaagtgccagggcccttggtggatcaagcttggtgcatgtgaggaatggaagaaggccctggaggagactggaagccggtgaccaaaggagagacgtgtatgtgaagagtgtggaaggggatgcaggacagagagtggggtgtgcttataaggagaatccactagacggttttaaactggggagtgacatgatctgatggctgtttttgaaaggttctgctttgtgcggagtggattggtggggagcaagactggaaacaagaggaccacttcagaggctcttatagcagttcaggcaaaagaggttggtgcgcttaatttgggggtggcaatgaggatgatgggtgttttttccttcggcatgcatttgaaggtgtagcagctggtagtacatggggagtgggtagaggccgatagggaaggaaaggaatgactcaagggtgactgctaggtttttttgcttgaataaattagctatattttgagagggtgtaggttaggggaagaacaaatttaggagggttatgaatca

SEQ ID NO: 114933 - DNA, 1051 bp, Homo sapiens
gagagcggcctcaccaccggaggctcggaggaagcaccaccctcggcgtccggggcccgtcgcgcggccgcgttcctccgactccttggagcacccgcgcgcgcgggcgcgcggccggggatcggcgggggcgcgcgggttggggcggggccggggccgggggcaggggcgggtcaggggcggggccgggcccgctgcgcccccagccgagcggcgtgcaggcgccgcccccgcgcgccgcagtcccggctggagcgactcggccgtggcggtggccgttaccgttgcctctgggaggctctggcggcggcggcggcccgcggggttcgcggagcgcagcgggccgcccttcgcccgtggccgcctcaagcagcctcgcgccgacacaggggaggcgagacggcggctgcggaggcggcggcgcattgtgcccggccccctccttggcggctcctgcccccgggcggctgtgggatctgggcagccccggggcggcggccgaggctacagagccggcggcaggggatggcaagatagcggcgcgggagcgtaccgtgagtcctgggggcgggtgggcgcggcgcggagcaggggagccgcggagccccgagcggggtccccaggggcggcccgggcggggtggggcagcgctcccagctctgcggagcgtcctaggggagtgaccccggagagcgccgctccgggtcccgccgctctccgcgcgcccttgggtcaccctcgtgtcctgggggacgcggactccagcgcccagaacttctgccccacgcagggcagtgagttctgaggccagaggttacctgggggatgggagggagcttgaaatgtttttccttcggagaggtgacctgccaggtgatttcgtgcccctctgcttcaactcccctttaaacctgttcctcgtcctttctgtatccgtagtgcatttgacttacctgtatttttatgtgctaacttccgaaggtggtgtactggttaaacccaaagttaaagtgttggaggtcaaagttaggctttgtgaaagatgccattt

SEQ ID NO: 114934 - DNA, 1063 bp, Homo sapiens
caatattgggctatgcaaagtgaaaaatatttttaatgttcctaagtctgcaatttatactaaagataattactgttatgcaaaaggatgtggaggtatttatgtcttttacacagaccctccttagaagacatttatcttcttccctacctgccatcctttcttcccacactcaattcaaatggaaggttgaccttttcaggaggcaagatcattattccaaaatcagtgaagtaatcatcattttcctggtgtgccttctctgccattcttagcttttgtgagcagagccctgaaaaccaggctttgctttgtcagtcacacagacagaaagtacatttagtcctttcatagacctatagcttattgcagacagcaggaacgaccccagatcttgttggaaacagcaacatagaaatagaaatctatgggatatggcttccctctgtagagttttaaaatgaagccaagaagaaacaaggttcatatttaaggagaatattacctcaaggaactcaaccccaccttaaaaaaatatctagtattcatttgacaagaaattagcagttacaaggaagatctagcaaatgatggtggcttttcattgtacattctttctttttcttttcttttcttttattttttattttattttttttttgaggtggagttttgctcttgttgcccaggctggagtccaatagcatgatcttggttcaccgcaacctccgcctcctgggttcaagcgattctcctgcctcagccccccaagtagctgggattacaggcatgcaccaccacgcccagctaattttgtatttttaggagagatggggtttccccacgttggtcaggctggtctcaaactcccaacctcaggtgatccgcccgccttggcctcccaaagtgctgggattacaggcatgagccaccacacccagcccttcattgtacattgttaatactatattcacagacctggtccagggagtctccccagcctgagtgagccagagccacaggcacttctgtgtttgcctggaaaacgcactgcttttttttt

SEQ ID NO: 114935 - DNA, 1360 bp, Homo sapiens
caattgtagcatgtatcagtattcagtttcttatggctgagtaacagtccttcgtgtgtgtataccacagtttgttcatctggtcatccactgatgaaagtttcagttgtttccacctcttggctattgtgaataacgctgctacaaatttgtgggcaattatttgtttcaattcctgctttcaattctttgggatatctacttacaaatggaattgctgggttatatggtgattctattttaacttttttgttttgaagacagggtctcactctgtcactcaggccggagttaactttttgaagaactgtcaaaacgttttcaacaaggtggagccattttacattcctaccggcagtgtacaggggctgtaatttctccacatcctcgccaacacttgttatttccattttaaaaattattatagccatcttcatgggtgtgaaatggtacctctttgtgattttgacttgaatttccttagtgactaatgatattgaacatcttttcatgtgcttgttagccatttatatatcttccttggagaaatgttcattcaagtcttttgacttattttattttattctattttattttattttattgtgacagggtctcactctgttgcccaggtggagtgcagtggtgtgatcacggttcactgcagcctctgtctcccgggctcaaaccatcctcctatgtcagcctcttgagtagctgagactacacgtgccatgacacccagctacttgttgtattttttttggtagagacagggtttttccatgttgccgactcttttgcccatttttaaattgagttctttgtctttttgttgctggtttgtaagagttctttatgtagtatggatactggaaccttatcagatatatgatttgcaaatattttctcacattctatatgttgtcttttcacttttttgtgattgttatttgatgcacaaacttgtttattttattgtctatttgttgttgttgttgttgttgctcatactctggattcagatctaaggacccactgccaaactcagggtcatggaattcacgctgagattatagttatcaccctagcccttcccagcatcacatttacaaaatatcacaaggtaactttcagggaaggtagccattgtggctccctttccttttatgggcattcttgttcatctcactttcatagaatgagttttctgaggtgttcctccaaattctgaggttatgcctcatttgaatctgaagctttctactatgtggaccaatcacaagaaaaacatcatgtttgtcttgtatccaccaggaatgctcctcagtttatctggctccatgcagagccccatcct

SEQ ID NO: 114936 - DNA, 1035 bp, Homo sapiens
aagactgctttcttgactgagatttgaccatcctaatccaaaccttgctaaagatgaatattttttaaaaacaaacaatctttttttttttttaaaggatgactgtgttaattctctacttttcaagaactttcttagcagattctctgggactggcacagtgagcaccttctgtctctgatctgttcccccaagacctgagtagcttctgttttctctcccgcttattccacatgagtccccgggaattggaagaccatagtgattggaagctgagttttcaaaaggcaggaggtcatagctggctcccatgcgaggcatcagaacatggggaattgactagcagaagtggaattcactggcacatatcgtggacctgcaatggggtcttaggtttgtgctttgggataagtcaagtcaagctattttataggacaagatggctatgtgtctccaattgttttctctttgcttttaggggaattacagcaccactgtgaagtggaaccaggttctgcattggagctgggaatctgagctccctttggaatgtgccacacactttgtaagaataaagagtttggtggacgatgccaagttccctgagccaaatttctggagcaactggagttcctgggaggaagtcagtggtaagaagtgaggtggttacaagagtgaaaagggttaatatattttttaatgaggagcaatagtcaaatagtggaaatctcctttgaggaaccctgggtagacactgacattattttcctttggctcctatgggaactaaaaaacacaggtgtgaaacttggcactggaagatatagtctgaagtcttgctcctgaacttactcattgagatagttgtgcagattcaggcaattttgtatttgttttcaaaacatgtaaagtttgtgtattataaatgctaagtgaacaaagcaagacataaattgtacatatgtatttatttgagcaacacaaaatgtgtatgcgtctagagtagaggttgggaacatttttctgtgaaaggcc

SEQ ID NO: 114937 - DNA, 1011 bp, Homo sapiens
gatacaacccttgtcaaatggacatagcatcagccacttgcataacatggaccatccatgcccatgacatctcagaaaatcacaagggcaggaaggagaaggggccaagatgaggtgacccctgaaaagtgacttttggaggctgttgataggtagccttccacctcagtgaccccttccttgttcacagtaactctgtggcttcagactctaaacagagctttccatttggcttatcttccaataaaaagatttaactaggtctgttttcctttgtatggacagaagtacttgaggagcccaaggacttttcttgtgaaaccgaggacttcaagactttgcactgtacttgggatcctgggacggacactgccttggggtggtctaaacaaccttcccaaagctacactttatttgaatcgtaagttggctctggttacattattgacaacttcttccttgcttgaggtgcttgtgacaacatggcaaaaatctacacttagatgttgcaggaaatttgaacaaatatttcagaaccacctgccaaggtcaagaggaaacctttaagtggtgacaagtgtctaatactttctacctgaggtttttaaaaaaggaacatttagcatagcatggtaagaaagacagttaatgtataccttgacgtgaaaatagtcctgtctgataatctgggtttacccaatttctgactttttaggaatattccaagtaaattaagggatgttcttgccacccacggggagtcagtgattcatgttaagacatttcagcacgtatgtcaaatttgtagaaacaatattttcgttattggtatttgttggtgatggatggatcaatgccattatggggaacatagtttgacagtcactgagtatgccctgagggataagggatacatttgctttgacaaaagtaaaaacctcgtaatggttgtgttattttgttttgtttttaaagattttctggggaaaagaaactttgtacacacaaaaa

SEQ ID NO: 114938 - DNA, 1031 bp, Homo sapiens
ctttagaacaggagacttgagcttgacctaaggatatgcattaaccactctacagactcccactcagtactgtacagggtggctgtggtcctagaagttcagtttttactgaggaaatatttccattaacagcaattattatattgaaggctttaataaaggccacaggagacattactatagcatagattgtcaaatgtaaatttactgagcgtgttttataaaaaactcacaggtgtttgaggccaaaacagattttagacttaccttgaacggataagaatctatagttcactgacacagtaaaattaactctgtgggtgggggcggggggcatagctctaatctaatatataaaatgtgtgatgaatcaacaagatttccacaattcttctgtcaagcttactacagtgaaagaatgggattggcaagtaacttctgacttactgtcagttgtacttctgctccatagacatcagtattctgccatcatttttgatgactacctcagaacataaaaaggaacgtatatcacataattccagtcacagtttttggttcctcttttctttcaagaactatatataaatgacctgttttcacttagcatcctttggactctgcagtaggttgtctgggtcaagataactctcagtcacatttatattcatattatgctaaaatagtaaaatgaaacctcattgttggacataatttagatataactaaaaagttctatgaagtgggaaattccgtgttggctctggagcagctttgtctcctctgaaccaatatatcccaaaccaatatatgcaaagcacctggtacacaactggtattttagtacatgttggttcttttggtgcaatctcagctcactgcagcttccgcctcctagattcaaacaaacagttctcctgccccagcctccagagcacctaggactccaggtgcatgctaccacacctgactagtttttatatttttagtagagattgggttttaccatattggccaggctggtctcaaac

SEQ ID NO: 114939 - DNA, 1678 bp, Homo sapiens
ctaggcagcaaagacaggagtatcttctgtacactgttccgcagttactggtacatgaacagttggaactgctgactttcctaaccaaaacaacttccttctctcctttgttgagccttttgaggggttcatgattcattaccacagttttaagagtttcagttaccattgtatgcaagagccaagcactgaatacctacataggttttctattttctttcattttaaaagcataatgacagtggaacaataatgggatatgcagaagcacccttcacaagttatttctgaatgatttttagggtaaataatacagatgccttgtttgttaactaacttgtggaaagcaggaatcagtgtctctaaggctgcatcctattaccacaatggggtgtgctataactgctggtattagagagggaactttggccctttcacgtttttcttaatgtttgtaacactacttcagaggtttataacctcaaagcagaagaagagcctcaacaacccgggacttataagttatttttatgttactagacttgcataaagattcttgttttccaactcttcattttgttgcaatgtgttattacaggatatatgaaccaattaaggtttttcactacagttcttgaataaaatttaaaaatcattttttattttaattaaaaatatttcccatttatagaatgcatatatttgcaatggacttccactttcatcaactttccatctcatcgctttaaacaggaacttgaacaagcactgttagtttagacctaaaggataggaaagcattaaataatactttggatctcctgaggaaaagataagtttgcttgcaatttacacattccatggggaaagaagagccatatttccttaaaaaaaacattaataaagcttgttattgagaaaaattgtagtgaaaagccttaagtaccaaattttaaagcagcagtaacttaatttttatatcagtgtttttgttttgcacaaactaaatgcagtggtaggtgggtttatgagtatattaattgcctttatccatttgtgaagttaagttgatgagggcaaggtttttgtttgtttaatttgtatatgtctaaaggtatttggaactttttacaggaattaaacatatatgcaaatttgtatataaaaatagcatggccatcatttgaatgcttgtaaatgaaaggattatcttttttgagatctatatataaatagaaatagaaaatccagctggactgattaggattcttttttaattcatttgtgtataacatttttattacaattacacatcagttttgacacagtcatagcaacattaatattttcccatgatgcagatcctttttgtaatgggcttgttctttgagatctctgtaaagaaccctgtgaactagaaaacataactcacagagatacttttttaaaaaatttatttactggaactgaaagttccagttgggatgaagcatttcatctcacttcataacacctctttgactgcacttcagtgaattgttcttatgtgcactgtgtagcaacttacattataacaaagcagataagggctgtaagctgctgcttatgttgaaaagtggttcttcagattttctctcataaaatccagttgaagataaataatttttttatactttat

SEQ ID NO: 114940 - DNA, 1014 bp, Homo sapiens
gccatatgtggtacccagtaatataaggtgaccctaatcccaggagatacccacagatctctagatggtatatagtactaaagaacacattttcttagaagttgaaagacattttagataaacgctaaaataattaatgtccatttagtcactaataatataataaggactttttgggttattttgttaagttttggtagttgaaccttcagtaaacttgattataggttcatatgctatggtaattctattttaattttattttgtttaattttgctaattttcataaagtgggcttatttttatagcaggacttaccatggtttatatctttttttaggtaaaggatattccctattttcagacaaaaaacataccaccacatgatgatcgaggtgcaagagcatttgcccatgatgcaggaggtaatgcattgtgcattgtacttgtgagatgcctctttatattaaaaagaaaactcttagttctttctagtaggataacactaaaaatttaggaagactcacttttggatcaactttaaaattataccaaaacaattgttaaagtcagcttaaaattaaaccacatttttgtgtatgtgtgagggacttaacagtgttttcagtgaagtactcaacctttcaaggaaatagaaaccaaattagttgtttctgttttttaaaagtagcacatgaacaatgtataacactaatcctcatagatccaggaaatagctgtttgtttagagtaaggagaaagaaatgtacttataaaatacacggtctttgttttgaactgttatattttaatatgtaaatataagccacaggttttatagctttatattcttaatgactttttaaacaaatgcctctttatacttagaattattacatatctttaggcaaatattgacgataattgaaatgatgtattatataatctcaattttccattttgtatttaaaacactatatattaaaataataaacatctgctggctttccttat

SEQ ID NO: 114941 - DNA, 3680 bp, Homo sapiens
agaagcactaaattttaaaatagtgaaattgttaatagagtaacaaaaatagttatatataaaatgatttgtggttttaagtcctgtgctaagtggtgttaggtgtacaaaatttaaggcatggttcttccttttaagaagatagtgtcagctttatcagactgtgtatttcaccaaatctgagatgccatgaattatgaaatatgccaatattttatgtaccacaaaagaagaagaaagaagaagtgctgcctattaaactaggacatactacaagatgcatattgattttagaatcagattctgtgtgaaaatagaagggattaaatgtgaaaagtgtgcatcttagaattgacaaaatatagaaatggtaatgcagtatgcaaattcacttaggattttcttttaccttctttgaaaatatatttgaagtatttgtaattattcaacagaaaagttaataaaagaaaaatcgtatagatgtcattaggcactcacttgggttgcgtcttctagtagaattgggcactaaatttaatgagtttcttagtatctaaggtaaaatgagaaataaacataatttaaacatgaatttataatgttaccacttggttctctgtaagtatattttaagattgggaattcatttcttacaaggtgaatttctcctgcttatagtaatttaaagaagaaccactaggaatctgtagtaattgagtaagcatccatggccaagtctcctttttccctttaatttcatcctgaatatttggagaatcaaaagaaacttcatgtaacctgtgccatagtgggtcttataataatttttctttggaaataacaggagattctcataaattacataattttacattttattcaagtccaaactctgggtttcaagaaagatattttcaagtagctgaatggtttaaccgtttatttttaaattttttcctctagatgactaaaaaaaaatttcctgaaatgtgatgtcactaatagttatcatgaatttgtcattttatatgtgtttttattaattgatccttcaatcataggtatgttcatattggaggatgaccggtttggcagcagctctactagcacatttttccttgatatcaatgaagatacagagccaacattttatgaccgatctggacccataaaggataaaaattcattccctttctttgcttctagtaaacttgtgaagaatcgtatcttaaattcgcttactttgcctaacaaaaaacatcgtagtagcagtgatccaaaaggagggaaattatcatctgaaagtaagacaagcaacaggcgaatcagaacacttacggagcccagtgttgattttaatcatagtgatgattttacacccatatccactgtacagaaaacattacaattagagacttcatttatggggaataagcacattgaagacactggtagtacaccaagcattggagaaaatgacttaaaattcaccaagaattttggtacagagaatcacagagaaaatacaagccgagagaggttagtagtagaaagttcaacgagctcacatatgaagatacgtagccaaagtttcaatacagacactacaacaagtggcataagttcaatgagctcaagtccttcacgagagacagtaggtgtagatgctacaactatggacacagactgtggaagcatgagtactgtggtaagtactaaaactattaagacaagccactatttgacgccacagtctaaccatctgtctctctccaaatcaaattcggtgtccctggtgcctccaggttcttctcatacgcttcctagaagagcacagtcccttaaagcaccctctattgctacaattaaaagtctagcagattgtaactttagttacacaagttctagagatgcttttggctatgctacactgaaaagactacagcaacaaagaatgcatccatccttatctcactctgaagctttggcatctccagcaaaagatgtgctatttactgataccatcaccatgaaggccaacagttttgagtccagattaacaccaagcaggtaagcaaatatatgtttagaagtgaccaataatggttgcattttaacaaatttaaatacaaaatgttagccaggttttacactatgtgagcctcatcactgacctattataattgtttactatggtaggctataagctccttgttacccgatatgacttgaaatggattcttgcagctgcgaggggggaagaaaatcctataggccctgaaaataaacatacatgctttgcaaaggacatacaagtcacaagcttttttttatttatttctcgcttctgcaaggatcgattttaaaaagaagcatgtcgggggaatcaggagcttaagacctacaataacaaacaaccttttcaggtaggtcaatttaaggctccaaaagttgacctctttattatttttttaaaaagataaatgaaaatttcagtgaaattattttcactttaagtagctgtgattattaaataggaacctaataaacactaaatgaaatacttggtcctcatgactcagcagggatttctataccatatttagattatatcaagctagtcaaagtgaacagtttagattttacttttaaaagatacacagtatttgctgcaaaaaaattttgtacctataatttttgtggttggaccaaatgcttctaaacaactttccttagttttaaattattcatttacatttatttaagtggattaatatatgtcaggtacttatatgtcaacaatatatgttagaatactttagcacatattaagcactcaataaaagttagctatttatcatcatcattggtagttatttaatgtaatccatctagcccttacattattcttaataacattaagcagttttgtttcaataatgcttaacacatttaatagagggtttcttggtagcagacaatgaattgtgtacccttacaggatttaagaaattatgcagcaatgtctcatctatctggaactcactagctttggcaaccttgtccaggacaaagccagggaaagttctcaacagctcactgttacaaatctatgcagtaaagttcatgaattttgaacattcctaagcctcagttacctcatctggtggagattgcactagatcagtggttgtaaacttttgtattgttgttttttaagcagagaaattattttttcacataaagatttctgtggaaacccaataggtagaatagatagaaagggacctatactggttgaaataggaattgggaaggggaataatccaataattgttttcctcccactccagtaatccttgaagagttttatgggaaccaaagaaatgtaacagattacagtttgaaagagtgttttttgggtggaaattaggagcatggtttttgctatgttaatagctactatttagaaagcatttcttttgtgtgttttacaaaataattatttgatttaatattaggctgcattcgtacattttaaagacttggttttccaaacaaaaatatcttcatataaatgtatataaatgtggaaccttgcatagtgccttgtatatatacagcagataccaagtaaatattttagcatgtctgttgcataagtaagaatctgtatgaga

SEQ ID NO: 114942 - DNA, 1042 bp, Homo sapiens
ctttatttttaatgtagttagatatggtatgctttttattctgtgtacatgtgtttggttaagttttattttaaattagcattatctttgctttaatattctttttaaaattgttgttattaaatgctttctttccaaaaagcttgtttatattaggaattttaaaaatatacgttgaattgacttcatgctcttcccactccagcattcaaaatagtaactatgtatgatgattgatgtgttcattgattgtggtaatcttcacaatgtatgtgtatatcaaatcaagttatacactttgaataatacaatttttatttgtcatttatacttcagtaaagctggaaaaaatatttgtttaattaatgtatcaatatagtaatttcttttaaccattcttattttttttttcttttaagtctccttaatctttgctccttgaaaaaccaagatcacttgctaaaacttactgtttctagcttggactatagcagagatggattggctagagtcatcctttccaaaattttaactgcagctactgatgtgagtataacatagccagtaaaactatatttataaccaattaattcactactttatgaattttgggctaagtaaaattaagttctaagaatatgatatggaaattgagtttactttaaaattttagtttctccaaggaactgcatatagtactcagatttttgtatcgggggaagaagctgctagatagaaagggaagtattctatttcacaagaaccaaaaaagtattcatatcaagggctagaccaccaattccaggcattcttcccttttcaagtagcaggactatcccaaaataaaatcaaataggctatttatgctgaagttttttttttttttaatgtattcatttatccttataggcctgcagactctatgcaacaaaacatttaagggtattattgagagctaatgttgaattctttaataattggggaattgagttgttagtgacccagctacatgataaaaacaaaacgatttcctctgaagctc

SEQ ID NO: 114943 - DNA, 1058 bp, Homo sapiens
aaatataccatttacagttacagaccaatgtggaaaatagagactgttcagttgatactgggatcattgattatccatatgggagtacagtgaaattatttcaacctcatatcataaacaaaaataagtttcaggcggattaaggatttatacgtgaaaagcaaagctttaaaatttcgataagaaaatatagaaaactaggtttctgaccttgtagttcttaaaaccaatatacaaaaaatacctaccaccatagaagaaaagtttagtaagtacatgttcaattgcatctaaataatcagtgtgtctttatataaatcagtagtgttattttttgtatttgtctctccaaatttgatgaaataatttactttatcaataataatttctagccttgatcttacgtaagctttaataatttaccaaggtaatctcttaaattatattggtcttgctactgtattgattgaattgtttttctcattaggcgagccagtgcagccttgaactgtttaaaacgcttccatgaaatgaagaaacgaggacctaagccttatagtcttcatttagaccacattattcagaaagcaattgcaacacaccagaaacgggatcagtatctccgagttcagaaagatatatttatccttaaggtgctgacatgaaatcatgattttcatcttaaacacaacatcttaattccttaaccactggattttagtatgcatgtatttgagtttacacttctcttcatgcatatgaattttcagatggcttctgagttttataatttggagatgggtttttataactttaaagttaaaaaaccttgatctatccttaaatggaaaagctgcctttcattttttcaaatttgaacttagttttctgatatgaggacagtttgccttaatttttcttattactttctgatgattttaggatacagaggaagctcttttaattaaccttagagatagccaagtccttcaacataaagagaatcttgaatggaattggaatcttatagggaccattcttaaggtatgaaaagatac

SEQ ID NO: 114944 - DNA, 1038 bp, Homo sapiens
cgatgtacttgtcttcattgatagctggttgggtggtgaggtttttgtttggaaagtagaaattaatatttcttattttaaagattatggcatatgggacacatctattttgagaaagtagtttttaaaacttaagaagtcaactcataaatttggatatggcatctagcattttaaatgttattttaaacataacttaggttgattcctgtaatgttttgacatataatcccttctggcatttaagaattgagtttaactgggtaccacttaaaaccataatattataataaagaatctatgaaacttaatggttatgttaatatgtgtgtatctttatattccatccttgttgaaagtattatagatatgataaaaatataaataagcatgtattggggaaaataagttaattttatgagtaaaacctcagaatttgtaatagtcttgaatacagcattatatgtgcaggtaatctgtgacataaactctttctacttctgaaaactcatgtaaaatgttatgcttcattttaggcaaacacaattcttcctcattcacatagccatcatttacactgcttgccaaccctaatgaatatggctgcatcctttgatatccccaaggaaaagagactgtaagtatcagagctttagcaaagcttttgtttgatatatttaatatcaaattagattattgtctcttctttttaaaaaaaatagtatggataggttatggtgggaaattcttttaaggaatttgctaaaggaaaaattaatagttctaaaaatatttaataatttgtcttttaggctgcaaaatactaatagtgtaataaaatcacttttttctagcatgtttgtagacaaggacatagaatggttatcatattactaaaaatgttagctgagaggtttttggactcctttatgtcatgagcagcaattctggctcttttttttatgtctatgaactatttcaaataaagctttacagtattaatatattcttttatttgcgtggttaaaaatgttgcaa

SEQ ID NO: 114945 - DNA, 1870 bp, Homo sapiens
tagagatggggtttcactatgttcctagtctcaaaattctggcctcaagcagtcctcccaccttggcttcccaaagggctttttttttttttgttttgttttttaaagtatagaagtacactctaagataatggtaaaaggtatagtatagtaaatatgtaaaccagtaacatagtcatttattatcattatcaggtattatgtaattttacataattccatatataatgcttttaaacaactggcagtgcagtgggtttgtttactccagcatcaccacaaacagttcagtaatattgccctgtgacagacaatatgactgctgctacagtttcactaggcgataggaatttttcagcttcatcataatcttagggaacgaccatcgtatatatggtccatcattgactaaaatattgttatgtgacatgtcattgtattaatagttctgtttttatcattttaaaaaatgtgaataggacatttaaaaatcttaaaagtgtttcataaaaataaatgaggtgtatttgtttgctaatttagcgaggtctacttgaagtgctttatgatatatttcgtcttcctctacctgttgtgactgaggagttcatagaagcactactcagtgtaggtaagtattgaagtacatttgtatcttttcatatattgtaatttttatttaatggagacagttcctaaaaggagaaatactaaattattgaacactattttcttttcttgctgcataattgtgacaggaaattaatataaaaataaaacctcaagttcctaagactgagaaattttaatttcttctttatcaccttggctctaagagcaattaaattaataggaatgggccaaaaaaggaagagaggagacagtaagaaacctatgtaatcctcagattatctaattctcatcttatttgagccaaatgacttaaagtaccgaagtcccaaaatgaagaaaattagatctgcgtgtatttacataactaatttttgtctgtatctttttgaatgtatggtatttaaccagcactttttaaagttctttatagcctggctagctgatggttttatacttatctgaaatgtttcagtgatatctaatcttttccctaccatattttaactaatttagatccagggaggttccaagacagttggaggctttcagatggctttgtggcagctgaggcaaaaactattcttcctcatcgtgccagatccaggtagaatttaaaataaaaagggtttcaatttattagaattcgggtttttatgttagactgtgtaatctatgaaactttatttaaattgtttctgtgctgttttttccaggccagacctcatggataattatttggcactgatactctctgcatttattcgtaatggacttttagaggtaagacttataaaccttattttattccattttgtttattttctctaacagattctttcatgccaggtgtggtgactcacgcctgtaatcccaacactttgagaagccaaggcaggcggatcacttcaggccaggagttcgagaccagcctgaccaacatggtgaaactgtgtctcaactaaaaatacaaaaattagccatgcatgatggcatacccctgtagtcccagctactcaggaggctgacacacgagaattgcttgaacccggaaggcagaggttatactgagctgagatcttgccgttgcattccagcctgggcaacagagcaagcctcttgtcttaaaaaaaaaaaaaaaattttgaaaaataaatctgatgcataaatgttttcatatgtattattttgcaacagtggtgttatctttttattttcaaagggtctagttgaagtgata

SEQ ID NO: 114946 - DNA, 1052 bp, Homo sapiens
actcaggatgctgaggcaggagaatcacttaaacctgggaggtggaggttgcagtgagccaagatcgcaccattgcactccagcctgggcaacaagagtgaaactccatctcaaaaaaacaaaaaaaagttgagttgaaaatatgaactttattatgctttattcattaaaacaatataaacaacacacaagggcattctcactataaaaggttcaagcactacagactacgtttaacaaaaggtaaatgtatttatgccttctaacttatgttttgtaatatgtggtgagattttattttaacgatggtggttttgattaaaatggaattgttaatatttctatatttattaggtatatttctaaattatttgtaagaatttgtattatacagttaaatcgaatttgaaggaaaagagaattcttaaagtgatttttttcctttctccttaaatgtttttatttgttttaattttgtttctttcttttgcccttccttatatgaaccaaacctggaggtgaaaaatattattagaaaatattagccaggtgtgccttgtttaaatgtgaaataaaaagtatttagataatggaaatggaaggatataattataaatggaaagatctgtaagcaggtaacaaacttgagataattcacttcttactgtaataggtggaaaaagaacatggtctttggagagtctgaccaactggagtttaacctctggttttatttacttttttgttagctccatgaccttgggacaattgcttttttgcacaattaggttaatgaaaaatttaatgactagattaagtgatgtatgtagtagtaagcatttagttatcccttctctaatataggccttatacagtttcaaaatatggtataatcatgcattggttaatgataggaatgtgttctaagaaactcactgttagatgatttcatcctgtgaacatcccagagtacttacacagacctagatggtacagcctactacacacctaggttatgtggtatagcctgttgcttctaagctacaaacctg

SEQ ID NO: 114947 - DNA, 1027 bp, Homo sapiens
taatatttcatgcaatgaacatttcagtttttgttgttcttttttttttttttgcccttctgttactagatttgactattcaaagctcctttatcaaagataaagcttctttgagcaattccatacaaactttttttgtggacatgagttttcatttctcttgcgtaaatacctaaatggaattgctgggtctgagattggatgtatgtttgtgtccatgagaaactgccagactttttcccaaaatacttacactattttatactcccatcatcagcatatgtgactcccagttgttctgcatccttgtcagtatttggtgttgtgagtctttaattttagccattctagtaggtatattttgatttcttgttattaatatagtttgcatttccctgatgactaatgatattgagcactttgtgtgtgtttattggctattcatacgtcttttgtgacatgattttaatatgtttaaaattgttcaacttagttctgtaacttaaaaattttgaatcatataatttatttgaagtctattacttatactcatgtgcattcagtatattttagaattgaactttaataaatgccaagtagagtttttcactttaaagtgaggagtataaaagaggggagacagaccattgtctgatttttctcccgtgttcttactcccagagaagagttcatcaggcagtcagactcatgaactttctgggtattaaacagatactgaagatggaatttaaatgacgaaattattggtaatctctaatcaatagagaaatacagagtatgcttcaaatatatttcagttatataatagttcttatgatgaccaaatagtatcataatcatataattttgcctagaaaaatatgacaagttttatattatacattgccatagaaatttttttgaaattcatgtcagtgatttttttttctttctgtcctctttaggtattattaatttatgtaaacctggaaattctgggatccagtctctaataggagtactttgc

SEQ ID NO: 114948 - DNA, 1351 bp, Homo sapiens
agaaagtagctggtgatgttaatatgtagttatttcataacatttcagtgactatataggttgttgaacttgcttgttggaaacgttcaaataagtttagagcaaagattgtgaagtaaacagtgtgtgtgattaaaattaagaggtttttgtgataattttctttgctaaggggcagcctagtaccacagatgcttattaagcagacttaatgcttaattaaatcttatctaagaatagttttcagggagcaggaatatagaactgagtagaaaagcagaatttatgacttaaacgatgttgtgagtttaagtttgaagtcagtttataattggctaatttgctttagtgtagatctgatctttgtcttgttttaattttatgtgtaaatgtttaaacattagtgatagctcttattgtgatttagtagcaggaaaaaactcattttaacattttatttcattgattctccccgctgcctccccacccccaacagagaagacagagaagcacgatttctagccagtaaaatgggaatcatagcaacattccgatcatgggcaggtaggttactctacattgctttataacatccaagaagaaaaactagactgctttttcaaatgttaaattattattgtagcacctaattcagatgctaatctagtcttactttgtatattattattagaaccaaaggaactcgtacaaaattattaaaatatggtgaaggaaatttgtaatagtcaataggaattagctaatattatgatcagtatacacatatttattatttgccagtcactgtgctaatgattacctgggcaattaaaaaaatttaagcatgatctttaccaaaaaaacctacaaaacttgagtgttagctgtgtatgtaactaaagtttgttacttaaagtacagtgtagtgtcatagatacaaaataagcaagataggccattaatagttccaaatttcttgagaatagggattgtgcatgttttatctttccatggaataaaaagtaagtattgtttttaaaataataccaccattaaatgtgttgttaataacattggggttttgccattaagagtaattgagagtaatggcaaaaaccgcaattacttttgtacccaatgtattaatgattatcttcttccttcttgatttagtattattgtgaaggggtagcatggaaaagaagtagcaataagcaaaaaaaggaaattcacctaaacatttctgtgtacctaggtaaccctaacttaaaaataccttttccatacaaatgtttactccagccatttgtatgggaaggccacttggcccctaaccagtatgtttccaggg

SEQ ID NO: 114949 - DNA, 1158 bp, Homo sapiens
accattttaatcaaaatctgaagttaaatcacaaatgaaagatttgagacagataaatggctaatatccctactttataaagaactccctgcaactgataggaaaaaaagccattccgttattatatggacaaagggtatgaaaagacaatccaaagatattttaaatatcaggttgtggggaagtatattcagtgactcttacattttccacttgtccttttatctacctgttcttataaatgttggtattagaaagtttttcaagtcagaaaggcaattaagttttaaagcctagattttttattacttttaataattaccccaaatataatatgttaagtttttctcttttagcacttcagaatccagaggtggtggcccttcgaggtggactaaacaccatcttgaaaaatgtgatcgattgccaattaagtcgaataaatgaggccctaattactacaattttgcaccttcttaatcatccaaagactcgacagtatgtgcgagctgatgtagaattagaggtaggaactttaatattcttttctagttttaaaatattattataaatgtatacttttactttgaaatactaaattttatagatgcagcaccacattaattatcaagcctaaattagccgacactaatttattcccagctctgttttacagatcattcagtttggactgaattgaaaacattactcttaagaatatttcatcaatgtgtaaattttatttttgtattatctatgaaaagtttatgaaccaaattagagtacaaataaagttatgtaacaaatttacctatttaagattaccatttgtttttaaggcctttagtacattgtgtgtgaatagctcctgctaattatacaatatttatgaaacctaaaattatctgaagttggaagcactttgttagcaactaattatatctacttgaaagaaagcatgtatgtatattttgtaaatacctcttaaattttttactgattcaagtaaggtttattacagttagtcaaaagtaacagggctactgtataccttataagaaagtatgtcgtggaggttggaacagaattatgcactgtattatagtttcttcgtgtgcatgtattgcattgttgtcctttgaatatagtatttggagt

SEQ ID NO: 114950 - DNA, 1060 bp, Homo sapiens
cttgtaactattaattagcattattttaaaacttttagccaggttattagccaaaataaaatatgtttatatattggaaaggagacagtgttactttgtagatggtatcttatatatagaaaaactctgaagcgaaaaccaacttaattttaggtagtaggactatgtgaaaacacagatttgacagatttttgtgtttcaacaataatcagtaattagaaaaagcaatactattttaaagtagaaaagaaaatatataagacaaattttataagaactgtgtatgacttgtgtgtgtgtttgggaagtacttttgaatttgtcaaattggttcttaagaagacacaactaatctataagggtagaaatgagaacagtggctgcctgtgcaatggaggaggactcattggaaagtaatgtgagagatctttctaggataatgagagttctgtgtgttgagtgggacattgttcatagtttattgaactataccattaagatctgtgattttactaaatgtaattatgcctcattttagaaaatagaagaaaagaaacttgattctaaaattttctggaagaataaacagtaaagaaccaaccatgaaaacatttttgaaaaagagtaaaaataaacatttttgaaagagaatatatttatatgtatatgtatgtataaactgttaactgtttatatatatatatgtatgtgtatatatatgtatatatatatgtgtgtatgtatgtataattttaaactgttaacctaggttgttaagggagagaaaaatgaaagagaatcaagagttgctgaccctgataaacagaaaactttaatgtatcataaagtacaaaaactagtttgggaagcatcccaggataattgattcaacatttggaagggggaaaattgagtttatcatcttaacaaaactcagcttcctaacagattgaaaaccgaagtgtaactaattcatgaactcttttaaaacacatatgtacacatgcacgtatgcaaataaatgcctgatctttggagcaagaaatttttgagcttaaaa

SEQ ID NO: 114951 - DNA, 1031 bp, Homo sapiens
gtaaattggtaggacttggtgatgatggtatatggagagttggtcaggatcgtaaaagtacagtagtatattgactactattgtcccctctggtttaccttgtctaggtactgaaaaactgtttaagatttaggccctattctagagtaatttaaaatctcagaaacatttggtcagtgaatttatagtctgtactgttagaaaaaaatctaacacattttccatagtaatggctattaacatttgttacatcaattattagttatattaatcttttgaaatatccataagcaaaagattaaaattgatacctagatcttattctggatcttattctgttattaactacttcagtctggacaaaataggtttaagaaatgtattactaaagtaacttctttttctgattccttctgttacagatgattactgtgaatgcttccttgtttcctagttctgtgaccaactcattaattgcagttggaaatgatggacttcaagaaagagacagaatggtccgagcatgcattgccattatctgtgaactaggtcagaattttcttcaagtaatgaaaatgtaatattttagaaaggatatataacatttgagatatatatatctatcatatatctatcatatatatatcatatatctcatatatctcatatatcatatatctcatatatctcatatatatcatatatctcatatatctcatatatatcatatatctcatatatatcatatatctcatatatatcatatatatgatatatatcatatatatcatatctgatatatatcatatatatgatatatctgatatatatctgatatatatcatatatctgatatatgtcagatatatatatcatatatcgtatatatatcatatatatcgtatatatcatgtatatatcatatatatcgtgtatatatcgtgtatatcgtgtatatatcgtatatatatcgtatatatatcgtgtatatatcgtatatatgtatttttttaaattatactttaagttct

SEQ ID NO: 114952 - DNA, 1023 bp, Homo sapiens
cttccaatgcaggcagctcttttctggctttatctccctcatttttaatgtaatttttccactagtcagttactactattcttttcttaatcttatttaaattctactcgctgcccacctaatttgagctgtcatttttttcatatatagtttctttattcatgtaataaggaattccacaaactttttacatttgaaagagattcattggctggtatctcatgcccttgatacatagcaagatagtggcaaagccagagcaagaaccctcttctgcaaaatttccaaacctacattggcccatgagtttgaagttcaacctgccaactttggccttcagagcccagttttggtccagccaactatttttatctgacatgtcttttgccaccatgtgtaggcaaactacccaccactactaccacaattgttacttccttcctactcttcattttcagcccttctcaccttacatcgatcttctagtctgagctcaaatattagatattccccttaggtaactcagtgcttctctaattcctttgtgtcagttccacaaatttattacctaatcatgatctttaatttgttttatatgtctgccctgtcatgccagaagagattattaaacttttacagttttaacagtgactgcattttatggcttctcccttactgagcattcattgatttatgaggaaagcattctctgatttacacacaatttaagagtttctttgcatatatttacctggaaaataagaagagtgattttatttgtaaaaattttatgtatatatttcatagcacaatctggtgaattaagtatatgtttagtagacacaagatttatatagaattttatacttgaaactttagaaatcatctgttcatacatatcttcattttacaaatgaggaaactgaggcacaagagaggattggtttagccaaggtaacatagtttattatagcagacttaactctaaaaaccattttgccggttttttcagccagctcttta

SEQ ID NO: 114953 - DNA, 2499 bp, Homo sapiens
tcttcttggttgtttttgggaagacagtcagaacctctcatctctgacatggccaggaatggaattctaagtccatttgaattttaataggattgccttagattaattgtattcagatagaagaaatgctttttgaatcacagactatctatatataaagcattgattagaataatgaactgtctaaataaaaattatgcttctacataaaagactttcaaaactggataatttaataaattttacaaagaaatgtcagtttggtgctatttgtttggacatcaatatttgaagtgaattcagaattcaaattatattttggtaagatagaatttttatggatagtgcctaatttagtttaagccctggtcaaaattgcaattaaatgaaaacagccttgaattatttttcctttacaatttttataaaatgtctgaattttatcagagataagtgaatttttttagtagactttttacactttatgtttattattctttctttatgaatagatgtagtcttgtaaattactatactgttctttcctaacgttttaaaagaaaaaattggtcttttaaatgacagatatttatccctcgagatgtatgggttaattaaataaatatatgctggtactgagaaatcatataccaaaacaataatataccatattgacattgtgaaaatgggtttcatctatcagtattgtgatacaaaaagttgtttaatagaattttatcaatgattaatattttgtgtattgtttaggtgcattgacatacaacagagcaacgaggtagagaggacacaagcacttcgattagtcagaaaggtatgctctatgtgtgagagtaaaaggcaaatttatggtttttatgttaatatttacatttttagattagacttttgtgaaatctttattaagattaaagactaaacttttattaaacatttttattaaagttttatattaaataaattcattaaactttgaggtaaacaaatattttgtggaattctatgtgattgggtataggtagggcaatatttcttataaaatgtttattttgaagaatatttcttccttcagtagacatgtaaatgtagttactgctttgataagttactagaggaagaggattacttgctccccatcctgattttctcttaattgcatacttagagttaatagtattaaatggaagtcacaaatactaagaagttcattgttttaaaggtgaatttggatacaatctgtgggcagttgcaataaacaattcaggcccttgtacaggataaaaggtcacagcctacactccacaagagagggtgttaaggacaatccataatgcttctcttgagaggccttcagggaatgctttgttgtttttacttgataccctaatggtggaagaagagagtgaactgagagtaaatatggttgggacacagcctgagtgagacaagtgtcagtcatattttatcttaatgttcatgagaatcatgaagtatatgtttgtttgcataaaaaatctaaaaatattttccagttgaattttttagttctttttttctcttcctatctttcaactcagtacacaggttccaaaatggtgtactgttcaatttctatgttagctagggttccctgtttttcccttttcttaaaattgtctaccttttggttagtaatagtaatagtactcacaggtgaacaagtaaatggatgagttaagccttaaaagaagtttgaaattcgactaagaatgataccggaaatagattaggagactcttgttataggcgaactgttacactaggattgtaatttgacttttcaaattcagattttaaaaatctatggtttttatttatacaattcttccttcttccatgactgagaattcaagataaaacaaaatttgtttctgaagaacctagaacaattttttggttatttgggttatatgtcagtatttataatgttagggactaaaatatatattaatatgtttaaaataataaacacattaaatacaaatataaataacatttttatgaaaaccatattttattttattttattttttcaataatttttggggtacaggtggtttttggttacatggataagttatttagtggtgattgagatttttgtgcccctgtcacccaagcagtgtacactgtaccccgtatgtaatctttttatccctcacctcctcccaaactccccccacctctggtccccaagttaattatatcattcatatgcctttgtgtcctcatagtttagctctgcttataagcagggaacatacaatatttggttttccatttctgagttaatttgacttagaataatggcctccggctccatccaagttgcttcaaaagacattatttcaattgcttttatggctgagtaatattccatagtgtataataccacattttctttatccactcattggttgatgggcacttaggaatgactat

SEQ ID NO: 114954 - DNA, 1052 bp, Homo sapiens
ttgaaattttgtgttgagtttttagcatgcctgccataaagtgtatagatttgtactgtagtgtaactttgatgaattttgtgtgtgtgtatatatatatatatacacacacacacacacacaaccaagtaacaagatttagaacattttcagcatcccagtaaagctctgttacatctccaatcagttgtaaacattattctgacttttcccattgcagactagtttttcctgttcttgagcattgtgtgttggacgtatacagtaattactctttcttcttctcattattatctttgagattcatacatgttgattttttttttttttttttttgctgtgtaacatttcattttataaatagaccacaatttattccattctgttgaagcttttctgggttgttttcagtgtttgactatttggaataaagctgccctgaatgttcttgtagaaggctgcaagaatattcttatagaagaggaaatgcactcatttctcttaggtatatgtagaactagaatttctgggttataaggtacatgtatgtttagctttagtagatattgctaaatagtttgctaaatgattgcactgattatacttctactattatgtataggagtttcagtctccccgtgtccccatcaacacttgctattttcagtttttagttatatcctttcttgtgtggggtctcattgtggttttaacttgtgttccccggtgagtgatgatgttaggcacttttcatttgctggttgaaagtttggatagcctatcttttgctcatttgtaaattggattatctttcttgttatgtaggaattcttgatgtattctggatatgagtctttacagatatatgtattgaaaatgtcttgtttcagtttgccttgcctttgccttgcctcttcattcttttaatgggtctttgatgaacaaaagttcataattagtgaaatccagaatgctttttgtctatttggaagagatctgtgttttcttttaaaggttttattcctttatacgtgtttaagtctttgaaccat

SEQ ID NO: 114955 - DNA, 2009 bp, Homo sapiens
aggttgcggtgagctgagattgcaccattgcgctccagtctgggcaacaagaatgaaactccatctcaaaaaaaaaaaaaaaaaaaaaagagtctgagaggcccagtgcggtggctcacgcctgtaatcccagcacttcaggaggcttaggcaggcagatcgtggatcacctaaggtcaggagttcgagaccagcctggccaacatggtgaaactccgtctgtactaaaaatacaaaaattagctgggcgtggtggcaggcacctgtaatcccagctactcggagggctgaggcgggagaatcacttgaacccgggaggcagaggttgcagtgatctcagatcaggccactgcactccagcctgggtgacagagtgagactccgtctcaaaaaaaaaaaaagagtttgagaaataaatgacatgactttcaaaagagtcaacaataagactgatggcagacttcacaactgaaatagtggaggccatcttgaaactgttggaggaaaatagcagctaacctaaacttctaaatatccagcaaaatattcttcaaacttcaatgtaaaaaaaaaaattatttccagagaaataaaaaccaagaaaatcattaccagcaacctggtctaaaattaaaacactaacagaacaagtcaacagcaacaacagagttcttcaggtaaaaggaagatatcccaataaggaaccatcaaaatgatgaataataaaaagggtaaatatgtgaataaatataaactgatattgactaaatactgttaaaacccattaacagtaatacggtatagtttttaaaagatagaaaaaacaattgtaaagtgaaatgtgaggggagaaagtgaaattaaagtgtgagattctggcattgaggacattgtgaagtgatactttttgttagataagtcaacaatgcatgttgtaatcttaatagtagccactaaaagaaccatttttaaaacagtaaattattgagaaggaaaatggaataatagaaaacaaatgattttttaaaaggcaggaaagataaaagattaaagaaacttaaaactggcaggtcaaatgagaaatagatgatacaaataaagctgctgatttgaacagtaaaatcatatttttcaaaatattattccataaaaataccttattttccagtgtaaatatataatgtatataaatatgtgaaaatatacaacacataaatgcacacttattttgtttttctgacagcttctttgtgatattggccacagtgaagaaaaactgggctttcactatgaggatatcataatttggtaagtgtggttcattcccccctcccatccctttcagattttagtaattttaattttagtaattttaaactagaaatagaataatacagcacctcatatttgattttatagaaatagttgcttgaacattagaaaaaatctaagagctacagtagttttgtttttgtgagtctttgtgatattttctaattactaaatatgaagaaccaaagtgaatgttcaaaaatatctggacttctataatttaaacttttaaattaaatctgaaatttgcagactaaatttctcatattattcccaggaacaactataactctaggtcttacctaagagaaagtttgtgcttacaacagacttgatttgcccatgcacactaatagaggcatgttatatggctttataactatcttttaggtactcttaggaattaaaattgatataaaaggtctgtgcctgctattggcataaattattattatcattgatttaaaccaatgatttttgggaggtatggaaccaggtaggcagagagaggatattcgattgtagagacacaaatggtacagcttgaaaaaggctgtaccattgtttatataaaacaaaggctgtttccattgtttatataaaataaagtacagaaggtaagaaagaactcaataacattttcttgattggtaagaatgtactaaggaggcacagat

SEQ ID NO: 114956 - DNA, 1484 bp, Homo sapiens
aaagaaaaaattggacaggaaatttttacagttatcctaccaatagggtagtgaacttttatcagctttttcttagggtccatgcttctcgtggatgtgatgtgatatgttgatcactttggttgctttatactgtatggttacaatgtttataacttcatactgagaaagaatattagcactttggagacccttcttggtcttcagtgttaaataaatgatttatcttctctttaatccatttcagttagccgcaataaatcaattaaggacattatatgtaacttttaggtaaaagtcaattctccagactcatatctagattaaactggcatatattcatccaggtgggatccataaaggtagtattagaccaccgctctcaatgaaaactaggaaaacctgtttgaaggcagcaggaagctgctcgggcaacaataagtgcagacaccaacctttcagaaaagagagaatcttgtacaaataagctgcttcaacaactttttcccaggggacacttgctgatgttaagtatgggcaggaaacgggattcaagcattaggcccagaaatactgttgccgaaagtcaaaaaacagcacagaggttttggtggagtcctacctagatgcatcaagcatgaggagattctcccctcagttcagttgtttaatcctggggctacctgggatgagaaacttaaaacctaagtagaaaatctttgaaaatcaggaatggagtttgcaggacaaaaattaaatttttcatcctccttggactagttttcttaacaataagctttcagttgaaacttcaggtggcagggaaaaagcagaggtaggcctggtcttaccagggcaaccacctaacgtggactcaacaccatctagtggtttaacagaaagaaggctgaaccttctgtggagacagataacaccatcaaatctttgcaagtttttatatacaatcaaagactaaggagctaccaaaggacaggattacatgactagaacaaaagggaaaacagttaataacagatccagagatgatccacatcattcaggtttattagatgaaacctattttcagtaacaactatgtcatgaacatagaggacgtatggagaaaattgatgtgaaatgaagaatttcattagcacattggaatggctaaaaggattaaatggaaattcaagaagggaataatacagtatctacatttaaaaactcattagatacatgtaatagaagattagacacatcagaaaacaggttatagaaaatattcaactgaagcattgagataaaatggaaaaaaaaaaaaagaggatttacggatttgtgatacacatgagaagatctggcatacatttaattgaattaccagaaggagagtttggacagaagtagttttgaaaatatattgtatagaatttttcaaaactgcagaagtagatcaacccagagatttaggaagttttgtttac

SEQ ID NO: 114957 - DNA, 1087 bp, Homo sapiens
acttcaattaagactaactacatttccagtgctcatagtcacttgcaactagtatctactaaccacattggacagtgaagatacacagctttttggaacaggagtggcttaaaagccttcatttctaggaatctgttgaacacctctggccttcatttctaggaatctgttgaacacctcttattctcccttctcattcttcatttatttctgtctaggtcccaggttttcttgcattaggattagtttccctttttttctttcttcttctctcttcagtttccttgttttctgttggtctaaatttcccccacagtatttcactaagttattcgctccacctcctctctctttcttgatttgtgctcccccactctcttctgccctttctccttctcatcccttctctacttcttcctttcgccccttcatcttctcactcttttcttcacccttccttgtcacctttctcttcctccctcttttctcagttccctctccccccttctctgttccccctctccttccttttctccgttgtaccactgtagagtatgcagtgtatctctgtaatgaaggctctaaactttttgtactttttgtcttgtttgttttttgttttaccatatcctttttaaaatgattttcatatatccctctggccttggtgcaagctttgtagcagcccctttctttgctatgttgccatgattttaaaatcctgatagccaaacttattagaatttgtctattctaagagtgagtacgccctgagtcaggatcttaggggctgtcccatgaataaagtccatgaactttggacttcataaaatctattttggctgcttagtgatgtgctgggaaaagcatgagctttagatgaaacagatggagacttgcagcccaactgtgattaactgtcagggcaatcttaggcagatttctttactcagaggtaatcttgctttctgtagaggcaaggtctcagtctagtgcctgacacataatatgtgctctgtaataggtagtgccttgattcaacctcatgtttggtttttgtgttttgtgtttttttgttttttgtcac

SEQ ID NO: 114958 - DNA, 1988 bp, Homo sapiens
aaacctggtcagtcattaactgtaataatcattgtttctgaacagttatagatgataaatggaaatatatttagacatttgcttcaagattctagtcagcctccagcccttcaagaaaacattttataagtgattttaattagaaggagctcatgagtgtgaaaaaccttgtatgaagcctagaagaagagataatgacaggaactaaagctttgttaggttcatgctgcctgatagccgttatatgcatatcaccctcctttcacatactccttttgtagttgtttctttttccttcttctctgtcctcttggtgttttgcttcacagggcaattggaagggataattagcaatacttactggaattggtacatgaccagacatatacttcatgcttagtaaatgttggttggaccctcctcctcctgagtactgttagcaacaacaacctggtcttaaaaaatgtttactcacatatttattatttaatatagaaaaataattcttgaaagcctactgtgtggcagagactgtggtaggcatttgaagataattgtaagcaagatgtccttgtcctcataaagcttaaaactcttcatagaatcttggttcatgttatataactgttcacctgtttttttactgtcctgttttagagtgaaaatattagaaattacagagctacacagataacgctctagagtaaatgacatctcatccaaactactgagagtttaggtaagagtgatgggaaattaaaggctaggtaagtgatgggatagtgaataagaattgagggatccttgaagtgaccgtaagatgttggggaatatattctgagaatatacttatgacaacatagtggcctgttgagttatcagcatatttggctttattaaatttgtactgactcctttaatttattataatttactactcttgcatgactgaaaaaagtttttttaaggatttgtttgaggtttcattaataacagttttagatagaattatgtatcaaaaagtacgtcatatgttatataagcaaaacaaattctacctgcatattaaatgatttcaggtaattcacactaagaggaagagggtcataatttctagtatttgtgtagcactttatggtttgaatatttctatatggaatatctaatgtgatcattaacatagctctggaaggtcattattgtttctactttaaaaacgaattaatcttggatcatgaaagtaatgtactactaaaaccctcatataataaaagttaatttaaatagactaatgtgttaaacacttgcctgggccagctgtataaatttcacatgattactctgtgaaaattggttatgctaaacaaataacttttaattatagtcattatttattgagtagctgttatgggctaggcactgtgctaataaggaagttatatctcacattttgcaaaagcatttttaaagtaggcaaatatttccactttacgtagagaaaatggatgctcataaagttaagtgatttagccaaggctacatggtttaggggtgaatgagctagacttgaattcagttcttttttattccaaaggttttttttcctttccattactcccaagtagcatgtgcatgccatcagtttttggtcattaatttactataggtacttggattcagatttgtttaaaaatcagttttgtgttgtgttatttattgacaggtaaagataacaatatagtttattgcagcaagttataaagcagcatatattgaagccaattttatattaatgtttacacacatatatacatatgtgtgtgtacatgtgcacatacagagaattgagccaagaaataaataaatgaataattagtgaataatggtttatatgttagttttctcttggtggtgtatgtattatgtatctttgtatatgtgtgtgtttaaatatgtaaagtgttttatgattagtgacttaaatgcat

SEQ ID NO: 114959 - DNA, 1083 bp, Homo sapiens
ttagcactgcgtgaatatagtgcttgagagggtggaatagaaaaggatcagaatgtggttttctgaaggtagacagcaggcttaaatttttgtttgcctttttctttttgttttcctatgcattgccatgttaaaagttttgtatttgacaaatttgggtgaatgctattgcattgttaattatatttaattaggtttgttcttaccttagaaagtgagattccttttcaaagcaatagaaataagtttggttagggtttttggaaaattatattatttcatatcttgttgctcagagtttgggaagtagatacattttgaagcagcatagtttttttttattccctcttttgtgtatgtccatattataactatcattattataactactcataagatagtaagtcccttgtccattcttatattttagaattcacaggtatgacctagagacttcttctgttataaatgccagattgttaaaagtcaatttaagaagcatagtcttgtttactataaaaggacaataaacatagtctttaatatctggcaaaataacaaaattttttttcgttcttgctttttaactatttattgaatagagagacatgaatttattatacatgttttgctcaatgaatctttgacagattgacacctgtgaaaccagcacccagatcaaaacagagcttggtatattttaaacatttttaaatattttggttttaattgacacataataattacatatttatagggtacagtgtcattttgatatgtgtatacattgtgtaaaagtcaaatcagggtatttagtaaatccattaatggattaatcagttttctgtcgcttataaaagaatacctgaaattgggtaatttataagaaaaggaattcagttcttaccgttatgaaggctaagaagtccaagattgaggggctgtctgacgacaccttcttgctgtcattgaagagtcccagggtggcacaggttatcacatggcaagggggctgagcgtgctaatgtgctagctcaggtcgcttctcttcttataaagccaccagttcctctcctgtgataa

SEQ ID NO: 114960 - DNA, 1026 bp, Homo sapiens
tcaccttatcatcactgaggccttctctgatcactgtgtctgaagtagctcctcttactgtcacttgtcattttttttttttaatcgttttgccttttcttttttgagacagggtctcgctttgtcatccaggctggagggcagtggcatgatcatggctcgctgcagcctcgacctcctggactcaagtgatcctgtcacttcagcacccccacgtagttgggagtacaggcacacgccaccaagcctggctaattttttggtattttttgtagagacagggttctgccacgttgcccaggcttgtcttgaatcgtgggctcaagcgatccatctgtcttggccccccaaaagtgctgggattgtaggtatgagccactgtgcctggcattattgctttttctttcatagcccttgtcactactgatattacggtatatatttcttgtctccctggaatgtaagttttgtgaggagacaagtactttgttttgttcaccattgcatccttggtgcttagaacagccctgggacatagtaagtgctgggtaaatatttgttgactgaatgattgactctcaaatttgtgtttaagcttgagggctcctgaccaattttgctgcttactcagcatcgtaaccatgtcgtcaagtacatcaaacctaatatgtttcaaactggctaattatctcattattctaaaaatctttctgggttaagagaagtactttaattgggccaaataagacacccaggagacatcttaacctcgttccttgtccttattccacatatccaatctgagaccagatggtaatgattttatctctgaaatacttgcaaatctgttttttccatttctgttgccatgcctttattcaggcccttattatctttcctgatgattctattgacttcgtaactactctccctgttctagttctgttcttttccaatctgttttcttctctgtaaccaacaaaaagtttcccaaaaagtcaatcttccctcgcagtgttgaacatc

SEQ ID NO: 114961 - DNA, 1156 bp, Homo sapiens
ctattttgctatttctagcctttcttcagatgaccctttaaatagagtatgctatatagatgaattacatttttcttttgttgtacttgctacctctttatgttccctgatttaaaataagttttaatatttagatttttttgttgttttcagtgattatttgccccctaagaaatagtgatgtgagagttggaatagaaaaagattccactgcctttcttttggtgcttgtctccgagaaatttaaaccgggtattttgtaggaaattgattaaatacctgacagcaacttggcaacatgtgttgttttagcatacacttttaaaataaagaaaatttttacttatttcagtatgcaaaagcactagagtaaatatgaaagtgaaacaaaaatactgaagtgtatgaaggtaaagaagtttctgatgaagtacattttctaaatgctgataattaactatgagtattaatttattttaaatacttgaagtgtattaaatttttatacatacactctttggaagtgtggaaaacagtgagttgggaatttcctgaagatgggaacacttaatataaccttgacagatccttgctgactctgagtctagactatttaaaaagttcactgagcagatttaaactgagtgtagattattagctaccaaaagaatacttgtttttagtggtgaattttaagtgattgcttgattctattaagagtgatataatgcagtaaatgtatatttttaaccaggattatattatttattgctcttatatatactggcacatcattttcctttttccaaccattttaaatgactttccttagaataaagctgaagtagtgcagtaaaccagtgaccgttccacatgatctgaactttgtctaaagtgataatttgattattaaaatattactaaatgtagtttatggagtgatggattaatttcgcagacatcccagaaattatatacttactaagtagatgtcgttttcttttaagcattcttcttgcaagggacaggatcaatggaaccaacatcaatggaaccattgatgttactattgttcaaaacattttaaaattctacttgtgaagattgctaaagcttgtaaggcctttaaatttatcctatatattattagtccttc

SEQ ID NO: 114962 - DNA, 1039 bp, Homo sapiens
atttagttactaagaaggaacagcttgtcagataaaagtgtatttagctgttttagatgtgtgcacatacatatttttatcagtagtttcatacttcaaaaaatcacatcttaaaatagtattgctatttatttccatgcttagtgtttgaccctcatataataaaatttttaattacactttttttcactcataattctataatgcactttctaatgtttaccacactaccgtcaccaccactcccctccctcaagaagaaaaaaaaaggaaaaatgaaaaactctgaggggaatggagttgcagggagagactccagtggttggaaacacattttgaggtaggtgagctgtgaactcttaacatttagccatgtggtagtttctggatatgtaatcaggtagcaagtggaatattgtgaaactgtttgttcagtgtatgtgttataagtttttaatcatatctgtcacatgtggtattagtataaaattataataatggatgtttgaatactaagctatttcctaccttgtttatttagagtgacgtattactgtaggctataactttcagcggtgtttttaatggcataacagtagaaagcaggtcagattaattcttatgtcatataagatttcatatgttatataagaataattcttacatgacaatttgtagtgagttaaattttagattggaatagttttaaaaatgcttaaaccaccttattttaataaaaaccttaacattgtctttcttttttctcatgggaaagtttgttgtttcatggtcatatttcaacattgttttgaatacacaagtatatgttattattttacctagcagaatgaaaaaagttatatatttgaaaagattctggttgttcttcatatcaaaattaaaaggagatgattaagattcaggtaaactgtggcagttgccttttgctatgcattgtttcttctaatagttattttgttttactaaaaaaactctacttgatttttgattccgggaggaattctttgcatacatcaat

SEQ ID NO: 114963 - DNA, 2126 bp, Homo sapiens
acggggtttcaccttgttagccaggatggtctcgatctcctgacctcatgatccacccgcctcggcctcccaaagtgctgggattacaggcgtgagccaccgcacccggccctgaactctaactttttattttccagtttcttctggttaggagttttctcatttgtttaatcattcagttagacaaaatggacattgactgaacatttatataccagatgctgaattaactgctggaagaataaaaatgaggaaactctttcccccttttaagggtttcattggaatagacataaggaaatgattgcaggtggaaaaataaattaagtaatcaaactatataggaaacagaggtaacccaatagtagccagaggagagaatgattaactgtctggtgggtaaaaggatcagagaagtctcatagaggggttgacttcttaaaagaataatggtggacatagtggaaggaaatatgtgctctcttgggaatataccataccctgggaaggggaaagttaggaagcagaggagctgcctagggtgctgctgatataatctgacggatgatagaagactggaccatggcgttggctacagaaatgaagtcaaatacatattaaaatggaagaattatctaatttgctttcttcagatttcagactgattttgtagtccccccactctatgcagtgaattttatttctttattaaaatgtagaggctgcccatccagtgtgaattcctcaattgtctgcccagacttactgtctttaccctgattcaaagaataaagcgttgctattcttttccaagggtaacttggaaaaacgtttatgcttctaatactgtttcctcaagattctttgtagaactaagatcttctcttcatttctcccttacagttggctcagttttctcatgttcagcaagcaatttttatgttcttcacatggaccaggtactatgttaggcatgggctgaaagtgggagatatggaatgataacgacaatattacaaaaacttttttttgaaggctctacagacagaatagtttgtcttcactccacaactttattgcttaacaaagtcttgtaagcaaaactctccctctgtactgaaaataatttcttaaaagatgctagtaacctcttgcaaaatttatgggcatttttaagttccacattctactattatacatactattactataatactagttttgtgccaggcactgatttcattattttacttaatattcagctgttttagctacacttattgtctctgttttacagttgagaatataggctttgaaattttaaagggctaaaactcaaacaggtaacttaaccagtgtcacagggcttagtgagtgactggtatgtgtctgataatcatctcagagttgtgatgtgtaaaactttgcaccccaaagtgtacccacttttcacattctaggtatttccgccatcctctgttattcaagctagagatctgctgcttatcctctttgttgtattgctaaactcctctgattagcttctgaaatagctgttgaattcagtctctccttctgttcccattgtcagttcatatcctcattatgtcatcgtgtggcagtaatatcttctcaccttttttcactcggtctactgtatgcctgccaggattatttcccagaaatctagatctgatcttgttgttctcttaaataaaaaaacaaaacaaaacacatacacacattttctaggctaatttttgctcacagaatacagtccacatttctttagtttggcattcaaggccttttttgatttactcccatatggttttcttctgtactattttaaccatacacatctcaatatatctgcctctctgcatagttcacttcattacatacagtccttctcagagaggattggggagagtttgccagtctaaagcaccaacccccattccacctctttctccgtggagactgtatgcccctacttgagaatctttcagtcaaagaagaatgtttgctattccttgaacatggcatgtagtttaatattcgcttgaccttgcgtaggtatttcctttgccttgaattgcatttccagcacagtttatctatag

SEQ ID NO: 114964 - DNA, 1664 bp, Homo sapiens
cgggcgccgcgagggcgcgctgctggggaggagccgggtccggggctgggggccagaggcaggggcgggccccgcacgggaccggcggggtgcgggggccagagccggagccccgcctgccggcccgcgggaaccgagcccggggccgcctcgccggacccatccccctacccagcgcccgcttccctcgcccgagcccttctccgggcctcgggctgctgcgggtgcgggggagccccgagtggaactcggcagacccggcgaccctctgggctcgagctccggcagagtggtttgcacctatcccggagtccggcagcccaagctaggggcagctggagggaggtagaggctgttatttaggttgcaggaggatgtttgagggaagagcgaccacatcctgccctccccgtccccggagcagaagccggacctgctcggtgcttgccgactgcgtgactgctttcccctttgcccaccgtcctgtggggacccgcagcattgataacttggtagtgaaacctagaactggtcattactgctaaatgtctggtttatgctgtttcccttctgcttccctttcccgggccgctgggactgtagttggctaaagaccgccccctcaccctgctgcaggttcattgtttaccttctgcagtggagatgggtttgtttacaccttccgaactggggaaactcgggtgatatttttaatgacctaatcccgttactagccagtgtttcctctatcacttacagtactagagtttattcgacattatctcgttgaagatttagtagttacgtacaagattcttttctcttccacggtaaacaggattgagcctactgattccgacgaagtcatatttcacacgggctgtagcttggagtgtaacccggttcagctgtacagaatcagtttctgaggtctataaaacaccttaggaagtaaacaaaaaaacttgttgtagacattctgtatgagatcagttttttaccctatgtcgtacctgacgtaatgactgttatctacagtaatttgttaaagctgggctccttgttgacaacggctagagtgaaagcatagtgcattttctaatttgttttattttgcttatcacgatgtaagattactgttttataaactgaatggtcagctttcacttagctacaagagtacatttttataacttaatattttattctgaaagttcagggacttagttttgggtgaactaggtccttttacaagacagtttctaaaatataatacaatatagtagagcttaaatcctgaaaatggctactaattagattatcaatgcactaatttccaccatttttttcagcagatcggttttgagaattagtatagaaagatgtaaagcttttgacttctgtgcaactgtttggaaacttgactataacacacatgtgaaaaatctatataaaatagattcactagaaaacttcctaacaaggataacttctacaatttcaggtctgtaaaagatgtaattagtgagtgatttaatttatatacaggcatatgtgttttagatgaaggtgaagggagcccttaataaacttgagtttaacttgtgcattaaaaacctgctcagatgtggtgctggaaatatatagttgtattttaaattgag

SEQ ID NO: 114965 - DNA, 1037 bp, Homo sapiens
atactttgataatcatttatagtgactcacaatcaattccctttaagactttcaaagtcacaaattgaaacaatgctcataatgaattaagccagtctgtatgtgtgaaccagggtgagcagagacatgaagtaagcaacagtaagatttcacctaatgaggttgagacttaaataaaagggcatgatattggggaggaatagaaaggacctagtctatagctagggagtaatggactacgggggttgatggaaggaggtaatgatcaaccgatttatcaagaccaaattcaaatggaaattctgataatcctagtcatcttatgtaattttctcatttgaagtcacaacatggactaacactttctttttttttctttccaaatgtgataggaaagcaaagatatcctgttagtggatctaaactctgaaatcgacaccaatcagaattctttaagagaaaatccattcttaacaaacggcatcacctcctgttctcttcctcgaccaacgcctcaggcatccttcttgcctgaaaatgccttttctgccaatctcaacttctttcccacccctaatcctgatcctttccgtgacgatcctttcacacagccagaccaatcgacaccttcttcgtttgattctctcaaatctccagatcagaagaaagagaattcgagtagctcgtctactccgctgagtaatgggcccctgaatggtgatgttgactactttggtcagcaatttgaccagatctctaaccggactggcaaacaggaagctcaggcaggcccatggcccttttcaagttcgcaaacccagccagcagtgagaactcaaaatggggtatctgaaagagaacagaacggcttctctgtcaaatcctccccgaacccttttgtgggaagccctcccaaaggactgtccatacagaatggcgtaaagcaggacttggaaagctctgtccagtcctcaccacatgactccatagccattatcccacctccacaaagtaccaaaccaggaagaggcagaagg

SEQ ID NO: 114966 - DNA, 2953 bp, Homo sapiens
aagtttaaatccagtaactctactcaaaccttatattgatatgaaaaggggaggggaacggagggcagaaataatatacaagacttattcttgccttatgcctgtgaaccataggcatacttgtttgtgtatttaactccctttcactatgaatatgaagatcactgaatatgtatctttctttttagatagaggaagccagcaaagcagttgaggtaaaattgcatctttacttcttgttaatcatgtgtgtgacatgcgtaagcccctgttttctacctgcccaaccactctcgccacctcgcttattactatgtgtttatgacttctctgatcatgaaagatgtttagttaaaagatgataccaaaaccattgctgcttagcagactaatagagtggacaaatacattttatagacaaagctcaactaaatccttaaatatttgctatcttttcagaatgggagtgaggccctaatgattctagatgaccaaactaacaaactgaaatcggtatgtattaatatgtgacgtttgacagttcttacttatctgaacatgggttctacttcctgtagatgttgctgataccaaatctgtattgaatctatatgaaaatccaattgagacaactgtttttcaaaatattagtgtaacatctatgtcaatatacaaaagtagtcaaaaaaagattagaaaagtaatctttttagtagccacacctgaatctaatctaatactttttaaggatgtggacaagatagatttgctttgagacatgtctacacttcctgacctaaacagcttaatatgaaatctattagttaaatggaaattaaattgtgacagctactttcctaaactttaggaaacaaatgattacaatatacgaagtaatcttttttagtagacacatctgaatctaatccaaatacttttttaagggtgttgaccagatggatttgtttggggacatgtctacacctcctgacctaaatagtccaacagtaagtgtttgtttttaaatttgcaatgtaataaaatgacatctataactcaaattggcaataaccagaaatcttaagcatctcattgaaacttggaaggtgactgttgatttttgcaaatgaagtgtcaatggtttttagaataaatgtgaatcttaagtcaccatgggaacctatccacactaattcagttatattaatattgcttacagattaaacctgaacaataagtcagcaatgtagtccttcttggtatcacttaggattagaaggaggaggtgaataatagtccttgaataagcctacttgaagaaagtatgactgttagatggttaatcataaagcctcctggcctcttcatttcttttgcattctgtctgttgcaatttagcagcataaatttggtgtgaagtaagatttaaaacaaacaagtggctcagttatattccaccaaagcttgtccttgttagaaagctgcccattctcataggattttataccatatccagtctgctcaatattgaatgatctgtaacaaccctgtaagaacagaacagtattttcctttataaattaaaaaaaaatggtggttcagggaaaaaaaagaagaaaaaaaaataaaaaggaaagaggtccagattcaagacttaggcccaagtcttcagaccttccaaaacatacctctaatgaaaatgtccatgacattttgaatgacttcttgcaacttcttttatttatgtaacagtttcctgagcacctgctatttgcaaggcatagcagtaagatgcacaacatcaatgacatcatggaatttactctccggcagggagaccaacattaaaactaatcacatcgttagtaattgatgttactacagggtatttatctagttcagattcaggtaatgcttctgcaggagtgagtttctagatttgaacataaaagatgagaaggcaataaacagacaaaaagagaattagtctagaataatggggggaaatgtctagaaaggactctcttgtatcaggaaattatcatggaagcctatgtgaccaaggttacaggagttgaagcaatggatcaaagattggataaaattctcccttcagacttctgcagagaatttgaggcctgtgaatccttactgcataaaactttcaggtcaaatgagatggagaggagcagggacttcatgcattcttctctgaccctaaccatatgagtatcacaatgcatggtagcattctaaaatgcctttaagagagaagcctgtttaatattcattttagcagtgagccctaactcacttgcctatagaacctttcattcttcataatttttgttatagttctgaggataaactttttaaagtactagactagattatcctgacaggtccatcctaactctgaggtccttttgatttgtagtcaactttgtgctctcctccattagtgatgttttctcaaataaatcagtatctgaacacttacttcccaagtataaatgacattcaaacaagtaatattcaaagagagcaaagcactcaagatatgaagtggaattccactggaataggcaaggaagtactgcctatataatctacttctgtagacttctagaatgttctaaaaaaggaaatggaaaacaacatggataatcttcagtctcatttttattagactttatgaagtctaagaattttttatttataggaattcaagttttagttaaactaacaataaagtaataaataccatcaaaatatatactctctgataaccaaaagaaggctaacagatctaattatgtgctggttaggctttgacatgttcttatctattgactctatagtcataggtcaaaaatagatttatctctacttggtaaagccagcatgtttaaaaatattcaactctttcaacaattgctctgaaatatgtaaa

SEQ ID NO: 114967 - DNA, 1051 bp, Homo sapiens
ggattctacttagacattggtgttccttagcgctagcctttctgttttttgaatttaaaaatttagtactatggcactatgtgaaactgactgaataaataatacttgttcaatagttcaaggcctagaagaaacatctctaaagatcttctagttgagctttaccagtgactattctgaggccaagagaattagagtgacttgtccgagttcgcacagctaactaagggatgccctggttcaacgtcttctatgccgtcttgctgtcccggatgaaaagtgccgaatcctctcatcgatggcagatcaagtcgaaaacaaagctgactgactttgaaaattttaatattaaaaccattgtaggatgtttttaaaaattcaacttctcttgtttttccaccctcatcagggaatggcggcagctggtcggtctcagggacaacacaaacaaaggatctgggtcaacatttccctttctgggataaaaataattgatgagaaaactggggtaagaattcacatttgctgatacctctctgaccacctgagtctgaccaacaatttgctacttgaatttcggctccccttcttcgttctcaaagttctgtggggaacaaatatatcatatattacatctccagaagtaacaggcagaaaacagaataggaggtaaaagtcaagatacttgattttgaatttgtgttctataataaatgtgaatctaagtctgttaagtctgttaataggcttagattcacattatgtctataatatataaatatatatatttttgaaattaaataaatatatataatttatataatatacaaatatacattaaaatataaatacatatataatttataaagtaaaacttctatatatatatatttttttttttttttttgacctcgggtatacagaactagattaattttaacccctagtttgtgacacttttatgtattgcttacatgtgaacttaccggctaacctaaagctagaacctcacccataacacatctacctctttttcatttcttttttccct

SEQ ID NO: 114968 - DNA, 1143 bp, Homo sapiens
gcattaggttttgttgttgttgttacttgattttgttttgtgttgctccctgccccctttacctctaaaattaagcgacttaaatgcaattcatttttgaagtagaaaaaacaagtatgtagctgatagaacaggcttttccatcaattgttggttgctagtaaggagggtcaatattgatttctgcctgggctaaggttcaactatagctgaggcttttcagagagcatacatgtactagaattgaaatgatagacagttatatttaatgtccacgctgtcttctaaaggatagcttgatgcagaaatgcttgcttaactgcctgaaaacctgttctttgtgatttctgatttgtctaactggtctgaagttcccaatgactaaaagttgatagtaattgaaagttgggtgcaaatatttaccttagagggacacatatatgacaagagctgcctataagatagttagagaaaatagtaactactcaactaacatatgattttattgtagttaagtggtacagagtgttgtgtggatccagagggagaaaaaggccattggtgttaatggatttggcttttaaaggaacaatggaagtcaaataagcaaaggtaagaagagaaaatgcattttaggcagcagcgcatatgcaaatcatgcagttggatgaacttaggatatgcctaaagaactctgactggtcagtttggccaagaaacagtacaggtggcatagggctgagaagtgtctgagtttgaaaagtagggatgaattatactgagccatggatgtcaggataagaattttgattttttttttttatttttatactttagattctggggtacatgtggagaacatgcagttttgttacataggtatacatgtgccatggtggtttgctgcatccatcaacccatcacctacattaggtatttctcctaatgctatccctccccttaccccccaaccaggcgccggtgtgtgatgttcccctccctgtgttgatgtgttctcattattcaactcccacttacaaatgagaatatgcggtgtttgccaagcagatccgtcattaaagcaggaaaaccaaatgctgattgggataacttaacctggctctattggcagaatgtgtttga

SEQ ID NO: 114969 - DNA, 1059 bp, Homo sapiens
actatgcagccataaaaaatgatgagttcatgtcctttgtagggacatggatgaaattggaaaccatcattctcagtaaactatcgcaagaacaaaaaaccaaacaccacatattctcactcataggtgggaactgaacaatgagatcacatggacacaggaaggggaatatcacactctggggactgtggtggggtcgggggagtggggagggatagcattgggagatatacctaatgctagatgacacgttagtgggtgcagcgcaccagcatggcacatgtatacatatgtaactaacctgcacaatgtgcacatgtaccctaaaacttaaagtataataataataataattaaaaaagaaaaaaaaaaaaaaaagccgctgatatttgtttagagtttttaggccaaccaatttaaatggatacttaattgaaaagtacaattatttctatggcttggcagaaagcaatcttagagctcattaagaattgaatgtcaaaggagaggtaggtgggcagatcactaaaacacaaattatgaaacagatttccacgaatagttttgcctaattttccctgtacttgctgcattttcttgtttaaagtcattggaatgaagtgctgtgtttctaagtgttacaaaagagtgagaatgataatacattttatcacattgggaattatctttcttaccgatggtatgctgtttgccatgtcctttaaattaagcattgtaataaatagattaaggaagatctttgtacttggaattatagttttgtagagcatgtctgctatgctttgaatgtctcctccaaaactcatgttgaaacttaatctctaatatggcagtattgagaggtggggactttaacaggtgattggatcaggaaggctctgccttaataaatgaattgagtcacacataaattaatggattaatgggttaatagattagtggtttatcatgggagtggaactgtggatttataaaaagaggaggagagacctgagctagcacattaacagactcaacctccttgctatgtgatgctct

SEQ ID NO: 114970 - DNA, 1049 bp, Homo sapiens
tttgaagcacactctttgatcaaaagtaaaactttcattgtcttagtggggctgtttttattttaaaagaaatgaccttcatacattgcaactattggttatagaaatgaagcaattaaagtaatactaaagcagcaacattaaaataattagtaacactaaaacatgaacattaatataattagtcacaatagtgagaatgagtcaaagacttcagcaaaaggcacatacccagtgaatattttattacttaaagtaaacacgtaggtttgttcaaataaataaaagtgaattcctggatatcatagagagacttgagtatcatttttgggaaactcagactaagttataatgcctttggctgtctaaacataatgagaggatagcattcggaactcagtcatgccagaaacaaagtgagacagaaaataaagcaattaccagtacttttattttcagttatagcttcagggtcatcttcgggaaatctgtagcgtcatgcacgagaaggttgtgcagtattcatatgtaatccattcaaaagctccttgaaaggttctaatttgtttcaaagtccctgaacactattgtcaaactcaacgttataatacagtagagaaagatgagattatctccctttgtattagcccactagggctgccataacaaaatacgcagactgggtggcttcaacaacagaggtttgttttatcaccactctggaggttggaagtctaagttcaagggccagcaggttaggtttctcctgaggtcattctcattagtttgcatatagtcgtcttctcttcgggtcctcaagtagacttctctctgtgcatgcacatacctggtatctcctcttcttataaggacatcagttatgttaaattagggcccacccatatgacctcattttctattaattacctcttcaaagtccctatttccaactacagtcacattctaaggtactgggggattagggcttcaacctgggaattctagaagtgggtacaattcaacctgtaaccaccgcacagatattatgt

SEQ ID NO: 114971 - DNA, 1028 bp, Homo sapiens
ctgtactttactatctaaagcatggtcatcgcatcatcacctagaaggttattcgaaatacagaatctcatgcctttcactccaacctactagaacacaaagtgcagttttgaaattccagatgattcatatccacattaaaataaggaaaacattgatttagattactaaatgttagcacctatcctaatttatctcataaggcccaatcctgtttccactgtcatttgcttgtggaatatcttcacctgtatattctaatgaggaccttgaattcaacttgaactaacaattgaactaatcttctttgtttctccaatcgtgaatcattttttcttggtctttatcccgctagtcatatgtctattcatcctggctttatacctcataaagctttttttttctttaaatcctccacacacagtctcaatgtctgtttatattatgcttttccatatctttcatgttttattcctttttatttgtaccactaattcagacataattgcctctcacttaaacttttaagatagcttcttgatagttcgtattgccttctgtcattcatcattttaatttatcatgcatagttgggttagcttaatctccctaacacacatcagtgtcagctggcaaagaagaggttaacctaagagtagtgatctataaaagagacttctcatcttacctgagctcctcacttgaaaatttcactttaattgaattataaactaccaccatcttaatgaccatattaagggaattttcacattttctgatttttttggagatagaaactaagtgatcaaaaaacagtgcagattagcaaaatctaaagcagtcagtttgagaaagccacaataccttttgagagtaaatgtaatcataattattttcactttctattaatttagaaagaggcctgtagctcttcttttcatcatttataattcaactaagaaattggtaacatttctagttgcaagtaagagtattttatgtatttcctcagcaacataatgtaatag

SEQ ID NO: 114972 - DNA, 1047 bp, Homo sapiens
cgcttgtagtctcagctacttgggaggctgaggcaggaggatcacttgagcccagcagtttgaggctgcagtgagctatgatcacaacactgcgctccagactaggcgacagagcaagaccttgtttctaaacaaacagacaaacaaacaaaaaacgtagcattccccagatttatttgatcaagcactctttcatcaataacacccattaacatgaaacagattagaattccttggaacacctggagagaatcttttcaaatacagcaaaggatggtttacttttctgaggagtggttcaaatgcaaacactgaaacttcaatagatacatatttgtcttaatgtgttagaaaaatacacatttcatgtatcattttattaatattgttgcttaggatgaagctaactttatgtaaagaagtatatagatttaaaaaatatataaagtgagtaatagtagagatatatgaatatgacagaattataagctggaaggtgaatgtctgaaggttggaaaacgctgacttagcctataaatataaattcaatacagtgtgcttaaatgggtgcagtcatttggatacatatattcagactggtcttcaggaaacttggggaagaggagtgcttagttagctctctggttctgccttaaaataattttgtgagctaggaagggaagcctgttctagacctcagtttccttgtctataaataaggagagttggattggagcatatgttgaattcagctcaacaactttgatgtaagtggaaggctacagtggtgatatgatctgctcatccaccgcaggctgtcacattgatgacagctgtggcagaacccttcatttcatggcctaccattcattatttggggttcctgattaatcctttctcttttgcaagaccttttctcaaagtagcttaaccagattcctgaattttagctatctttgtatgaccggagcaccatgcacagttccatctccagagaatttcctaagtgacaaatggccaaaagatgagactatctggagggcaagg

SEQ ID NO: 114973 - DNA, 1041 bp, Homo sapiens
tagctttaatatttttgtaactatcttatgattatcttccctagagcaaagacagtatacaaaaatgcaatgtgagtgcaggtcacatatgtataaagtgttcttgagaagcactttattaacttcatttctgtgagtgcttttaagtttttgtaattctaatgaagtaacttttttcccccaaaagctactgatttcttattccagctgtcattttacataatttaaaggaaactcattttataagtcaattaaccatctaatcaccagaataaggccaagattcttttattctagtctagaaagaatatgctgaaaagttttacaccaacagcaggatctcctgttacccagaatgaccagagaatagtttttattttctctatgactctgttccccagttatagtaatcacaacggatgaatgagaatttgctaaatttagaaggaaagacatcacatttcaaatagaggtagctccatgtgcaaagtcatggaagaatgaaatgatatgtcaacatctgggaacttcaaatgattcagcgaatggagcatgaatttgtgtaaacttacatgatcattttaatccttaggggaaaatgcatttgttaaatgtacatgtatatatatttttgagacagggtctcactctgtcgcccaggctggagtgcagtggtgtaatcattgctcactgcagccttgaccccctaggctccagcaatcctcctgctgtagcctcctgagtagctgggactacaggtgtgtgccatcatgcctggctaactgttattatttttgtagagatgaggtctttctatgttgcccaggctggtctctaactcttgagctcaagtgatctgcccgctgcagtctcccaaagtgctaaaattacaggagtgagccaccatgttcagcctcaaatttactcttaaagtattatgatttttttttgcctagatattacttctaattccactgggatcatttatataaaaatctcatctgtaattaatatagaaatagtagtagtggtaattcacat

SEQ ID NO: 114974 - DNA, 1074 bp, Homo sapiens
ggttaggctggttttgaactcctgacctcaggtgatccgcctgcctcggccttccaaagtgctgggattacaggcgtgagccactgtgcctggcctttctttttctttctttctttctttctttctttctttctttctttctttctttctttctttctttctttctttcttttcttctttctttttctttctttctttcttttctttctttcttaatttttcttcctttctttcttttctttctttctctttctttccttccttccttcctttctttcttttttctttcctttctttcttttctctttctttccttccttccttcctttctttcttttctttctttccttccttcctttctttccttctttgttttctctttctttctctctttctttccctttctctttctctctttctctctctctctttctttctctctttctctctttccttctttcttaccatggggacatcacagagacttccctcctgcctcagtatggtttcactgtgctcttgccctattgcagagctgttgccttgagttcttgttcattgttcttggaattctttttgctcctcctttgtattaaatcctgtttcaccccttctcaagaaagagaaatacttacctaattgttcagattttagtgtgtagagttgctgtggttaaacgttcttaggaaaagtgactggtgttctcttctgtccttctcttccatggtgggaaatggggttgatggcctggcaaggtaaagggaatggataaatgattgaatggtagagatgttgatagaaggaccaaagacccagctatctttctctcttcctttctgccaaggtacttccagtttggggctaaagcaccagctgtagcccagagaaaccccacagtaagcaatgggaccaaatgctctctcttgttgtaagcgtcttgtttttttgggttctatttctcatgtgtctggatgacaatcttgagatcataattgcagcatcttagattcaggcttggatgtaacgggagaagggcatgaggtgggggcagtattggaagaaaccaaacatggt

SEQ ID NO: 114975 - DNA, 1965 bp, Homo sapiens
gaaaattaacaatcatttcttttaatttccttgaatcagagccattctaaagtgactctggaccagcaattctgagctatgatttcatgatacatgtattaatatctaaatgagttgtgagttgacataagaaccatagttccataataattatcttcaaatcaatggatatcttaaatgtgtttttttcttccttagagattattattaaactgatgtatttgataataaagaattttaggactgagaaagttaagtttttcttaccaataataagatattgaaatatataaattataaaacagaaataaaatgaaataaaggaggttatccctaaagtcatttaccttagtcacttgcaattaaatatggttacttcggaagaagaagtgtggccctaaagctactgtaacatgaatcatgccctaatgtgcactatatatgaactactttggtcagaaggcagcggcgggtaaggatggcttcctctcacagtgcttcttaggctatccatttaccaaggaattctaatctctttctctcacttcaccaggaaaggagggagtttaagatatagaactgggcatgctagcctcttttttcccttttgtggatttgtcataactgcagagaaccgatgttgtggtctcttgccagctacattgtgaaccttgcagtgaaagttctttgcctctgcaaagggagatttgtgcttgtgcagaactgcccatgccttagtaagcaggtctgtctaattctaagttcaatatctggtggctattgttggcataaacttaaagtacatcctctaacctagcctttttcagcagtaaacttaaaatattgaatctccatctgtctgtgtctcaagtggttcagaggtcaggagaggagagggacattattttatgactccctcaaactttaacaaagactagtgcagattatatttcgaagtaagcatgagatatattaaaaaccacatgtgggaattctttcctaattttagaggttttttttaaataatggaaattctattgaaattgagtagtgttaattacaaggcaacaggtaaacatttgttcaggatatttaaaaggtctgctgagttggaattgtgacagaccacattgttgactctagattgaattggaagggaagaatgtgaaatgaattaggatatcctctgttcacctctattaactttcttaaatgagtataacttagaaataataaaatgcaagtattttaacgttatagttgggagagttttgacaaatgtaaacacccacttcaccaccactaccatcctgatatagtgtgtgtccatcacccaaaaagttctctaaagcccttttgcagttggttcccctccacctgaacagccatccctagtcaactacttttctgctttctgtggctatacgttagatttgacttcagaattctagagtttgaaataaataggccatataatatgcactctttttgtgtctgactttttttttgcttaacatgatgcttttgaaacccatccatgttgagattcatccatgttatcatgtgtatcaataataagttcctttttattgctgaatagtattctagtatatagatataccacaatttgtttagctgttcacctattgatggacatttaggttgtttcaagttttgatctattatgaataaagctgctatatatataaatcacaattctatgtgtggacatatgtgttcatttctcttatgtaaatacctagggatggaattgctgagtcttatgaccagtttatgcacaactttaaaggaaactgccaaacttttccaaattatctgtaccatttgggatttctgctagcaatgtattaaattaatttcagtttctccatatccttgtcaatgattgatattgtcagtcttttaaattttagacactttagtggatatgtagtagtatttcat

SEQ ID NO: 114976 - DNA, 1476 bp, Homo sapiens
aacgctccaggagcagcagaaggtagcacagaggattaaaaaaagtgaagcaccagctgaagtaacacacttttcaccaaagtcaattccagactatgactttgaaagtgatgagattgttgctgtttgtgcagctattgctgagaaagagaagacagtttcagcaaataaaacaatggttattgtgtctgcttctggggccatagagactgtaactgaaaaggaggatggtgctacaccaccagatggctctgtttttatcaaagcccgatgaagcagtatgcataggattatttgaatctgtctttttgattgcctcttgaagttttgacatagagacatttactctggagatagataggagaacgcctggttgtaaaatatgtttttcagatgaggcatataaaaactaaaatggcaggattattgtatagtgtttggaatatgctttgataagttatgatttatatttctcaaggttaaaattctgagtaaaatggtctttgattaataaacttagtttaatctgaatatgtaaatgaatacattttaaagacaaaacttgaaaaatgtattcttgaatagtgaataatttgatcaatgttactgaaatgctgtctcaacttttgttttatgataaaggaagtgtgtgatttccctccctctgagaaatatactgcgcttaatatttgctgtctttttcttgcttcattagagtaagtctgtcagaaagcttgaatatttttgacattcattttgattcaaagttgtcatttggttatatgtggaatctttgaaagtttggctgaaaatgcacacaaatgtgtacattctgaacattttctgaagtttctcttaattctgatttgtgtttctgttttgactttgaagttgtaacaatgatagttgtctccttcagtatttggtaaaagtgtaaagtattgataaatatgagaatgatggttttattttttaattgttacagtaagtaatccttaccacaaatgagtcatttttaaaatatgcatttttaaatgaatggcttttacagataggttaatgacaattgtactgctatattatcccagtcaaaaccaatactttcttttctttattttacaaagctttaaaaaccctggaaacaacttacttcttgcttgtgtctttccatttgatgactgggaattacttttctagataactttttttgaaactactcagtgaaatgaaaaataattacaattttaaatagctaattatatctttctaaaaataaaaaagtagggctgttattagagtgccaatgaataaataacttaagcacaaaatacatagaaattggaatgtgatttatagtacaatctcatgagtatgaaaaggctatattaaaaaaaattttattgaaagtccacagtcatattcacaaaccaatactgtcattgctaatctgaactattatttttatactatatattg

SEQ ID NO: 114977 - DNA, 1119 bp, Homo sapiens
actggaggaggtcttcatgaagaacggagcattttaacttggtcttagaggaggagcctttgaatagatgaagaggagtaggaaggcaatcttagatatgtgatatggtttggctctgtgtccccacccaaatctcaccttgaattgtaataatccccgtgtcaaggatgggaccaggtggagataattgaattatggcggcagtttctgccatgctggtctcatgacactgagttctcacgagatcttatggatttataaggggcttccctgtttgctcagcgctcatttctctctcgtgcctccatgtgaagaaggatgtgtttgcttccccttctgccatccttgtaagtttcctgaggcctccccagccctgtggtactgagtcaattaaacctctttcctttataaatttcctagtcttgggcagttctttattgcagcgtgagagtgaactaatacagatgtgtgtgtgtgtatgtgtagcaggggatccatactaacaaaggcatgatatgtgggtagggactataaaaaccctgctgagtggagcacaggtatgtgtagggagtggtagaaaaaagattggacaaacagtccaaccttttccttctaatgctggaggaaagacatttgctactattaagtcttgcagaatttattactgctacctttgttagaaaattgtgagtggaaggattgttatgaaggaatacatcaataaattaatttccaaagtttttcctgtcacatctacaataacatttggaaatattgtttagagaggcttgaaatcacccacaatatgcctaaagaagtgcaagtactttctttttaggtgatatagttactgcttttagaggttatatcattaaagcttagtagatgatggcaccacagtactaaatttatttaatgttgtatatacttttattattattataaataatcagaaatgggtgttaaattatactaagtattgtttagtggcatgtacttttttctcccttatctgttacatatgaacccatttctaagtttttctgagcatacactacatgatcatgtggattttgtactttagtaagttgctggacttaatttgctaatcctttattt

SEQ ID NO: 114978 - DNA, 1083 bp, Homo sapiens
ggattaaagagcaaagtccatgtaaaagcatgctacctagcacctaataagcaccaagtgaatgtactttagatataatattttaggattttatatgttcttggtatatttcctgtagtagtaatatatatttttgtaaattattttgttcaagtggctttttctagaattattacaaactaggttataccttctcaagagtcacggtgttagtcccaactttgacatcttggcttttaaagtttcagccactagatggtgatatttgactgtctagctaactggtctgatttttctgttagaatcagttgtatgtgtatgaagcaggaatataaattagaatttaccatgcattttgttcttgtctaggaaagtatacctactaatgtaaatttgagggtgatcttgctgtgtgacccacattctgcagattactcacatcagtatatttaatgacagtggttttgcctcatgctctgtggaaaaacatagatacagtcagtgtagaatgactttattttctcaccagcacatcttccaaccttactgtatttgtgcctatatgatctgtcatcattccattgtaattatcaaaggcccaccactccacttgtactctagaccccatccccttgtgccttctcaggaacgttgttctgaaattgtcctctcatttttatataatctgtttcttcttttctctcggtccttcttgctggcatgcaaacataccctgataacatccatttaaaaagcttctctccaaatgctctgccatttctctgctcccactgcactacaaactccatttcttgatgaaccatccagtcatatttctgtccccatgaatccactgaaactgcttttgtaaaggttatcagtgacctccatgttgtcaaatccagtcatcacttctctgttgtcatttattgtgcttctcatcattcagcacaggtgaccacagtcttcctaaatacactgctctctcatcttccacaccaccatgctatcatgcttgtccttgtctccatgtcctctcctttttaatctttgcttgctcctttccttttgctctccagatca

SEQ ID NO: 114979 - DNA, 1056 bp, Homo sapiens
acctgaggcaatagtggcgtggttttttcacatatggttgagagccaccaccttgggccataacttatacttgtccccagcatttataacagtggtttgggttggaagatggggagggtaattggaatctgaatgacctattaattttaaaagatgtgtgggtctgtttctcactttttcctttccttcccaccctatcacagcccctcatgtaatctacagatctgatcaacggtttttttttttacttttttttcttttgatcaatgatttttattgtagtttacctccagtaaacacactaggtgtcctttagtatgagtagggttcccacagtgcctggtgcctcaccttatgaataaagaaagtttcatttggaatcttgaaaccggaaaacgtggtcatcattcttgttaccattagggataatcataaatacaagacttctttttatcttgtcttacactgatatcttgtgagtctttcctaatgatctgtattttctcaggttgtcctcactgtgtgccttttaacttctgttccatagtatccacacttctgttttcagccatcttcccctacaatactcatagtcatcttcaaacatgggaaactcattctcctataatatgatcggcctggggagagagtttgcattgtccttattccccagcacagtttataatccattagtcctccaggttttaaaaaaaatctcagttcctgtggaaagtttgtggttcacttatattatcagcctgtatatttctttctttctttctttctttctttttttttttgagatggagttttgctcgtgtcgctcaggctggagtgcaatggtgcaatctcggctcactgcaacttctacctcctaagttcaagcgattctcctgccttagcctcccaagtagctgggattacaggcatgtgccaccatgcccaggtactttttgtatttttgtagagacggggtttcaccatgttggccaggcttgtcttgaactcctgacctcaggtgatccgcctgcctctgcctcccaaagtgctgggatt

SEQ ID NO: 114980 - DNA, 2078 bp, Homo sapiens
aaagtggtgggattacaggcgtgagccaccgcacccggcctccatatcccccttttaaaattctgtagtgtatggtaagtcatatcagatatcagacctaatttaaatttcattttagctttacaagtccaaaaacacagaatttatatattcagatactctagcactaattttagtcttaaaatattcccacgatattctgtacacaaaatgttctttttgttacaagagctgagttgcatatactgtagataaatcatattatttttgccaatttcacaaattcctctggcccatcatgtcagtcattattgagtatatgcacacattgctacttatttgattatgtatcttttaaattgattcagtgcatagaaaactatctcttacaaactttaagtgctctgatatgacttcccccccaaattttattatgaacatttttaaaaacagaaaaattgaaaaactgtttggtaagcacatgtatatctaccatttagattcagcagttgttaatgttttgtcatttgttttctctatacctatatatgtatagatacagctagttatgcatatatatgcatatatgtgtttgtttgtgtatgtatatatgcttttttccccctgaaccatttggatgttacagacatacttatcaccgtgaaaatacttcaagtatctcctacagataatgacattctcctaaaaatccgtaataccattgtaaaagtaataattccccaatatcatctaatcaagccatatttaaatttctgaagttaactccaaatttctttatagctgattatttcaaactaggatccaattaaagtttacatatgacacttggttataactctttagttggatataacattattattattttgataaaatatggaacaaatcaattctattaataagtggtcacatttgttttgggcttaaattactttttaaagatactggattttcctaagatttctgatttacactgatatttttttttgtcattcttaattgcatcacacaatagatgtaaatgaagatgtagtcacctcagataaaattggtatcgtgtatgataatattgtatcatttatatttgccttatgttaactttaagaaattgatttttttgtattaatcattttcccattgcaacagagctatattttttctattttaagaatcatattttaggattatttttggcaaatacagtgagcacttatgtaaccagatgataatgaactcaaatgtcatgatagcttgcataaatggtgactctagtagatttgactcaagcacttctagaatcatgcactgaattcaaaagaaaaatcttgctgctttttgtccagggcttgttctattcaacttctaatttgaaagctgtacaaagtaatagaagttccatttaaatatgagttcaaaactgtatttactttttatgtggccctctctttaggggattctaattttacttagggtctctaagtgcagcataatgttcctgatgttaacagaagactgtatttttaaagttacaaatttgtatatggaattaagtaatggcgctatatacgctgttgtggggaggggggaagaaaaggaggaaccaattaaataggaccttttaaaaattgttaattttgtaaactttgcttctcttataagttattgtgattcattttagttactgtgttttattttgaaaatatttaaatattgcacttctataaatagtatgataaatgcacagacaattgcagtaaattcttttttaagctaggatatttgaaatgacaacctttggttaagtgtgtcaaggttgcaacagaattttcacaatttttttgttgtttgcaaattgttactaatattgaagaggtaagggaggcaatgcaaatgatttttaatctttttttattatcttttcagcagtttatattttttgtgactttatgcaaccatatttttactttgtcttgacaactgaaagatgtataaggttttttgccagaaatgtactgtatacatagttttaagtataacagattttactgatatgtaaa

SEQ ID NO: 114981 - DNA, 1224 bp, Homo sapiens
tataccaattgaatgcccattttgtttttgtactgtgttcccaaccttagtttttcttcgatttttattcattggaattgttgctcttttatgaaatactaaatgaaatatgaagggaaagtggaaagtaaaaagcactgagctgagacttaggagagttgggttctagacttacctttctgttcatttgttaccttgggcaagtcatttctctgggtttgttttcttatcaataaagtgaggggctggatgagatggtttccagtataccctccaaattttaagtgcatcgattctatgattttaatatagagggattactttttattgctatagaataatatttattaatccctagattgttggtttactgggctcttaaccttggattgcaactgatgagtagctatactgtacccaactttggttagctatcttgagaatacatactatatgtaaaaaagatgaatagtttaatacaggctcattgactgttttagaaggtatttagaataagcgtgctcttgatagctggccagcagccccacttaaagaagcaaattcaatactgttacaaaaatttttgggagaaggtcatagactataataaattgaaattctttttacccagatgaaattacagaagccaaatcagggactgctactccacagagatcgggatcagttagcaactatcgatcttgccaaaggagtgattcagatgctgaggctcaaggaaaatcctcagaagtttctcttacctcatctgtgacctcacttgactcttctcctgttgacctaactccaagacctggaagtcacacaatagaattttttgagatgtgtgcaaatctaattaaaattcttgcacaataaacagaaaactttgcttatttcttttgcagcaataagcatgcataataagtcacagccaaatgcttccatttgtaatcaagttatacataattataaccgagggctggcgttttggaatgcaatttgcacagggattggaacatgatttatagttaaaagcctaatatgcagaaatgaattaagatcattttgttgttcattgtgcagtatgtatatagcataatatacacagtgaattataggtctcaggcttacttgatttttggctattttatatttagtgtacacagggctttgaaatattaatttacataaaggccttcatatattattacgtgttatatatta

SEQ ID NO: 114982 - DNA, 1437 bp, Homo sapiens
tcatataattgtttcgatgatgaggggagatagtgtatatgaagtgtttagcataaaacttagcatatagtaagtactcagtagttgtctactatttttcttgttgttacattatcttcacttaacattatatcaaaagagtattataatgaagctacctaatatgttctctttctaagctggaaataagctgttcttttcattgtttgtcgctgtcatttgtcccataacttttttccccccattgctgtgtcaatacattctccctcttaaaactggagggaaattggagcatttccctcaacatacacaatgaagtgcgagctagaagaggaaaatttcagtgcaaaaagtgacaataatacagtatgaatataaatataaattaagtcatattctaaattccctaaactgttactttcagtctcagctctattcaaagtccttctcctgatcctgccatttttctctcagggaacatgaatggtttaaacaggaccttccaaaatatctctttcctgaggatccatcatatagttcaaccatgattgatgatgaagccttaaaagaagtatgtgaaaagtttgagtgctcagaagaggaagttctcagctgtctttacaacagaaatcaccaggatcctttggcagttgcctaccatctcataatagataacaggagaataatgaatgaagccaaagatttctatttggcgacaagcccacctgattcttttcttgatgatcatcacctgactcggccccatcctgaaagagtaccattcttggttgctgaaacaccaagggcacgccatacccttgatgaattaaatccacagaaatccaaacaccaaggtgtaaggaaagcaaaatggcatttaggaattagaagtcaaagtcgaccaaatgatattatggcagaagtatgtagagcaatcaaacaattggattatgaatggaaggtaagaaagaaataacattttgattattagcatatttggcaaacccatagtctataaaatgttttatagaagaattacttttgacttggtttttgttataccatgtgctaggttgtaaacccatattatttgcgtgtacgaaggaagaatcctgtgacaagcacttactccaaaatgagtctacagttataccaagtggatagtagaacttatctactggatttccgtagtattgatggtatgtacatcacacaaaacaacatagattagaccttgttactaacttggtattttacgccttgattcttttgaggcttcttgacttgttcctagtaattcaactgcaaaggaataaaaaatgtgatttcttgtgcctttgcaatattaacatttatgaatcttatttttcttgtaatcttatagcatattgtccttttaagattatcatcttgtaaaatccttaaagccaggtgtag

SEQ ID NO: 114983 - DNA, 1454 bp, Homo sapiens
gtgttttgtttttttttaaaatagtaattggctaaattatttgaatttcttattcctcagttgattatttttatagggtgcatttttgagggagcaacagtttctttttggagtaaaactgtgagggaactttgaaattcaaaattactgtttttttttttttttttttttttaaagaatcagaacaggcttaataggaactttgaattttaatccttctattcatctgttatagattattttccctagtgatttctgtattaataaaacttaaacatggcaagttttttctaataagcaaaataaccaacagcttaatatatttgtattaaactctaacagtgcactaactttaaatgttgaaatagattacacattttagggcataatggcagaatatttggctacaatagaccataggattttgttgaagcaaataacaaaatgatgatttatcattttaatgcaaactcaattttattgtttaatgggattttaatttttgtctttgggaaatcttttgagtagctgattttgtgcactttcaggtctttcaaacatgatgtcagatggtgaatttttaagaacaagttgtggctcacccaactatgctgcaccagaagtaatttcaggaaggtagtatttgataccctgcctccctcaatacatttgaaattgtctttttctcctagattttgttagtctatagtgtcatatttaattctaatgaaaggaaagaaagataaggcttattcttaaccacatttatatgtgaatgagggttaaggactacaagtcaacattatattaaagttgttagaagagagtacattaatttttttcccaggtggaagaaatggaaagtttaaaactagggtgtttaaaaagtaggtaagacactggaaacttgaataatacagaaatatctagtagttagaaaaggattactatttacttagaggaaaaattaaacatgtaatgtgtagctttaattttttacatagatggcattttgtagtacctttatgtttcatgataaaatgtcttggggaactgggctgaagtaatctttagacttcatttatgttgaatctttgttctttaaaccttttagagactgcaatattataagaattttaacctctcaatttactaactaccagcattgagaacatgaagatatttgtacagtgtcgctttttgaatagtttggaaaacaggagaatttaatatttttaagaataactctttgtccttcactatactactgaaattgaaaacagaagctgaagtttgctagatttataatgaacttttaataacttttcacccaaaccatgcttatttgtgtgaatgttttgcatcttgattaactcaatgcagaaatactgtagtattttctatttttataagcttgttggcctagactgctcaaagaaatgagatttgtgtaa

SEQ ID NO: 114984 - DNA, 1050 bp, Homo sapiens
gtgcagtggtgtgatctcggctcactgcaacctccgcctcctgggttcaagcgattctcctgcctcagcctcccgagtagctgggattacagctgtgtaccagcacgcctcgccaattttttgtatttttagtagaaacggggtttcaccatgttagccgggctggtctcgaactcctgatctcaggtgatctgcccgcctcggcctcccaaagtgctgggattacaggcatgagccaccgctcccggccattaatttttgtattttttagtagagatggggttttgccatgttggccagattggtttcgaactcctgacctcaagtgatctactcgcctcggcctcccaaagtgctgggattacaggcatgagccactgcaccgggccagaatatgtgtaaatatattattaatcatacttagtactaatttattaaattacttcttttacagttggcaaacatgaattgactgggcataaagtagctgtgaagatactcaatcgacagaagattcggagccttgatgtggtaggaaaaatccgcagagaaattcagaacctcaagcttttcaggcatcctcatataattaaactgtaagctctgtttatattaaatatagtccagtcatcttttcatcttttttgttaacctacttaatgtgacaagtgagaaaaatgactgacacttctttttgtttcctaagggttttgaaaagtttcttcctaggctgtgtgcggtggctcacacctgtaattccagtactttgggaggctgaggcaggcggatcacctgaggtcaggagttcgagaccagcctggccaacatggtgaaaccctgtctccagtaaaaatacaaaaattagctgggcatggtggtgggcgcctgtaataccagctactcgggaggctaaggcaggagaatggcttgaacctgggaggcggaggttgcagtgagctgagatcgtgccattgcactccagcttgggcaacaaaagcgaaactctgtcccaaaaaaaaataaaagtttcttcccattcatgtatttttc

SEQ ID NO: 114985 - DNA, 1030 bp, Homo sapiens
cagatgttgcctccagatagtatttattactttattagtacagttcatttccacttattttcaaaggttatttgtattctaataaactctttaagtgcacatcattcgaacttttgttttaagaaaggtgtattgggtgcattgtacagcattcgggtgacgggtacactaaaagcccagacttcaccactatgcagttcatctatgtaaccaaaagccacttgtacccctaaagctattgaaattaaaagaaaagtgtggactctttcaaaacactattctggaaataaacttgctctacagtccaccaattctggcaaaaaaacgtttaattgcaagttttgtaaggcatgattttttttttctttaacatatttgactttgttataagggatgcagagaaaggaagtttggaactgataaaaataattcatgcattggctttggataaataatagactgacttgcatatactaagttcttggtaaatatttgacttgaaagaaaaaaagtttgccaaagtctgtacggtaactcaactgagccttactcttccagagctaaataaacagtttctgattttatttagggttagaagagaagaacgcttccttctcttgccattttctgagtcatagaattggaaaattgttgtatatcccacagggaagcaactgcctgaaccttcttatgaaaatctgcaaggcggacaatgtcaggaggaagtaagaagcaaatgccagaattgggtaataacagctattaggacaggtccatataaggccagtaagatgtttctgtgccatggaagttttaactttatctttggctatgatatttcttgttagcaattacaaactgctttttagtttacaagtgtttgtaaaaaaaaaaatgttcatttttgcccccatcccttcccagagttctgcctggattagggtgttcatcattcccctaatatagacttgaatgcttgaataaagtcaggtctatttttttttcttttttcttttttcttttcccgaga

SEQ ID NO: 114986 - DNA, 1513 bp, Homo sapiens
tttaattggtgtcaaaatttgtcaagacagtagtgaataaggtctggagtcaggcttggttcaacctttagtatagtggctgtgggcaagagtgctgtagaaaattgccctggttgctgctgttgccttgggctcttgttactcaagtcttggccttagagttataaatgcagaatctcagctccgccgtagacttagctgagagaacctgcatattaaagagtagtttctaagagattaacccatctaagatctcagctaagattcagaatgatgcagacttaactataaagctggtgctccttccgttactatgttctatttcagcaattctcagctattgatactttgggctggataattctttgtggtgggattgtccagtgcaaaattgaatattttgcagaatccctagcctctacccactcagtctccggagtgtccagttttaaagatagcaagacagttcagggctttgtagacacccataggtgtgttcatgtgctgaagcaactttctttgcatttagggtcataacgtttttgtgggcttaatgttgagtggtctgttagtacaatataggagttaagagcttgaactgaagccaggcttttaaaagtaggatagttgacctttcttagagtagatacttcttagagtagatacagatgttaaataagttaaaatgcaaagctcttggtttagaaaatgtctgccattaaacatgctaattgttttttccttgcttagtgaaagtagttgggatctattctcagtatagggaaccattttcacaaataatctgtgatctcttgccaaatatgaacaaacatactggcccaatgactagtatagccaaataagtttttgagcctttattgcagttgcagttaactatatccgaaaatgggtatctttaagcaaagtgaagaatttcagcttatcagtgatgttgtaaaaataaatgtctgaacatatgaatgcagtattgatttcagcatttaactgagataagcgcattgaaatctgtttaacaaaaattaaaatgtatgcatcgatgttgctgaagtaacttgttcttgtttttgacatcctgcaggcatggattccgtgaaggaacaacacctaaacccaagagggcagctgttgcagcatccagttcatcttaagaatgtcaacgattagtcatgcaataaatgttctggttttaaaaaatacatatctggttttggtaaggtatttttaatcaattaggcttgtagtatcagtgaaatactgtaggtttagggactgggctagcttcatatcagatttacttgttaagtgactgttttggaatgtttacttttggactgggtttgtaacacggttaaaggcaatgagaaacaagcagaattccaggagtccttgaagcagagggcactggaagacaatatagcagattaaaatagcacagctcatgtggcataggtgggtattttagatgtttgagtaaatttgaaagagtatgatg

SEQ ID NO: 114987 - DNA, 1652 bp, Homo sapiens
ctcctaaaagggattatcccaggcgcacacggtcattacacgccggggacgctcagtcggtgcgggtacccctgggcagggccagccccgcattccaggttctccatgtgcctagaagacagtaatcgacggtatagcaacagatctgactgctaacgtgcgaaaccgatcagtagtagcagtagcaccagcaacagcagcacgaaaagcaaaactgtaatctaaacggccctcagggtctaagcaggcccgacgaagactcgcccatccggtcgccagaaaactgggagtcccgcccgcctttccggcactgaaacgcgatcggccctgcctggtaccgcatcctcctcttgaccccacctacactacgacgacggacgctcgagaacgctgcaccgcgccccgcaggaagtgcttccctgggcggaagcttctgagcgtgatatagcggaagtgccttctcttccggtctttctggtctcggccgcagaagcgagatggtgagttgtgactgtggtgtttgtgaatcgcgttccatcctcgtcctttgtgcctctctgtttgctgtgcttggggggctggcaagattccggataaggggaactggtgggctggaaagaggcatgcggtggccctcaagagccagaagaatgactgctaactggtgcctgggggacctatcccgccgtaattgtggtgctagagccgcattgtgtcctttgcctcggtccaacctttggagacctttcacggctctagccttggttgggagccgagggaaggagtttgggaatgtttggctctgtgtaacaatgaaataattcattggtgatgctctctggccggagtctgtaaagataaggtgcatttcagaacattgcaactcttgcggagggttttaggtaacgtgaaatgcgggtagtggtctctgacttggcattcgtggaaagaggcttctcccgcagtttcgatctttacgattgcctttaaattttatcagtaattggtttcccggagaactcgagtaaatctagaagttgccaggtttcagaactatttattcctttaatgtgcagacgaagggaacgtcatcgtttggaaagcgtcgcaataagacgcacacgttgtgccgccgctgtggctctaaggcctaccaccttcagaagtcgacctgtggcaaatgtggctaccctgccaagcgcaagagaaagtgtaagtaacatttttcaggccaactgtgttagcttttgtttgtattgcacttaagtgggggcataggtttgaactttatttggtgcctatcttaaaactcgtacatctgtatgccgatgaggtggcataaaactcgtgtgttaacaacacctacaaggtgtgtgggagaacaccgtttgaaatcttttctgaacttatgttttagataactggagtgccaaggctaaaagacgaaataccaccggaactggtcgaatgaggcacctaaaaattgtataccgcagattcaggtacagtttgtatgttcgatcataattggtccagtgggcttgaatgaaaccctcgtgtttacttgtaaaaagataacagtaccctgatggttactggggatgagatgttggaagctttttatttattgttgtttttgaggcagggtttca

SEQ ID NO: 114988 - DNA, 1821 bp, Homo sapiens
ataatttgatttttttttcctcttttaccaggtttcaccaaaactcatgccaatgcagcagatcgcaaattgaaatatggatatttgtaccaggctgcgtgtttttcattttaaacacacaagatttaattgaaaggacatcaataatcataattgtgtatttaacaggtggttttttattagttttcttgtgtttcagactttatgcagccatataaactgttctctaggcatgctgtgacattttaataaaaagcaaaaggagcatttataattatctcatttgttaaggctgagaaggttgtttttataataggtaattatattgaatgcattttcactgaatatggtatgtatgctaaattatatgaacctttccccaagaagggccctagaaattgatgtggctttcctcttaaatattaattattagtcctgaaagaaagataacatatgtgatttttgtggttaggagagttgctgtcatgattgttttttcttcagcctcctctgacttttcttttggggcttcagattttatgattacatcttgtccccctagaacatcccccttcctcccatactgcttttaaacagatgcccaagaaggcaagcaggaatgcctcttgtgggggagggcagggagaaataactagttcaaaccaactatctatctatgctttgcaaagactaaggcgtattataggaagagggctagaaacctaactgattcttctcagttttctcattttaaaacagcccagtattcctttgtatcctcaagggtccttgagaatacttctgttattgagaccctgtgggctacttgtactgtacctcctctcaagccaagaagggctgtgggataatttaccatgaatccttagtagcaatgacagcagagttaaaaaataaaaggtgttttactttcaggctcttgttttggttcagaggagattttaaatattgaatgacacttctacagaacaacggtttttcttctgccaaggctacttcctttaacgaagtgcctttaattcagccttatccaactagggaaaataatgttggacaagtctaggatttgaagagtcagtgaacttttagtgtcagggaataaacatggtgggtagattaggtttgaaaaaaacttccttagaggtatttattctcaatacctgacaggggcccatgggaatgacttcagaagcatcccggataatagatgggtaaaaagtctaggcaccctgaagaacaggtgagacagctggcctctggacagaggtaggcatagtacagtacgatatatcattcctctggtcctaaatatacaaacttattcatgtttttaggtgatgatggtcattgaaactcacttcttttcaggtgtagctacaattgtgtaatgtacaatattagagaaaggacaggctttttatgagtaacacacaccatatataaaacagcctttctggctgaccacatggttaaatgcataccttcccagtactggggggaaaaaatgacccttcttagaatgtgcaagttccatgagagtaatatattgatatgattttgaaaagaattgttgatagttacatcttcaaacttatcattccagtatgcatctttaagataatgtgattctaagtagatgactttatattcttgattgaagagtgctatacatgttaagaaatgcattaaggaatacaataaatattctaaagtgatgtagatcagtgtgactgtcctttatttcacttgggaatggcattgctaaatgtgggaataatgcaacagattgtcagggtagctaac

SEQ ID NO: 114989 - DNA, 1035 bp, Homo sapiens
ttgtatttaggccattttctacataatcctctgtcagacttcatataggaacttaatttcctcgcaggttttagaaatattaattatggattgtattaaaaacagtaccagctaacattcattaagcactaagtgctggacccttgcatttcatgtagaacttatctaatctttcaaggtagggtggatggagaagcatgggcatgtggctcttacagagacagtggggggcatggccaggttttacacacaggtcctttggctctagcccatgcacttaaccactatgctatagtgtgtatgcagagaatggtctagaaaaaggtctccattggtagggcacagccaattctgtcagttgaaatccttgattcctcctaaaatgaagttgattgttcattaaaatccaagtggctgctctcatgccagatgtagatcttgctcaaataatgagaactaagtaagagctccttgcagaaaatgttcttcagtggctggcagatagttcagtttgtttgaagtcaggcccagaattcattgtgacatgccttgatttatattaaatgtaaggagacctgacaactgtagaagttcgaatatttgtcattaatttcagctgtttaattaatttagcttctgtgtcgtgcagaatttgaaattttaaaagaaaaataattagaagtgaagtgaaaatgaagctttatttctgcaactataaattttcatatacagtaagatctggaaacatatgaattgttttaaaaggtgttatgtcaacttacttcatatgtatttagcaccagttttgtctgaactaaagtaatagtttttttaaaaatctatccaagattcccaatttacctctgtttctcttcccattcattcttacatgcctttattcaaaaactactgaatgtcttttattccctgaactggcttaagtacattaaagccccttaattactagtgcattgctgagttggcaggctatcacaaggaatgaaatcttaatggagtccacctatctgaaattca

SEQ ID NO: 114990 - DNA, 1051 bp, Homo sapiens
ctgattttaaaagttgatattgaatgctttcttcatcttctttgccttctcttcatcctcctttattctttatcattcttagttttaaaatctacctcttctcactttgagacctgctaatctgagtggaaatgacagttcatttgccctctttttgtttagtgatgcagcattatgttaaagcacggaactagaagattcacatcccacctgcttcccctgggaaagtttggttacagagaaatgtatgccacaaaatgattttgttgtgaaaacagctataaatatgtgttatcataaattgagtaaacagtgggaggtgagcagtggtgcataaatatggaataatagaaatggtaccagcacaggtgacttctgagaatgccttgcaaagcatccaaaatacttcatttcagaggcaagaggatgccaagcatgcaaatcaaatccaaatcttttctggaaaataatgtctatttggaaaaaactctttcagactttctttttgttgtgaaccttaatattgacacacgaaggcactgaagttcaacttattttagtttatttttgtgtatttgttttcaaaacattaggcctatattttgcaaattcttttcttccacccaagtcctttctttctcctcagctggaatttctgatagaggaaaataaatgatgccaccaacttcagactagaaatatcttattaaagctttccacagaagaaagatcatattttttacttctttccttctctcagtggggaaattagcactgagttttaaaacagaattggaatgaggtatttttccgtagatagtttcatttcaacaaaccaataaaacaatgtacttatgattaaaataatagtaatgaattattcacagtaaacagttaacctttgaaaaataatcaacagtttctcttctcacacattttacttgtggctctcgaatatgtagctgctactattttgttcacctggactcatggttactggcccagctcaagggaagacagggaacctgctatttcttttttgcatcttttg

SEQ ID NO: 114991 - DNA, 1031 bp, Homo sapiens
aacccacatcctctttgaggaatcagaaaataaactttctgagaacaagtatttcctgatgacaaaataaatagtaataattccatattccatgtgaacgagttgttgaggagattaatatattttagtacatgcagacacataaatgatgtttttccatttgtattttagtttcctattttgtaatgactattggagacctcctaaaagtataaacctttaaaaaattatgtgatagtaattgtgaccatttaaacctcaccattagaacataggttgaaccaaccatatgaaattcctgtatttgcaggtcatacatgctcctatgtgagcaatttcatatgattctaatgcatttctctcagcgattcagtggaaggaagaaaataacttatccctggatttttaaatatgtaatttattctgtttctgggtagtatacaggcccagaagctccagtgcttagctatattcaataaactcaaataacttagagtacctttttatttatcctgaaacacttggtcatgctctttccatcaatgccttctgtaagaggcctgataaaacaagctgaattcacttagccatattgtctgatgtttgttttcatctctgtagtattatgaatagactctatgaaaactgcaactgcagcttcagaacagagctaggagtacgtttttctcttgctgtccattttcaaaatctaacaaatagatcagagtgttagtctatgtgaccttatacaaagagcttaaccaatccaaagtgccttaataacaacaaaaaaaactttgtcacacattgattgtaccttgagaagagaaaatacattggtttcatagttctaactgttcacttaataaatacttattaatttcttatacagagatggagttaattaccttgtataattaatgacaattttgtatgcattggaattttttcttggagcaatgaggtttcataagtgaactatggagaccctcttgaatggtatttacattttacaaaatgagagaaattgg

SEQ ID NO: 114992 - DNA, 1115 bp, Homo sapiens
agggaatggggatggcgagaggctggagaggtatggacaatagaggggtgcatttcctgtagaacaggggtccctaacccctgggctgtggaccagtaccggtccatggcctgttaggaaccaggctgcacagcaggaggtgagcagcaggcgagcaaacgagcattaccatctaagcttggccttctctcaaatcatcagcagcattagattctgatagaagcccgactgaacccattgtaaactgtgcatatgagggatctaggttgcccgttccttatgataacctaatgcttgataagctgatgtggaacaacagttttatcctgaaaccatccccatcccccagtctgtggaaaaattgtcttccataaaaccggtctgaggtaccaaaaaggggactgctgctgtagagaatttccaaacaataagaaaactaaaagtggtctgcttttcattatcatcatgcaaaggcaagagcaatgtcagtgacaaaatgctttccaccacaaaaggttcctactgtgtccccccacctgctatgtcactgcattttggtaaagggagcttaagttcttttgggaatggagaagatgtggacctctgttcaccatgatactcttagaaatctaatagccttttctttcttttgtgtgtgtgtgtgtttaggcaaggaaacagttactattcttccaggagcctcttttttctccagcgatgaatcatttgcaatgattagagggtatgtaataacagagcccctcatgtttcagacagtatggaatgagctgagtcatcgtctgagtgtgttagcaaggctctgaaacacagccacatttcccagccagaaaactatcaggagtttgttcggctgcagggtgtgaaattattcacatcgaatgttgggcattgaatatccagcccactgttaggaaaagaacccccaaaatggaatccatgcctttgtgccaaccatactgaaataaacatttctaaggtgctttctgaggattctaacattttcttcaaactgtgttcactttctagctagtgtttgtgttcaagtagtcacattctgcctcactgaaggaaacagtcttcctgtgtacacctgt

SEQ ID NO: 114993 - DNA, 1058 bp, Homo sapiens
gataggaaaatggaatggaaaactttcttaatgaaattcattcccaggaaataggggcagtgaaatggtccaagtagactctatacagctaagatgtgctttacacagagtgtggtagatgctatacttgaaatattttcaataatggtaatataagttgaaggagatatatagcctaataattatgaaaacaacaatagcaacaacttctgtttataccatgcacttacatgtaaagcactttatagtaacccagtgaggtaggttttattgtgtatattttatagaagaacaaatgaggataaggaaagactttaagataacaaaattggtagggggaagagttaagatctaaacatttctttgtgcctctaaagcttatgttctgaagcaaaaacaaatgacggttggtatattttgaggtgcattttacattatgctttgcaatgttaacatttttatctaatttacagtctccttacttgcaggctcatagacctttagctgactgaatttttcagttaacttagtgtagccccaggataatgttaatactttcataaatgcaaaattaagaattgttcagtaatgttaaccttttagaaaatatgaaataggataatctcctaaaagctgtaaaatgagaaccttcacatttaggaagacagaatgtttttttccccccaattgaaaatgaggtagatagtattatatagttgtttgaattcaagatagaaactttaggattctatatagtaactactggtaatgattatttaaaaaatagccacttccaatttcaggcctaacgtgccaggaggttggaagttgccacacccattctcacaataagaaaaaagatgaataaactgaaaaatcaacaattattcttagatccgtcagaggattaaagtcacagggcaaaccactgccacccaaattggagagagacaggctaatacggagaatcacaactgactggagcagaagcctagtagcagaaatctccatgggaaccagtcctggggtagaaaagctcaaactgtaattgatgaatt

SEQ ID NO: 114994 - DNA, 1045 bp, Homo sapiens
taaagagaggctgattcatgttgtatagaacatttttttttctctgtaatattggttcacagttattacttacaaggattgacaaaatacagcccacggcctgtttttatacagtctgagagctaagaatatttttaaattttgaaaagaccattttttaaaaaagtatgtaacagtgtgtaccctgcaaagcctaaaatattatttaatccttcacagaaaaaagtgtgcagacccttcatttacagcataacttctatttctgtagtctgaatatattaaattactcagtatttcttaaaggatcaacatagaactgaaataactgatttgaagacaatgaatagaaaattaattagaataatgtgaatttgtatagatgtcgagaaatgactgcaattttgtgggactggttttggggcttctatgaagggaagatcttgtgcaaaaaatttgtgtatccagctgtagttgctgccatcttttaaaagcatgatgcctctgtcaatagatctgacattaatatgatataattacatattgatggactcattttattagaagcacttgcctttttcttggttatttgacttatacttgacggccagtttctcatgtatagaaatgtgtagcctggccatgtgcagtggctcatgcctgtaatcccagcaatttgggaggcctaggagggtggatcacctgaggtcaggagttcgagaccagttggccagcctggccaacatggtgaaaccccatctctactaaaaatgcaaaaaaaaaaaaattagccaggcatggtggcaagcgcctgtaatcccagctactcgggaggctgaggcaggagaattgcttgaacctgggaggcggaggttgcagtgagaggagattttgccagtgcactccagcctaggcaacaagagcaaaactccatctcaaaaacaaaacaaaacaaaaaaaaattgcacagccagatgaatgtcagtaaccaggatgatgggtggaatcttctccagcctgactagtgtccagcatgtggctgtagctc

SEQ ID NO: 114995 - DNA, 1031 bp, Homo sapiens
tttatactagtcccatatcaagcaaagctacatgtggctagtgattactgtattgattagcacaagtaaacattatcattgcaggaagttttattggacaaagctggattagaaggatcaagaataatctgttatactagtacaggaacataagcaaaacagctctttggactataggattattgtaagcctacccctgacacctgttcatagtagaaacatatagtatacatagtagaaacatgaccatagattgaattgtaagaactgtgctctcaaaagtggaaaataatttggaattggggttagtgcctagattgggcattttctgatgtgaaactctgttttggctttgtgatttgtattttgagtccagtgagtaccctggacctccagccccctgttctgtgctataccctatgcactccgttacctgcgctggcctccaggttgctatgacttttcaagccctatcttgctttcttttatgggagtcatagtgggatggatgattataagctggtctctgaagtgcaacatttaagaggaatcttcagggatcattaagttaactgcatattcttctgcatgcaaaatgccaataatgttagctactattcaggcatttatgatgtattagtcactaccgtattccttatgtgcattattttaaattctcacaatagtcctatgagataggaataataattatctttattttagagatgatgactttaaggcatagagaggttaagttatatacccaatgtcacacagcttaggtggaaccaggagagacccacagagaaactgattccaggctgtctactcttttccattatgtaatgaaatgcttccatgttatctatcaatggatgctttaaactcttggaagatattgaatctccagaagtagtccatttcattgctaactattagatacaagcaaataaggagtttttttttttttttgcccagcttatttttctatcccagaccttccttgacaattatttcaattgtagtctttt

SEQ ID NO: 114996 - DNA, 1066 bp, Homo sapiens
tatttttagcattgatctccactcattcaagtaagtcattgaatgttcattttaaacccaatacaatttgagtaatcatggaaaatataaagaaatgacagttttgggcttaggcttccaactatgcaaaatctactcagacatattaacattcttgaaaaagttgtagaaaaactgatttacaaagcaggaaaacaatagatatatagttaagtgcaaactgaggaatgagtagccatataaactggttgcacttggcttatacttgtggttcaaagactgggcagtgatatgtgatataatggtgcaaaacatttggatacagctatatgaccatttacttagctgctgagatatatctgtgtattttgcttagtagatctaataatgtgctttgttttatttcccttttaaaaagaataacacacacttctctgaaagaacattgttaccccctttacaaattgtttattttttgggcttaatataggttttgggctatgtggaattccagagaatcttatagatgctttactgaaaactggagtaaaaggactaactgcagtcagcaacaatgcagggtaagtgtgcattttaaaaacaattggctggagagaaatgccaattcttaatatttaaacagagtttatcaatgaaatgaagttttctcctattcacatgagcaatatgtccaagcatcaaaatctagtgtttaacaaggtcaagaggggtggttacatttatccaaatgtttttggtaccatccttcataagtaaagcagacttgcttcatctagtataaagatataaattaagactttatatcttaatgtgatgtgcttttatttttctaaacttaaaatgtattgaagttagaatatatatcttcaaattaagtcttgcattttaaaatttaaatgtattgttttatgttatttattagatcatttataaagcaaggtgggcatcaatttgaaatctgtttaaagccctttcttttagcaatgccatcattctagatcataaataaagggataccattaatcacaaaaacatggctggtctt

SEQ ID NO: 114997 - DNA, 1019 bp, Homo sapiens
gggaatggataccttaatgtaaaaagcctctataggtatataggggaaatgagttttcttccaacttcctctctatgtgggatttgtgtttctcagcatattgaaatagttagggtgatcttactgcacagactgttgagctgtggatgaactctttaattttcttccccttccagctataagggcctgactcttcacttttgggtggaggtaatgacagcagagttatacaggaagaaatagaacactcacaaagatttattttatatcaaaaaatgagaagtggagtatgagaggtttcaaaaaacatggagagaagcatattgtagtagaaaggccctgaggtagaaggccaaataaaaccttggatctggtcttgctttaatacagttttgggtaaagtacaagatccttctaagcttcaaaaatttgacctgtgaaatgaattggttggattagatatatgcactttttaagtgtgtctaggagatatcctcaactttatcttacgatccttctgttggcctgtttattcaggctatcacacttgtaatttctaatatattaaaaaatatatgtttaaaacagaagcagatgaatagaaaagagggaaaactctttgtggctcaagccctttctgtctctgcctagacttatttctcagggtttgagcagtgtgctggcatatttttaggggaagaaaagaatgatggatatttatgctgtcaccttgaccacttcaggttgtgtctgtctgggagactgttaggcagtggatgtgagctcataactggcatgttaaggtagcagtatatcaggattcagatgttattctttctttttagcctggctgtatagtgagaataaaggagaggtgatattgagtatgaatgattgctacagaatctgctttcttgttttcttttgtgcatagtgtggatgaagtaggggaaagggaaaagtttacaactgattgctcatgaatattcactaggtgactcatttgggaccaaatagta

SEQ ID NO: 114998 - DNA, 1052 bp, Homo sapiens
gtgacatactctttcagcaatggtttagtgagttcaatgcaaatctttacattgaaaataatcctgcaagttaaacaaaatatcaacacactctctaaagaagcacctaaggcatgtcatattccatgtaatttcagtttatagtagaatctttttctacattgtgtggatgtcacttctgggctaatgagaggtggaaggacagtgctaagaagtagatttcaactcaagtgaaagtggatcttacagcagtcaaaatgcaatctcaggctttacctgagaagacttaaggcagcagtcacatgattgccaacagacataacctgatggtgcttttgctccaacaatgaacaccttatctgtgtaactcctgaggctggatcaggtaggcctacaccaaatgctacactatctgttcattggcccatgaagaagaaagggatatattttagaatatcagactatgtttcagaagggaagcactgagaggtaaactcagagagtttagtgtcttgattatgggtgtatctaaatttgacttcatgaagtgctgcagaagggtggatagtaccttgaagtggacacataagaaaaggtgaaatcacagaagcaacaaagggattatgacattagagaaagggaaaaaaaatcaggagatggtgaaggcggagggagggtgaattgtgattagaggacttattagaagtatttagttccttttcttccaggttttgaggaaatgaggtaatttgtttctaagtttttaaaggaattaaatacacagatgtattatgtaattttaattgtagtagatataaacaattataaaattgctcataatgctggcattttgtaaggaatttgatttggtcaatcatggtcttttgaataacatttgcaactacatttatgaaatcttaagttttcagtggaagccctttctgtatatttatgtatattatttgtatattccagtaagttttaaatttgtttaattattttgagtgcattatcataaaagaagcataatgagaatacagactgcatttaag

SEQ ID NO: 114999 - DNA, 1050 bp, Homo sapiens
tatgttgatggtatgcttcctctattgggtggcaggatacatacgcccctcacgctggctctgtatttgggaacacaaatcctttgaaggttcaaaactggaagtagtgaccttaacttgatacagcaggcatttagaaaattttcaggggttatataagtagtagaatataataattacctttttcataattatatatgattaaattctgtaaattaaaacaaagctctattttcttttttgagggaaagaaagattatcattaattcagcactttagtgaaatacctatgaagttttctttaaaatctttctcaaattatatttacatctagacattttgcctacttctcaaatttacatactgagctagaagatttaaatgtgtaataaagcacctatgtgtgcaaggttagactgtaagaattgttttttttcaattttaagtcattgatagatatctttctttttttttttttttaggctattttggacatgacatattttgaggagaacaagctagtagatgaagattttcctgaagactcttcttcacagaaagtaaaagagctgattagttttctttcagaaccagaaattttagtaaaggaaaataatatgcatccaaaagtaagttttacattcctgttaattatgatggaatattgctggtacttgctgtcctgctttttggagtctatatttttttcttcttgattgtatctttgtttcttaaattaagattggaagagggagataaaagagcttaacacttcagaccaatgttgcaacaaaagtatcatattttactaaatgtatttcagaatatttgcataatagaattgtaatagctgtgcctaatcattttttttaatatagatattcccatttcgaccccctttacttttgcagatgctgttttcttgaaggtcactattaatctaattaccacgtctgttcttacagtccttattctctcgaacatttgctccccttcttaatgttgatcaccccctccctctgagaccctgcatgcttcttttccacttct

SEQ ID NO: 115000 - DNA, 1786 bp, Homo sapiens
tatattttttttctctatttatttatcaggggaggctgtggaaacatctccaaatttcaatgacaagccactttaaaaattttgatttattaaaattatttttgggtgtaaattttcattattttattccagcggtagtagaaatagatatgatctcacttcaagtaatgtatttgtgaaaagttacctttttaatgagatgatgactgcttatattgcaaacctgttaggggaatttgctagtaaaaatattttttaaattattttgtaaaactactagtaaattgaagttattttaattttcatgtattaatagaattgcatatttataattgattgaaaataaggcctccctgtgtaagcagctaaacaaagggaacattttgtgacttgagaatgtttttaatcgatgagtttttgaaatttaacttcaacttttatagacatccagtttccctttttagctatgtctttttttgtgtgtttcagcactgcaatttgcttggggatgagctactggaatgtctctcttggagacgaggagccctgctgtatatgtattgtcattctcttaccaaaagaagagagtggctcttaagaaaatccagtttgcttaaaaaggtaagaagacattccttacacatttttcattgttgacatttagaggtttcaaaaagctgtctttgttgtactactaagagtagtggatcaaagggtctgagtttgtattctgtgtcttttatttactagctgggtaatcataaataaattgggcttgttgtgaagactaaatcagataacatgtgaaagcactttgtaatctgcgaagttctttttttaaggatttgtattgttttaaatataagataaactatattaatttctaaacttttaaaaaatttttgtcctgaaagaaacacttgactgtgagcctgtcagcagatcacttctaaggaactcacatgaccctgcttctagaaaattgtggccctctgattcacttgaccattatgactgaatcattaaatccaaaatatgagtcttggtattgtatcactaaggattctaacttgggttaaatgtacacacaatttaggtgggcttgaaatgcgaggccacacttgcagatataaaagtttgatcataatatttctaaattataaccacatacatgtttttaatacattgttgttgagcacatctttattatctttattcttttcttcctctgataacatctttaacaagtatattactgaaatgtgtttctggttaatgtcttctttttttttagtactcttttttactactagagcatttcaaggggtatatttatattagcagagtcttgggatggtgggtctttataccattgaaatagaatagctgtaagctatgcctatatattaaccaattttctcttgagtaaagaatggaaaatattagtatttgaagtttatatatctctgcatataatactttcaattctttggctctgacttttatttagtaccttcttgatggaatcagttacttgctacagatgctaaattatcgatgtcctatccagttaaatgaaggagtttctttccaagatctagacacagctaaattactgagtgcaggtaatgtgatctctcattaaattttctaagtgttttaaagcttcttaagattttaggaagtttgttagatttcactctgatttaaataaatgtcaaggtagattatagacaaaaaagtaataagtaataaagggtttatataaaattcaaagataaaatct

SEQ ID NO: 115001 - DNA, 6149 bp, Homo sapiens
aagttctgaaggcaaaagtttgagaaccactatttatcatatagccatttgtattagtccgttttcatgctgccaataaagacatacccaagactgggaagaaaaaataggtttaatggactcacagttcctcgttgctgggaggcctcataatcatggcagaaggcagaaggcacttcttacatggcggtggcaagagagaaggagagagaagtgaaagcggaaaccccttataaaactattagatctcttgagacttattcattaccacaagaacagtatgggggaaaccgcctccatgattcagttatctcccactgggtccctcccacaacacatgggaattatgagggtacaattcaagatgagatttggatggggacacagagccaaaccatatcaccattcattcagctattctgctgagcctgttgtttctcttgctactctttataagcagaaattgaggtgaagtgaaggtgaaaactgtaggaacaaattttgatactttaaaaagcttgcaatagattcaaacagaaactaccactattttgaaagttgaatttttcatatccagtgccatcatagtcacttttgttgaatcatattaggtgaacaacagacattgtgatgctcatttatttgaagtaatcttttctaatcacagaagcacattagaatccatcatttattttttcttcaatggctttaagaagttacatttttatttcttttatgttctttaggaaaattcaggaattaagtaggggatgcaaactccttatttttcagatttaaaacctgagattcaaagagctttggtgacttgcccaaagacacaaagccagtaatttatacccagatcttttttattctaggtttatttgtctttctgccaaattaatatactttatgcaccataaatatttaattatataattgcctactggaaaaactacccataagaagaaagagttcaacttttgatgaaaattctgcagcatactctctttttttctggtaatacaaagcatcttggaaataacacctttaataatttaaaattgtatggactctcaggcatgattatgcatgataatttcttagacttttagagaatataagaggtctaggatacttgactttagctatatgaattatcctagagcataccccaaaataaagggtgtgtccatggatgtaattcagggagtttataagtactctgaaattgactgcagaatttggggtgtatattctgggagaagttctattccttaaattagattctcaaagaagttatagagtggaccccaaaaaggtcaaaaacacctaaatggttctctaaaaaaattctctggtactctgtttttctttttgtaatgggcctcctttatcagtaaaatcgatattaaaaaatgctaattaaatgaagattgtgttagtcatatttggcttttgtgttactgttaaagtgagaatagaaaatgcttaatgacaaaaggaactttaattagagtttagttaataactacggtttctttttaagcttttaattctaatctgtcaacctaaatgactttcccaggaatatttagtgacattcatctgctggctatgatgtacagtggagaaatgtgttactggggatcgaagtattgtgctgatcagcaaccagaaaatcatgaagtggatactagtgtgtctggagcgggctgcactacatacaaggaacccttggatttccgagaagtaggagaaaaaatcttgaaaaagtatgtatctgtgtgtgaaggacccctgaaagaacaagaatggaatacaacgaatgcaaaacaaattttaaacttctttcatcatcgctgtaactagtaagttcatctagtccttttcaaatagaaaaacaacaaaacccatgaaatggaaaagagagttccaaaaaagaagacctgttgatactgaatatgagaacattacactgcataaagatatccagcttgggtaccctactaaaacaacatcaccatctttttcattatatattagtaaacctatgaagggatgattctttaatttctaaagtgttgttcaaactcaccttaaaatacagatgttatgtcactaataatgagtagtaacccaatttagctttacaaagattttttctattactttttttttttattgtggtatatgtaacacaagtttaccatttttatcatctttagattatttttaaatctcactaccttgaagtttgccatgcttcagaaattaaagtcaagttacttcactgctttgaatacatactatggatataaatgtaggcaaaatgaaagattatgactaatattcagattccattttcaataaggtaaataatgaaagatctcacaaaggaatcattgtgtttaattattttgccatgtattactaattgtatttaaaatttctacttcccttaggcattttataaaaatttaaaaattatttttctattttgtttaaaagacaatgcatggcttttcaagtgagtaatgaagataaaaaccaagctaggttagtctaccattagttcatatgtttttgtagcacatcttttcataacatactgaaattttaatgttttttgcctttaataataggggtgagtgttaaaggccagagagcctaacttgatatcttgctcatggtctttctgtctacctcaactcctgttgtcatctttggatgatctttctgataccttgctgataccttggacttctgcccagtgactttattacattccagcagcttactcccgtggccgcactttgaatgtcaccaccttgagtttctctttctggtaaaatttcagtaactgataactgccctcttttcagttttttcacttccttattttattgacttttctctcctttatgctcattccacattcttcagttccttcttacccccttttcttgactgctccccttcctcctaaactgtcagcccctttcaggctttcttccctatccaccctcagctttatgggatactatatgaactaatctcaccagttattcttctttccctggtcttttagtctagtcctttggcaagccctcaacctcagattaatcctatttattatctaccttttcggggatgctgagttctttgtgatgggtagtccttcaaagtagaatcactacaagtgtctcacttcagccttagaaaagccctcaatgtaaaccttatgtttgttactagggtggcctctctcccatttcccgctgtggctgagccaaacttcattactttccttaggccctctgcccctcccctagcatatggctctttctcctattgaacagaaaattgagactatgaagaggtcaacttgtatttaccaactttactcattttcccattttagaggaaaagaggttgcctgcttcctatcaaaggcgactctgtgctacatgttggtttcatcttcgctgtctctctcatttccccacaaagtgttgtctcactttctgcctaccttttaggtattgatcttcactatatttttttctctctctctcttttttttttttactttacatattttatacaatgtcattcataactatggcttcttttaccacctgtaataacagactgagtctcaaacctgtaacttgtatcctgacttatctcttgctttctaaaccttgtttctaactgtctatcaaatatcttcattagacatcccacagtaattttaagctcagtgtttccaaacgtcaagtcctcatctgttatataaaatcctttctgctttgtaagttttctctttttgggattttccgcagatcagggcaacacagaatgactaccttcccagccatgtctctgcagtcatcctgtgtaatcatgttctagtccagtgttgctcaaacagttaaaatccaggctgcttttggtaaacatacaaattctgatatagagcctctgtggcaaagggaatttctcagttcctgccccagcccccttgtttatcattacacagctaagatttttatttaacttagcattttagcaagttttcttatgaaaatacctttgtgctttctaagtataaagatttaaattatttttaatacggtttttagaaccacagactatccctctttttagagcatcctgatcaattgcaagtacttccacttcttccctaaatgcgctttgtgtgttttccacctcagtagccttgcacacatcattacttctgcatccttctttgtgaccaagtgaatacctacctacctcttaggactcagcttcagtgattctgttttcataggctttttaaagcccttttcagtcaaattagatgctcctttgttctggtcctttactcttcccctcccatgttgtcgcactgatcacactgctttgtaattattttctttattgttggtaaactccatattttaaaaatttacctgtatacatagtgcttaatgcatggtaggcccttagtaatgtttttgaattaatgaggcatgattctaaatgccaaactttgcacaaaaagttgttgctattggattccaaactgctatgccctctataccagtggctgacaaggcatatagggatatatgccatcctgagaggagtaaagtgtttagattctgaacctgagaaaagagaactttctcttaagaagttggaaacttcattttaccttcgtgaccctggtagaccacttggtctcactggttggtacaattatgagggtagtactgggtgctttttatacaactttccatcccccacacagttggagaataatttgtagaccatggcagttaaaatgctttttactctggtgtattatagaataatgaacacatttttatatatgttaaagcctgctaaatcattcacttagaatgaagtaacctcaaggtaccaaataccccacataaggaaagtactacactaaattcactcaactattgtatgcctaccatatgccagattttatcctagaccctgaggatatagctttttaaaaccccctcctgtttcagagcttatattctagtggaggaagttagacaagcattttaagtaataaatgtatagagagtgtcaagtgatgagtaccatgaagaagaataaatgagggtaaggggctagtgtgatagggagaggggtgggatgccatcatatttaggggtggttgggaactgtctactgctttagcatttgtgtcttcaaatttctctcctttggttatataccttgcgtattccgcacattgataaagtttctttcttacagaagttctgatattgaattaaggaatgggtcactacttaagactttatcatttcagctacacataaaaggtttctctcccctatggattttgctaatggttgagtgatacctaaaggccttgttgcattttttacacttggggtttctcttcggtttgaattctctcatggttaccaaaactctgttaaaggacttttcacagtcgttaaatgtgtatggctctttcccaatatgaatttttttgatgttaactaggcttttagacttagttaaagacctgtgtgctctgctgcatttatagggttttgggctgctgagaataattgatgctgattaaggtgcaaatcatgactaaagacttttctttcttcttttgcatatagtagagtgaggtgagggtcgtggctaaaaccccacaataactttacattcctagctttacagtcttgctgtgaattctctggtgttcattaaagtgtgagctgtgttaaaaggcattcttagattcattttaaccacatttttaaaaactcacagttggttaacatgatggtttcagattgcttgcctcttttctctttctaccttacagggctccttttctagcttaaataagggtactccatctgccacagaatccaggattctatagttttttagtttcacttccctatgttctttttttttttttaatttttaacaatgagatgataccatgttacagcggtattacattaagatacatttaatatagccacaattaaagtatgtattatgtatttatgctggtgttctttcatgttatttcttctagtgaaaat

SEQ ID NO: 115002 - DNA, 1034 bp, Homo sapiens
tctcactatgttgtctaggttggtcttgaactcttagcctcaagtgattcttccacctcagcctcccaaattgttgggattacagatgtgagccactgtgcctgccccccccatcaatttaaaaacagcttttcagagggggagaaagacacttaattgaatgtatacattgattattagactaatgagaaacataaaaatatgaaaatgagtcttagtcttgaggataaatagtagtagctgtgattatgcagctgctactgataagatgataaagttgttgatgatagtgatgatgatataaggactgttataagccttgcagtttttttctttctctgtatttttattgtcatgtgaatgaaagttacatacggtatcttttcttcaacgtatacattttatttcaactctatgtataagttgttatagaattttttctttactctttttgctttcaccgggtaattttcagtgtgatcttttgctatttttattaatgatttgttttggtaactgtgattttctttcttaggtattggatcaggagtcaattttcagttgaacaaccaacataaattcaacattctaatcttatattcaactaccaggtaaggctacatacttggtggcttaactgaaacatcagaactaaaacatttcaggtgagtggagcctgtttagtgtctttttatattctgtctttacaattttttttctagaaaggaaagagatagagcaagggaagagcatacaagtgcagttaacaagatgttcagtcgacacaatgaaggtgatgatcaacaaggaagccggtacagtgtgattccacagattcaaaaagtgtgtgaagttgtagatgggttcatctatgttgcaaatgctgaagctcataaaagtaagtactcatatgtacatttttaagcacattgttcttttcaaagcaaatggaaaatacctttttagactttactgtggcttcttaagaatatgatggcttattttatcaatgtgattttctgacccttactatt

SEQ ID NO: 115003 - DNA, 1039 bp, Homo sapiens
gtgtcctgaatgagtgtacgtgtgcgctgtgtgtgcgcgcgcgagtgtgcgcctggggaggcgtgtcggcgcctgagccagtagggtgtgcagggtggaagaggccacagaggtgccgcctgtctgtttgtgccgccaggagaccttggaagggacagagaaaggtaacggaaggccaaagtgttgggaagtcagagtagtttctgcataggattaagtattaagggctttaaaataactaaacgcattgccctgagtggctgaggactggaagtgaggttttggggagttctcaggagaactgcatgggagggcgtttgggaggtctaagggatgtgtaatatgtgtgagtacagaacttcggagacagacacaggttggagctatgaatttgaaattttcagggtgctgctgtccacagtccagggactggctggtttcagaggtattcaggctccctggtgtgtgtgcctgggaagacactcatcttttcttgcagacatgggatattgtggcaggtcaggctctgtttcctgagcaactggtgttccaggctagtttccacctgaatcaccctagaagtgtcttttttctgatgataaatgttgaaacctttccagaaattaaaatgctggatagaaacaaaattgatgcagcagacaggattgttgattctatttattcagtgattgggagctctttttccttttgagaaaagcaaagctcagtgtttccagattagatttcaaggagtcttcagctatctacagcttcccttctgggcctttggatggagctggaaggatgtgttttggcctaaagacctttggaagacatcatgtgtagcttaaagaggttgtcccgtctctcatcatcttcttccacccttataaactttttgttttgcattaatctaaggaaagttggtgtgtcaacatttagcttttttttattggagtaaatatatcacagtgaaattatagttatggtctcctgaagcccatggaaagccaacacttaatgggcaaaggtgtgaaat

SEQ ID NO: 115004 - DNA, 1130 bp, Homo sapiens
tggattatgttttttaaatctgctaacctgaagattacacttctcaggtcgtaccactggcaaattgcacaactatgggaatttggtttgcttttaaagagcaatttttaaaaagtatgtcagtaatgaaaataacttatatttcttaatgtgtttatgtgtgtccatacaagccaatactttttcttctttaaaaagaaccctataatttctgtggtaattatttaaatattatgagcattcaaatctcctaatcaccttttcaatcttcaattgataagaatcgaagtttggtaagactggagtcatccctcagccaattgtgtaaacaagacagtacagaatgtctttctggcaagtaatttttttcaacctgaaacagataatataaataatatgtcccataaaagaattacttaagatgataattactttagaggtaattatctggtgcatgaacctctatctgtgaaaatggtctagtctatctcttattggaaataatcagttggaaatctccctttttcattggtcagtccattctaggaaagattcatttctagaaagttcttatactgaatcaacattttcttccatccacttgcctatccttcagcagctgaccacaatgaatctagtctcttttccctgtgtttaccatacttgaaaacaaatattatcctccttgccgaatccccttttgcctactcttggagcagtttttcatccactatagggttccaccctcctctgccttgaacaagatgcccttgattgtacattctcattgtattagtctgttctcatgctgctaataaagacatacgtgagactgtgtaatttataaagaaaaagaggtttaatggattcacagttccacatggctggggaggcctcacaatcatggcggaaggtgaaggaggagcaaaggcatgtcttacatgacagcaggcaagaaagcatgtgcaggggaactgccctttatagaaccatcagatctcattagacttattcactatcatgagaacaacatgggaaaaacccacttccatgatttaatcaactcctactgggtcccttccaccacatgtgggaattatgggaactacaattcaagatggcatttgggt

SEQ ID NO: 115005 - DNA, 1050 bp, Homo sapiens
gggaactaccctttataaaaccatcacatctcatgagacttaatcactatcgcaagaacagcatgggaaaaactcgccctcttggttcaatgacctcccactgggttcctcccatgacacatggggattatggtagctacaattcaagatgaaattggggtggggacacagcaaaaccatattactgactgtccctcctaatgtgtgttttctaaacaaaagatttataatttgtagttctgaacattctatatctattaagacagtttaatattaatgaaattctttagccatttcattacgctcttgattaatttcatacctataaacaagataacttgttcttttcagattattaatcatccatagtcaaagcatttttataatagcttcaaaacattttttcatgcctgaatgtactataaatttatggaaagtataatactgtgtgggtaaataaaattctataaacagtgcaaatagtgacttaatttctccctatcaaggaatatcaaccccaaatataccgaaagtagaatgttccaaagataaacaagttgaaactacatgttatagacaggtagggactatgatgtatttttttcataggcctcattgtgtctgcttccatgaacatgagtcagtactagcaatcaggcatttattgaaggcttgttctgccaaagtcccagagagtatgccatctggccttaaatgaagtgaaagtacatcaaataaagatacttccttgggcaactgggatttaagatgtgcatgcaggacatgtctaagtcagccatctactttttctcaggaggtaaatggcttgccaatgccacaggaaagtctaaagtgttcacactccataagcaggtcccatgtcctgttgtaggtctggacaggagctggacaaaggccctgttactcttagcttaccaagtcttagctgccttggaagaagatagcaaatctggcttatccagaggagaggcctgaagtgtgcattgggcacctacctggtgtgactgatttctcttttatgtatctgtc

SEQ ID NO: 115006 - DNA, 1020 bp, Homo sapiens
cttcagagcctacactcctaatgctgtattcaattactcccacacttctccacttgcttaacccctattcttggtgtcctttttctaggtatacagaatttgaaaactatattgtcaaactacagcagacctggatgcatggtatacacttctttgtgagctggattaagtttcagccttgaatttgtggattattttcaaaacctgcctaacatctgtaaaacatgttgtttttttaatatgtagatatccacataaattgaccacaatgctcttcagaaagtcccataatccaataataaataaatttttgatacatggctaataacaggcacagaagcatctccaaaggacaggacattgatattgtgtaataatttaaagtattttatgattgtataatgtgcctgagttttggatagttgacctctatttctcagtctttacatagttactgcttttttaagtgttacatgagggatgtggaatattcagtgtaacatttgactaatctttatgttttgagtggcccaactgaaaattacccttggttgccttggaactctgggcatgatgttcaaaactagaaattcttgcaaattatttgagctttggctctgggaagataaacaacatgaataactaggttaaccagggctgaaatttctctaacctataattctaaattcagaaaagaatgggctttagggttttttgtttatttttgctttgattacaagttgttggaagcctagagttagtatctaataacacaatctatgtaaaacacaaattattggctcagaatgatatctaatttctaagaagatatgaggaggcaatcatgtaaaaacgtgcttttcttcctagaaggaataagctgggattggccaaaaggtaatccctttagagtctaatgtttagagcattgcatatttttaaagaagacatattaccttttagaacatatgtaggaaaccattttctttgcttatatggctacataaagttgtcatggtt

SEQ ID NO: 115007 - DNA, 1048 bp, Homo sapiens
aggctggctgtactttgccctcctcaaccctaaaccctatctgtttaccacagtggaccttttttctgaactctaacctcattatttcattcattatccacgtaatattcattaatgttctccaaggctcttagaataaatctttaacatttccccaaaaagtcacaaggtctgacacctgccttcctttttccagcttcctatcataatcctcctttttggcagtggccacactgatcttctttcaggttcccaagctcagcatttgcttttcattgggagccccttacatcatgactgtcagcctgattgtcatttctttggggaggccttccctgaaccctggaactggatcatatacccctatcatgtgctttcatagcaccatgaatgtctccttggtggcagtccccagtaggagaattctgtgtttatctgtatggctgtttcataaatgtttatcttcctcccaatagtctgtcagcactttggcagccagttgtgttttgctgttgattctacctccagcacagaatgtctcttagtatttatggaaggggacatgaaaaaagaaaaagtccactgcatgaagatttaatccagcgacactgaggcctgaacatctagctttagggaagccagcttctagcaggacagactggtagggactaggtaaggagaatggaaaaacacagggaatgagcatcactttctttaagactttgcctctggcagacccctccaagtaacagattccaaagagattgtgaatgttctccctctggtatgcagtctcctgtcctgtcagaaacatggtacccagaggccaaagctgctgcataagcaagttatcatgaaactattccaggacaggtttcagaagcagggtcttaaaaatgagtattaaatctaatgttcacccagatacatttccaacccacatatagacaccgaatttaacgatgaaagtggaagttactctgttgaggatttatttgaaatgttggttttctcttgtccatctgatacaggtcatagctctgtttct

SEQ ID NO: 115008 - DNA, 1057 bp, Homo sapiens
agggcatgaagagggcacttgggactactggattgcatcatcttggcagagaaaaatgtagcatatactggaactctagctgggtagggaattgacaagttgaaccacaagttgactactgttcagtcagcactagcttttatcttccagtcaccattccctgtggctcttcattgatcgtccacaagctccaggcctgggtggtgcctgttgtgatataagaagggaagagtgatggtttccaaaatgtgaacactcatgtgtacagttttcatgttgataatgaaatgctagaaggggaacagctagctgatgcctatgtctttgtccatacctggctacccatgacaaagttgttgttgttgtggttgttgtttcactccaggcacaggcacagagccgcaagagtagaaaacaagaattccatcctgcaaaagaaaactgaatcccccttgcttggtcacttagggaatcaagttcaggagggctggacatgttttctgttgctctgtaataggggctgaaacttagttcaattatggtgcttagctgaagcaccatgactgaatctttttttgagaaggagaaaggagaagattttaaaatgaaatgccataagtgtaacatagtacatatagaggtcacaaacttggaaagcctgtggtgtcttggaaggtcacataaatgtgtgaaacacgccagttgcacacaggcaagcatatgtcccttctagagaaattattgccactgaggaatgctggttctaatctccaccctcccttcccctcccctccactcctgtaaaaaccagaggtttggaattttgcgtgaataactcagtttgttagtgttgacaaccaggcatgacagtagctcatttggaccctttgtccaaatcaggaaacagcagcccttccttcatggcagccctgtagctacgccagtcgagtgtgggctggatttcagcccttactctcctccttagctgagactttgtgccagacacaagctgcccagctgtagacagtgggcccagaagttatcagtgttacatgag

SEQ ID NO: 115009 - DNA, 1037 bp, Homo sapiens
aagctccaggaaggcagggatgtgtctgtgttgtttatgactataacctctgggcctaaatcagtacctatcccatggtaggcactcggtaaatactgaaggaatgagtacagtatgaaaattagcatggctgatccttggaaaaaatataagtcaaaagggaatagcatgcatgtgtaactaaaacatcagtccacatgcttgaaatgtcatcacttttttatggtcaggacctgtttttttctgctccaattaaagaagaaaattgtaatgtgaaagaagcaagaagtgaagtatttggtattcatgtgttttgacatctgcagtaagtttaaaataaatttctaaatcttattgtattgaaattgtatgagtttcttaagtggtattattcattcagacttaaagtgaagttaggttgctgtcactcatagtggacttttttttttttggcattattaaaacaacatgtcttctgggtgttgtcttgtattacaaaagcttgcgtgttttctcttgatgctgtgccctgtctgttgccattgaggggtctaaggaccaaatgaggtcttgtttccttcctgatattcttttgaccagtttagaatatgccaggtccattcacacaactaagcggctcagttctctcagttccctggtcttctcatattagattgttatctatgagcttgaagtttagacatgaaaaagaatggttgtaatcctcttccttctctcaccctcttccctttttttcttaagttagccttttgaattcatgattctaataattaatatatattattatataatatagtatatattcataataatgattaatgatagtattaataattctgtgtgtgtgtgggcagctactcatacagaggaaaacagattgattagtggaaattacattaatttcataacttcttattaaaagagtttgtgtgtgtgttgttggttgtttgttccctttgcaactcaacatggtcttcttgaggtgtagggaaaacatatgcttaggaaacagagcc

SEQ ID NO: 115010 - DNA, 1040 bp, Homo sapiens
taatgataccagatctgttctactatgcccagccattcttatgtatctgtctctcaatgcatcatgggtcctttatggattcttttgtgatgtcctcaagcttcctgtccactccctagcaacttgcccaaactgatagaaccggcctgaatcagtcaacatctgatttcaagcattttctcttggtcagcctttggtattaggactttattctcaatctaatcaattaatattagctgagctaggttgatttcatttgaatcaacaaagaattgctaaaagctgcatttcctagaaaatgtggcaatataattggcaggtacttgagagtctttaatgttaaatggaaaaaaaataaaaaataataagagacaactttttatacggagcatgttttcggttttctttagatattttgttagagacaaaaaaggaatccagaatttattttatactacattagtacttaacagatttctacataagcaagtattatgcatttgtaatcagaaaaaaatatcaaaattagctctgtggaaaatgatcatcttgcaagcaagcatcatgtacccctacttttgatttagctcatcttcttgatgtaaatatgaagtgtctgcgcttgaaattctgtttgaagtggaaatcttcatgtttgtcttacaaataccatctcagagtacattgctcagtataaaacttgttttggggggttgggtacaaaaacctgcaaagatatagtccaggctccttttcccaaagtccttcactttcctactcttagtataaccattattttgtaaaatttaataaggcccctaataacttggggtttgggaatttgatttgaggtaacatgcctcagagtatcacctattttttattaaaccaacaaatttctatctgacaaagatgtgcatttatgtgggccttaataattcccccaaataaaactattcgtaagttctaacagttccaaatacttttggtttcagcacactaataggatttatagctgtcttagataaggagcagtatct

SEQ ID NO: 115011 - DNA, 1042 bp, Homo sapiens
aggaagatacaggccagctgagagccagcattcatattgcctgttcctttcagtattctttgtgaaaacaccaccaccaatgtgttccctggacgtcactactgcacctttaactggccttattatgctagggactgcatttgaaaagccaaactctagtatctgtctgtaattgcaagcggatatctcagcacatgcacaagcttatgtcaggaggatgtttatgaaaaactcaccaagcagaacactgctagacaggaaataaatatgtgaagcttgaagttgttaggaaacttccacatttgtccctctaagccagagataggacctgtgagaaaagaaggtctttatcattgcgcattgattcttgctgaacccctgctattctcaaaatacatttacagcaaaatgtggctactgcagatgtatttaaacatgtgcttttttaaatgacactggtttatcttccaagtttgttatctactattttactgtaaagcattaaaaagtgtttgaaaccaccagcaccatttcacagttcctgttttatttgtttaaattctctagctcatgtaatatgctgtatgatttactgttcaagtagagaagaaatacactccctcatggagatgtggggaggtaatactgtctcttggaagggctcagagatttcctgtttagattacacaggcttctttagagctgccaagagtcataacatgtacgagataatacactttggttcaggaaaaactatggataggaatgtaattaattcactgagccacaaaagatattccagcttagaaatgtcactgcactcaggcctggtggactcagtatgccaaggggtagccatgaccaaaaagaggattgctgcctgaggacccactgagtagtatccaaccacagagcaaaaggagggggcctggctgctaaggacatcacacgtctcacctgcttctttgagaattgatccctgaagggtatttctgcccaaagcctcagcaacctggcttcatcaatataactttgtgatgct

SEQ ID NO: 115012 - DNA, 1133 bp, Homo sapiens
tgtatgtatggtactacctcacagggctattctttggatttgaagtactatattagttagacatttgtcattcattcaattcattcagcaaatatttattatgctcttctctcaggccagtcaatgttctccatgctggggatagaaactgtcttccctggtgggatttaatcccaacgaggatggaaagcgacaatgctatggagaaatataggaaaggagaataggagtgttggagaggttgcagtgttgagttttcaggattggcatccctgaggcagtggcatttgaataaagaaggattggagaggataattatgtgtgtgtctcagggaagggcatttcagcaagggggcacgccagaagaaagatctcaaagtaggagcatgcttttcctcactcaatgaacagcaggccggcggtggagtgggcacagagtgagcgaggagactggtatgagaccaaatcgcacagacaagacagtcaaatctacccaaccattgccaaagactttggctttcacttggagtgaggtaggcagcctttggagggttttagatgatgagcgatgtgatctaacgtaagtgttaggataatcactgtgtcagttcgcttgaggattgcatggagaatagactggagggggacaaagaccaaaggggtacagtggggagacaaatgaagcaagaagaatgaaaaaggataatggccaggaccaggttattagtggtgcaggcggtgggacatggttggattctgttatatcttgaaagtacagctgacggaatgtggattagtgaggaaaagatgagccaaggacaagttcattgtttttatcctgagcaactagaggaattgagtcctcgttaacagagatggaaaagaggaaaggagagcaggttttggagaggaagagcaagggtttgtttggggatatattaagtttcagatattttttaaatatctcacaggagttgtcaatatagcatgtagatttatgtatagagataaaggagaggtcattattatgcctgtaatggtatctcacaggaggtcattgttatgcctgtaatggtggtaccaaatcttttccaaaaggaccttgtctcatatcctctatttttcaaatgcag

SEQ ID NO: 115013 - DNA, 1136 bp, Homo sapiens
tggcgcgatcttgactcactgcaatctccacctcccacaggttcaggcgattcccgtgcctcagcctcctgagtagctgggactacaggcacgcaccaccatgccaggctaatttttttgtattttagcagagacggggtttcaccatgttggccaggatggtctcgatctcctgacctcgtgatccacccgactcggcctcccaaagtgctgggattacaggtgtaagccaccgtgcccagccctaaacatcattcttgagagcattgggatatctcctgaaaaggtttatgaaaaagaagaatctcatctcagtgaagaatacttctcattttttaaaaaagcttaaaactttgaagttagctttaacttaaatagtatttcccatttatcgcagaccttttttaggaagcaagcttaatggctgataattttaaattctctctcttgcaggaaggactatgaaaagctagaattgagtgtttaaagttcaacatgttatttgtaatagatgtttgatagattttctgctactttgctgctatggttttctccaagagctacataatttagtttcatataaagtatcatcagtgtagaacctaattcaattcaaagctgtgtgtttggaagactatcttactatttcacaacagcctgacaacatttctatagccaaaaatagctaaatacctcaatcagtctcagaatgtcattttggtactttggtggccacataagccattattcactagtatgactagttgtgtctggcagtttatatttaactctctttatgtctgtggattttttccttcaaagtttaataaatttattttcttggattcctgatagtgtgcttctgttatcaaacaccaacataaaaatgatctaaaccactctgtatactgtgaattatcattgtaaggagagcttagcaccactggatcaaatacatcagcattgggtatggagatttttatgtgctgagatatagagagggaaacatatcccccttcccttattttttgagaagacaaaagcccaactcagaaatatcccactggcttggccctccccttaggctgtgactccccataggcaaaggttcatagagctgtgtatttgatgcatca

SEQ ID NO: 115014 - DNA, 1135 bp, Homo sapiens
gatggcagcaaggctgccatacctgatggtttttgtgatgtcctgcaaaatagtggatgatgactgggagtgcagggtctgaaaattataggattatatgccctagtggttggctgcatctgcctccaataggttgtatataaaaatcacacaaaagtgaaagtataagcatgttttaggagaagataatcaatacagatttgaataattaaatttaagatgtttgtgaatatgtctaggaagtagactcgtctggagttcagtcattgtgtttcagctttgtatatatgggatcatcctaatatgtgttttaattgtaatcaagggatagatgagattgctcaggtaaaatgtgcagagtgtgaataggcagaaagctgtatagccctgaataacacaaacacatacagaataaaccaaggaagaatgtgggaggaagaaaaatcaggaggtggaagaggaggaagtgtggaggaggagaaagaagaggaaggatatgaggaaaaccagcagggtatagtgtcatagaaattttttaaaatgagagtatttcaaaaataaggagtgatttttacttctaaatgttaaagagagattatatgagatgaagactgaaatatggcattgtatttaacagtaaagaagattgttatgtgtgatgggaagtaaataaatagatacgaaacagttatttttaaatttgggatgtgtttgtgtgtatgtacaaacctatcatatatgaggaagtcatctttgcttccatttaaaagagtccagacatctgtttggttttcttcttgttgataaacaggaatatgctctgaaaccttattcttaagatgtgtgtattttaatcgagaagagattccttgatgattaacaacaatataagaaatattagaatatccttctttcttcagttttactcgcaggtcttctaatctaaaatatttgggaagaaatacataaaatgaataatctcatttgatttgattagtggtttttctccctcttccttaattttctatgtgaaactctccttcttatttttaactaacccatactgcacctattctttatattgctgtaaaagattttaaaactttcatttttagaattacttaaaacttgtgct

SEQ ID NO: 115015 - DNA, 1054 bp, Homo sapiens
ggtgaaaaatggatattgagttcccttcatgaaaagttatataaaatatatatttagcataaacttctccagagttgtcctttattaagtttctttacagaaactttaattggtgccatgattcttgtgggggaaagaatcataagagccatcaacttttttcctttcattttagcatattccaagccctgccaagaaagtaccaagactccctgccacagcagcagaacctgaagcagctgtcattagtaatggggaacattaagatactctgtgaggtgcaagacttcagggtggggtgggcatggggtgggggtatgggaacagttggaggaatgggatatctggggataattttaaaggattacatgttatgtaaatttttatgtgactgacatggagcctggatgactatcgtgtacttgggaaagtctctttgctctatttgctgacatgcttcctgttgtggtctggccaatgccaaatgtactcgaatgatgttaagggctctgtaaaacttcatacctctttggccatttgtatgcatgatgtttggtttttaaacatggtataatgaattgtgtacttctgtcagaagaaagcagaggtactaatctccaattaaaaaattttttaacatgtaagaattttgtactttgaacaacaagattacagaaagtacctgtggtttttggaaaacatttctagcttggggaatgtgacaacattccccagtgtggtaaaattggggtaaaatgtggtaaaatgtgatacgcacaaaccctttgaaaatagcaaaacaaacatgccctttttctaaaattgataaatcctaaagaggaagaaaagagctgggacaataaaacactggctctggaatctggaatgttaagtccaggccagcagtgacaaaagttattgtaatgacctctgaacagagaaacactgccattgaagaggcttctggtatagaaaacatggtacattcaggagctgtgaatatagctctaggtgtgctcctgaatcagttcatggtagattatgctgaacaaca

SEQ ID NO: 115016 - DNA, 1016 bp, Homo sapiens
attgcagttggtgggctttctgaaattctccttgatacataccatgtaccctgctcttcctaaaaaaaaaaaaaaaaaaaaaatctattctccttgggctatgtgacatattatatataacatgtaaaagttgccagtatttacatcttggttttatgtttgtgaaattattgctgatactgttttgtttaaatattatatggtagtccataatcttcattcatatttttctctactttctcctttagggtgctggaaatgtaaacaagaatagactgttcattcctgatggcttttagtctatactaacatattgtttgtcatggcatccgagactgaaaagacccatgctttactgcagacttgtagcactgaatctcttatttccagccttggtctgggggcattttgcctcgtagctgacagacttcttcagttttccacaattcagcaaaatgactggcttcgtgctctctcagataatgcagtacattgtgtaattggcatgtggtcatgggcggtagtcactggaatcaagaagaagactgactttggagaaatcattttagctggatttttagcctctgttattgatgtagaccacttttttctagctggatccatgtctttaaaggtaaaaagcataggcttaatttttctgatctttaatttccttagcactattttgctgatctttacagcatcatttagaactagagaggatttgtcttaaaataggaaagcacattcatgtaacctttttgaccacttagtacttgcctaaagatgcacacagacatgttgctaatcaaattatttgccatcacaaactgctatggattcacatagagcaaagacccacgaactgtacctaaagagttcagtgctggcttacagaggatgcgtttagccaggtcttgaagaaagtattagcaaaccggtttaaattaacaggggtgattctcaaggctgtcctagttctttctgtatcagtgtactttcttcaggagcacact

SEQ ID NO: 115017 - DNA, 1460 bp, Homo sapiens
attctcacccaattcatctaaatttgttttctcttgtggtttttctctaatcttattcaaataagttagttctatagcgaacaggtttttcactctaaatctttttaaattaaaaatagacactacacagattccttataatcctgtcatcctactctttaattcccgtgtcatttcttcacttaaagaaatgttactgaaattttcatttcctccttaccaccaaacctccacccaaacacacacatacacactctattctctttccccctcccttatactgtaattagtttcttcatctacaaggagcagacttgataagccttgcagttccaactgtattatgaatccaagaggtcttccagctgagaaatattttaatatgaagcctatgctttctgtatataaagatatttatatagtgaaaaatgtggggaaaacctccttaactaagcaacttagtgctactagaaaatagtggtatcctaaaccagatttctaacaagaaaaatgaacaacagtcttttgatcattataaaccaggatcttcagaaaccttgctaggagaagttaatgaaaatagagtatcaatagcattgaaaaaaacctctgaaatccttcacgatattgactgtcttctatcaaactctaaaaagtgaaaaatggaattattacaacatattattaaagtttaaggatgttgtttcaagtgactggtataaaattactagtaagccaagatattgtacgtattaccccggcacaatgattgtgaaagaactgacatttaactttgaaggtatttttaacttgtacatttttaaaatatgtatttatatcttaataataaatatttcgaagttttgaacgtttcacatttaattcttatttcagattaacaagaaaaaaaatttgtaacattataaagttgttgctgtttttatcttgtggagcattcactattaatcttcaggttttttcattttgtttgtttttactgtttgagatacggtcttgctttgtcacccaggctgcaatgcagtggtgcaatcatagctcactgcagccttgaacttgtgggctcaagggatcttcccacctcagccttctgagtagctggaaccacagacatgtaccaccatgcctggctaatttttaaaaattttttttgtagagacaggaatctccctatcttgcccaggctggtcttgaactcctggcttcaagctatcctcctgcctccgtttcccaaaatgctggaattacaggtgtgagccactgcacccagcctctttttttttaatatgcagaattgtgcatttgttcacttgctatttggtccctttactccaagtatttttcagtagagctatgagacaagaactacatctcaaaaacaaaaacggagacaagcaacattgtaaactaaaaatcaggcactttggcaaagactgtatcta

SEQ ID NO: 115018 - DNA, 1083 bp, Homo sapiens
aaatataaggattttataatatttgacttctgaataagtatccaaaattgccctagagtcattaatattcatttaaatcttgttcttagataactctatttcctgctatttttatttacttggttttaggtacctgggataaacgatagcaatatactgcctttggttttgaaagagtcactcatacccagtgtgggaagatttcttgcctactctgatgacaaagtacatgctatctttttagatggcattactctaaccctaaattggaatttcagctctcctattgagaagagacaggtgggtatacttcagacttagatctattttttattggtaatctgtggaaaacagaacaaagaaaacaaagtaccacactatttcagttcattttttgaagtataaaatctgtcaagaagctttactgatctctttggatttcctagcaaaaatcagaatgatttgacaaatagtcacttttctaaagataactgattatagagaaagggattagtattttcatttgctttgataattacctatatgagtggtggttaaataacacccatatctcatgtaaacaacatttaaactgttgcatctttaatgattcctctacttatttctttaagttaatgaagttagaataggttgtttatgttctttttttcagttctaaaatgataaaacttatctttctacttcttcaggtaaatcaaggtcttaacttaggttggtgtaagttaacttttcctgatggacaagagcagttaattcagattgaacaccctgaaccatatgaaaggtactgaaaagcaattttaaaaattatttttatgttttacttttaactaacagagaataagcaataagcattatttaagtgttatatatatttttagtttttccatgtggataataatgaaggcatttcagtcgtttcagagttgatagctgtacttgtgtttagcataactaaatagatcaagtcagctttttttttttttttttttttgagacagagttttgctcctgtggcctgggccggagtacaatggcacgatctcggctcaccacaacctc

SEQ ID NO: 115019 - DNA, 1019 bp, Homo sapiens
tcattgagtggccactctgtgccagcactgttccattgaattatccataccccacaacaaaggacacccttctagtgactagaatactagtgttagccagattgagagtttcacttccatgaacaatgctagaagagcactgctaaatttttggagagcgagggggctctccttttcctatgtgaagacctattccttctaacaacatattctaacatgtatgttaataaaattaacttggcttaagtttctatttggtatatacccagtaccttgattgtacctggctgctccaggtacagccatcttttcttagggatagccccttgtgcagacggctaatcttatccataaagtattgattccgctagtttcattaatctattttcaggttctggaaatgttgtatttaacacgtatgcaatagacattgctttggtgacccttatatgccagccttgtgattagcagtggggatatcaagaagatgataagacaagatgcctgaattccagaagttcttagtttagttgttgaaataaatgcataagccaattctatttatcttttcgtgaaagagttaatttagctggttgggttcagaatatgaaattatctgcttcactggacaggcaaaaagactgtgttgttttgcttagattttgttgttactgttttttgatgactatcttcatgcatgttttaatctcaagtggaaaaaaatttttaatggttatttctatttcttagacttacccatcaaaatatgaactcaatagagatttattctggggatggatctgttttcaaatcagaaggggcttattttgggaactattttacttattattctattcaagaaggatcaggaaaggtaagccaacaatgaactcaactcaagaagagttttgctgtatagctctttctaaataattccaaatatatatgggaaatttggtcattatataacattgcttcctactccccagtctggagtattaatataatcttactgccag

SEQ ID NO: 115020 - DNA, 2115 bp, Homo sapiens
cactgtacctaaaaagattattaaagtatgctaaatgatgggacaggagtctgcacagggctctgtgggcccaggggagcacctgctgccgctcactggagcccgtgaccttgcttgctggagtgtggatctgacacagttcttttgtccatacctagcttcagaggctacccgtgtctttggttcactgactataaatacgtctgttttcaaaaggggtacacacggagtggcttctgtaaggctaagtataaaacttttaactccactaaggattgtagatttgtaacatcaactttgcataaacagtgcaaatcataatgataaaaactaacacttacaaaacacttatgtgccaggtactgttggacttcacccgtttgattctcaaagcattcccatgaagttaaaaaacgtatcatccctatatgtagaggaacttgcgacatagaaatgttaaataacttgaggaaaggtacacagctagtacttgtaaaattgagatttgatcccaggcaatctctgagtatacatttgttatttaaaacaaaaatatgggaatgactgttaggcttgtcatgattatctggttaaaatgagaaaagtattacgagtacacatcaaaagggaattatgcttcaaaagtaatgatttttcaataacttaccatgatgtttaggttgaaatccatgatccttcacatagcttaccaggtcttttgtgacctggtcccttcctatatctgtaatcctcaactctctcactactcttgcccttgctttctctattcttgctaagctggactttagcaatccctaaaatgcttgctcaagcactctgtgaccactgcacctactctttactctgcaggagtgttctctttctctctcagctggctaaattatgctcatttccaggtttcagcttaaacctaacttctttagagtggttttcctgaagaccctaaacaagttaagtcctatacaattccatagcatgcagtacttgcctcttctttacactcaatgtttattatttaatgtccctgctgagggcagagaccatgtctacatttttttggttgttatatccacagtgtgtatagcacagtgcttggcccactatagatattttagtaatttttttttttttttttgagatggattctcgctctgtcacccaggctggcgcgatctcagctcactgcaacctccgcctcccgggttcaagcgattcttctgcctcagcctcctgagtagctgggattacaggcacgtgccactacgcctaatttttgtatttttagtagagacgggttttcaccatgttggtcaggctgatctcaaactcctgacctcgtgatccgcccgccttggcctcccaaagtgctgggattacaggcatgagccaccatgcctagcgaatccaggctaaattttaaatgttattaaaactgttaatttatgtaattgtgctgagattcaataatgagattattgaaaatagtgaaaaaaacatggaaaaagacttgctttttacatttcattaatataccttcatattaatttttattctttgatctagtgagttaaacaagaaattaatcctgttacagtagcaacattttgttgacttctaaagacaattatattgagcaaccagaagtaatagcttgtattttatccttcacaggtggaatttttgtgattcacttttacagagacaatctgatgaatattcctatcctgaactagtgaaaatggtttggtacaaaggtgttacatataggtaaggcacctatgttggcttctatgttggagttagagctgtttattgatgtcacagagaagatgggacgagccttatagacagactctcagaagaggacacagttctgttgggccaactgtgctcctgtgtttgatcctgagttttacaggtctcaaaactaatgttattagtgcacacaagggtcctgtgactcactcacattaaccatttttataagacttatgtggtacctccaaagccaatgagggattggtttgctagtgaatgtaacattcatatcagttatttaggatactccttccaagcattggaggatcaagttgt

SEQ ID NO: 115021 - DNA, 3391 bp, Homo sapiens
cttttacaagggagttactctaggactacaggtgtgcactaccacatctggctaatttttaaattttttgtagagcattgtctagctatgttgcacaaactggttctcacactcctggcctcaagtaatcctcccatcttggcctcccattatgccaggattacaggagtgaaccaccgtgcctggccaaaactactctttgaataccaaaatactgttgacgtggctagaatatgaaaagtaattagtattatggattatactgtactgtcatttttaattgattttcaaatcattttacattaaggttacattttatatttcttttcataggagcaactacagcgagccctagattttcgaaactcttcagctacttgcccttttttatctgaaaccatcataccttctgaaagaaaaaaggtgatttttttaacttcatttttgttagtattatttgaggacaagtaactagaaacaggtaatttaatatttagcctttttttccttttcaggacacctggggatacattgctataaaacatcaaagttacatagtgtatcccccttgccattttctttgtatccaagcattataatcagaatttttagattggtgactttttcattctcagaggtctcaaaattaagtaattatgtgaccattttcagtaacagcgtatttgttaatgtatagtagaaatatgtaactatgggtatgacctttattattttgcttatatagtattgtgtttggacttttaggaataataactgtcatttactgagggtttactatgtccaacaactatgaacaatattagaaatatttaataacaccatactgatcaaaatggatgtccatccaatcaaaacaggtatattggctagatggcagcctcttttttttttttttttttctgagacggagtctcacactgtcgccagggctggagtgcagtggcacgatctcggctcactgcaacctccacctcccaggttgacgccattctcctgcctcagcctcccgagtagctggggctacaggcacccgccaccacacccggctaatttcttgcatttttagtagagacggggtttcatcatgttagccagcatggtctcgatctcctgacctcgtgatccgcccgcctcagcctcccaaagtgctgggattacaggcgtgagccaccgcgcccggccggcagcctctttttataggcaaggaaattatgtcttagagagtttacctaatttgtctatggcagttttctcagtggcaaagtcaggatttgaacctagtctatctgactctgtaaactctgtttctcaactactttctgctacctttctatgctgtcaagatgcttgcctgccggctgagtaattttatattgtctcgtggcaaaggagccataaaaaattataagttgtaacttagcctagaatggtaattttccattgtgtcttttgagtcactttattcactgaaactgcctagcttgttgctgatgctgcagcaggattattagatagtctaattctaaaagaggagtttgatgaccatccttacaaaccagctttgctgtcagtaaatacagccctcaattttagtgtcctaacatcgtacatatagatagcatggtaaatttaggaagctttcttgacaatagtttgtgtaaacgtaagattttacataaatggaattgaaatgctaaatgcttggcaaaattaattcagtaaaaacctctcacgcaatatctactgtttatatcttatatgaaaagtcacaatcaacactgttacttgttatgagtcttttattagtcagaatcaatttttctttgagtaattaaacttttttaaagtttcctctaagcctcctgaaatttattttagtgtatggtgtgccaggtactacctaggatgggtactttttacatgttaccttatttggttcatgtgataaccctgcaagacagaatttcccaaatgctgttcagtaattctagtactagtttaaataattttctcttttccctcttgctctgaaaaacttatgttatctcatgtaaattttaagatatgattgagtttgtttttgaattttctgagttgttctgtcaataatttttatggtagtcctgtaccatttaagctatggttgcttttttttttatttaaaacttaaagaaaaatttttagctatgattgcttttaatataatgtatcatagtgttggtcttcccttatttctagttttttttcagagtaaacttttgcagggtgaggggagggatacaaatctgtttaattcattgtacatttaaaaccaaaatacatttaacactaaatatgaccatttctctcattttgtgtctgttttacatctcttttttttaagggtgataatcttaacaatatcaaacattctctggaaaatcatatataggctgagatctggccctccattttttcattctctgtagatagtaaaacacaaatatttaagagctttcttacacaatacttaaatatcaaatatatggaaaaattggactgttaacagaaaatactcaccgtctcttttcccctctccttgcagcatatcttcattgacataacagaagtgagatggcccagtcttgatacagatggtaccatgatatatatggagagtggcattgtgaagataacatctttagatggtcatgcatacctctgcctgcccagatctcagcatgaatttacagtacattttttgtgtaaagttagccagaagtcagactcatctgcagtgttgtcagaaacaaataataaagccccaaaagataaactagttgaaaaaactggcaaaatctgtatacgtggaaatttaccaggacagagactgaagaataaagaaaatgagtttcattgccagatcatgaaatccaaagaaactttaaagaagatgagttgtgtaaatggaactgaagggagggaagagctgccttcgcctggtacaaagcacacatgtgtatacacatgggtcaagcagtgctggtctgtggctgcctgtccagaggaatggaaatatcctttgtctttagcacttcattttcataataaaatcagcaatatgtctaaaattgatgcacatataactcagagtagatttttaacttctgatatttcagaggaaagaggaaaagtggtttctgttcttcccagggccctgtcactcagctgtccagtcccacacctacacaggtaatgcagtaatggctattggtcatgaagctttttatcagaaccagtcttaacctggataattttctttttatctgataccattcacaaggaaagtttatctcatccaaaattttgcttttaactgatagtaaataat

SEQ ID NO: 115022 - DNA, 1157 bp, Homo sapiens
aggcggctgggaggtggaggttgtagctagccgagatcacgccactgcactccagcctgggcaccattgagcactgagtgaatgagactctgtctgcaatcccggcacctcgggaggccgaggctggcagatcactcgcggttaggagctggagaccagcccggccaacacagcgaaaccccgtctccaccaaaaaaatatgaaaaccagtcaggcgtggcagcgcgcgcctgcaatcacaggcactgggcaggctgaggcaggagaatcagacagggaggttgcagtgagccgagatggcagcagtacagtccagcttccgctaggcatcagagggagaccgtagaaagagagggagagggagaccgtggggagagggagagggaggaaacccaactctttaattccccttctgtcactgctgtatggagagcataggtgaagacatagtactttagaggtagagaagaagaaactgaatgcagagaaataaggacaaatccaagataataggagattaagttgctcagtagtaataaagagctgtttctttaatgctagggtagagacaggattccaggtatttggatttcttcttcagggtccttttcccataggcctaatagttactttctgcctgtctttggaatttatattacaaacaatttgctgcattcttaccataaaggtggaatttgcttattatttgaaatttaaaatgagataatgagcatataatttatagaaattaaatttctttaggccgggcgcagtggctcatgtctgtaatgccagcactttgggaggctgaggcaggcagatctcaaggtcaggagttccagaccagcctgaccaatatggtaaaaccccgtctctactaaattacaaaaattagccaggcatggtggcacacacctgtaatcccagctactcaggaggctaaggcagaagaatcacttgaacctgagaggcagaggttacagtgagccgagatcacaccactgcactctagcctggatgacagagcgagactccatctcaaaaaaaaacaaaaaaaacaaaaagaaattagatttcttcttggttatgttcctgcattggagtaaacttctagaagttataagcttctaaataataagcatataatttacaaaaat

SEQ ID NO: 115023 - DNA, 2369 bp, Homo sapiens
cttagtcattacactgtttgttgtgtatgcttgattatttaaaattagaaaaccgcctcagtaaagctattaaaaaaaagacctgaccaaagatagactatttttcccaaattggaatcagaaaatgtcttccatctatgtatcagcacccgttttttcccctaaaataccaagtagacatacccgatatatacgtgtgtgtttatatatatatctgtaatctatattgccatttgataagtacgtaaacaggtgatgtaaagcacttggtatggtgtgacttgtggaaagttacctatgtcatcaatactagagatggattggagagagaagaaattccagacagttgcaggagttggagagtctatggcctgaaaaagagaaagaggtagagagagtcaggttccaaagacagaaaatcaacaggacttgttacaggggcatggagtggaaagtcaagttttagaatattggctgctaacaatgagacaccattaattcaaattgcaaattcaagaggagcagtttacttatttttcatcattcaaatatttattgtgccatttactatttgcctaatactgttttagatgccagagatactgttacatataagacagataaggcccctgcttcggttgactttatatcctagtgggagaaaataaaaagcaagtaaataatcaattttgatgatagattctatgaagaaaaaacttgaagagggatgacaaatgattgggagatgtttgggagtaactttaacttagttggtcgttgggcccttgtaggagttacatttgtgctgaaaccttgatgatgataaagaaccagccttgtgattagccaaggaaaagacaaggcaggcagaaagaactgcaaagatgggaaagagcttgtttaaagaacatttaaaatgccaatgtatctaaagtgccctgtagaagtaggagagagttgagaaatgacattgggagaggtagataggaccagactgtgtggcctttgtaggccatagtttaggagtttggattttaagtagaaatggaaggtactggtgggttttaagccacgaagtgatagatgtgattttcattttaaaagatccctctgggcactactgtatgcagactggatttgagggaagagatgagagtgaaagtgcaattagggggtattacagaagcctgcttttggtaggagtgattaagttccattttagttatgttgagtttgatttatctatgggacagggacatagagagcggtctagcaggcagccacctgaaagctctgtgagaggtcaggtacatttagttctctagagaaagaaaataattaaaagtgtgtgaatctcctcaggagagaccatgtggttaaatatttacttatatcctgacatatcctcagaagattacagatgatatcacctacagctgattacatacattaaagggggtaaggttaaaaaaagacaaggtgggccaggtgcggtggctcacgcctgtaatcccagcactttgggaggccaaaacgggtggatcacgaggtgtggagttccagaccattctggccaacatggtgaaaacctgtctctactaaaaatacaaaaaatgagccaggcgtggtggcacgcacctgtagtcccagctactcaggaggctgaggcaggagaatcacttgaacccgggaggcagaggttgcagtgagcccagattgcgccactctactccagcctggcaacagagcaagactctgtctcaaaaaaaaaaaaaaaaaaaaaaaaaaaaaaaaaaaaaaaaagacaaggtggggcataaaagtgacatcagtgttatgttaagaagggatgaaatgtggactaaggtcaggtcttgaagaatccttgatttaagggaatggtgaagaagaatgattaaactaaaaacaggtagaagtgaagaagaaaactgtggcagcccaatgttaggggagaaaagtaggggaaaagagagtttggtgcaagggaatgtagacaatgctgttacacgttgatgaggtttagtaggatgaagactaaagtcattgggtataagaagacattggcgaccattgcgaaacaatgtcagtaaagagatagaggtgaaagctggattgcagtgaattgaagactgataggagagaaggttggtagtgagtgaatactacacttgagctgtttataggtaggaaatagggataaagtgaaagtgttttctatagaacgttatttttttctggcaggtaaaacttgatcatcttggtagtagaaggggataatgtggaaggggatggggttagtgttggaaaggaataaaaacatttcataagattgcttgagtgcctgcaag

SEQ ID NO: 115024 - DNA, 1004 bp, Homo sapiens
ggatggctttattctatgatgtctgaggcctaggcaaggaaaactaagggctgagggtaatttgaatatctgagagctataatcatctgaattcatggtactgagatgacttttaaagccaagactagattggaatcgttcaccagaaccatctacacttgtccatgtagcttgaacttctcacagcatgttgcctggattctgaagggccatttcaaaagacccagaaagcagctgcatttggaagttacacagcattagttccattatattctcttggtcctaagggagttactaaagccatatcacataggccatcaaggagcatgtggccatattttaaaactgatggcttgagcctggtggtctttggttgaccagactttgcataattgactacaccagtacataatgaaaggaagagttgcccccgtccacaattgttggcctttaggattgtcatgccttaaacagaaacgtgtcagcaagtcttgaggaaagatcattttccaatgagcaaggacacagagctgctagtaaatatagtcttgcgttctggcaaaaaaaaaaaaaaaaccacaaatattggtcttaacctagaagttgtcatcaactctgaccctctgtctttatgttgttaatgctctccagccatagactaccaggaacacactgtacctgaacatgttgagcttactgggttttgtttttttttttgtttgtttgtttgttttttgaggcagagtattgttcttgttgcccaggctggagtgcagtggcgtgatctcagctcacctcaacctctgcctcccgggttcaagcaattctgcctcagcctcccaagtagctgggattacaggcacgcaccaccatgcccggctaattttgtatttttagtagagacggggtttcgccatgttggccaggttggcctcaagctcccaatctcagatgatctgcccacctcggcctcccaaagtgctgggattacaggcgtgagccac

SEQ ID NO: 115025 - DNA, 1025 bp, Homo sapiens
tcttgagccccaagtttatatgtcaagcctttgattaactttcaggttatagaatttaacttatgtctaaaagtatatatattctttactataatttcacacacaagggactcagaatctgtaaaattttacttaccaaattaagcatttggttgtccgaagactgccattaatgtaattctaaagttaggcttgtgttctattataagtcagtctaggaaagttgtattacattatttttttcatgatttagcatcttactttctgagttgaaaaaccttacacttatgaatcatctttgcttttacagatacttggatgatattgatgatgagatggacccagagatagaagaagcttatgaaaagttttgtttggaatcagagcgtaagcgaaaacagtaaagttaaatttcagcatatcagttttataaagcagtttaggtatggtgatttagcagaacacaagagagcaagaaaatgtcacatctataccaaattaaggatgttgagttatgttactaatgtatgcaactttaattttgtttaacactatctgccaaaataaactttattccctataacttaaaatgtgtatatatatataatagtttattatgtacagttaattctactgttttggctgcaataaaatcgattttgaaataaatgaaatgttgaaaattttgctagttggttagatgcttatcctttaaattctacttttcttgaggggaaaaagtcttcttctggaaatacatattactgcaaaaatgtagcatccttttttaggtaggagtattatagctttcattttagtttgacatttagtgtcccaatgaattgaatttcaaatatgaatcataatcttgaaaatctttagcactaaagtcttggaatatatcaacaactgatttacatatgcagatgctatttgataccaagggctttttaaatgtcatgggggggaaaaacccaacttggtgaactcccagctaaacaaccaagacttcactgaagatttat

SEQ ID NO: 115026 - DNA, 1151 bp, Homo sapiens
ccctcctcccagttgtttggtaaagtagtaaatttacagaaaaccacatcctcaccagcacaagattgtaactttttgatgtcttcacatcattctaaaataccagtgtaatggtttgtctaatatagaatgctcttcatagtgaccacttgaaacatttcaaatgaaagtatgattccacatataatgtcttgtcacttaacaacagaggatgggaagaattctcaattaaatgcaactattttaattttatatttcctctaacttttttataatcttaaattttcaggtgattagaatggaggggaaagacgattctagttcactgcatagtcagcaacatatattaatatgggttaatactttacacgaagaattacacatttcattcatacttggtgtgtgacagttaattaaaatccaaatctctgcacatttcctcttccagaagaggaccatttatagaaagattgccttaattgtattagatggaactgtagagtgaggaagagaaatttttccctttggtacaaactgcaaccagcttatggttggaatttttccatttgtttcctctggattccaagcattgactgtcctgtgtctctagcacagagaagtttttttagggcaaggaagtagaattaagttacacgctatgggcatcttaaacttcactaaatgttactaaattgttttctagcatgattatgccacttaatcttcccatcagcagcacatgagggttcctgctcctcatctttggcaatactttttattaaacttaatttttgtccatcagattgtatgaaattctatcttgctgatattttatttccctgacaagtgatattgaagttttcttgttcttgttgacctttttgatttctttctttgagaattgcctgctaatactctttgttcatatttctgttggatcatttgtctgtcttactgatctgtaattccttttgtagtctagaacaaagtgattcttagctgagggttttggttaccttctttctctcagtatttgcctgtctttgcattttgtttataatgtcatgtagaacctttgagttttaatgtgaacaaaatttatcagtcttgtttgtaatttctgtggtttaagaaagtttccttaccatttc

SEQ ID NO: 115027 - DNA, 1040 bp, Homo sapiens
ccagagtatagccccatcagcagaatgagtacatctcttcctacatccttatagtgatggatataatcaatcttggtttttgttttgtcagatgattttaagcatttcttcatgtttattagccatttgtttattatttcctataaattacctgtttaaatccttaactgatttatttcctgatgaaatgcatgtttgtgttttttttttttattcaaagcttctatacttgttgcttgctgtatatttcaaaaaaagtgacatgttcattaaaatctaatagcctatcttagtcatacagggaatataacagtcgttgacataaaacccatgattaaagttctgctattgttttttttgttttagtttctctcagtcaagagaaatatagagggcgtagagatcactgaatattagatggtagacagaataattaggaatattaaacttgctaaattcatcttgtttagagaatgcttgaactgttactggtatctttttagaatttctataatacactattgaatttcttattttactgacacctgcttttttagttgacaggatcagttttggaagatgcttggaaggaaaaaggaaagatggatatggaagaaattattcagagaattgaaaacgttgtcctagatgcaaactgcagtaggtaggaaaagaagtaatgtaaatagccagtgcatctcaatttcttgctttttctttggagattgttttttaatttgctatacttcagcagggtaagttgatggctaacggatatacaaaaatgcttttctttaaaggaataatattttacctatagtttctgctcactagacatttttgtgatagacgtgtcagatatttttgctcaattacatttagaaattgaaaaagctaattttcttaagatatgaattaaatgaaaaacaaaatccaaatattaactgtccaacaaataaaagtactactgtaagtatagtaggacacataaaaatgtttgaaggatagccactgcctttaaggtccatatagtcatagtt

SEQ ID NO: 115028 - DNA, 1904 bp, Homo sapiens
catcaactcttaccgacaaagttgtaacagaaaagcagccaacaggtgtttttaaataactgatttggcattaattaactgatctcttccattattaaccagaatgtactatctataaatatcccaacttttttctgatgaggaatttaatatgtacaagatgataacaaatatcttaccacatttgacttaaacagaagatgttgctcagttaatatacctcgtaaacattggaattggccacgtaagcacagtaagctgtgctggggtttcgtggttggcaaactgacccagagtcaattactgaacaagaggtaatttattttttctttgttaaaaattgtttacaaagtcaacctaaactggctgcgtggaaaccattcagtacccatagcttttccctttgtcttgaaaaggaaaactgtcaaaaccagttttgtgaagcaagttactttcccagagttttctcaccttatcaataaagattacaaatacttaataacaaaatgataaacttttacagtccatttaaaaaatctatgttagtaacaatatctgacactgtagttcacttatgaaggcagtgacaggattattgtgcctagtttagttaccttgtaggaactatgactgacaataagctccaagaagaggatttcttctttttctcctctgtgtgaagcaaatgggtcaagtcaggggcaaagagagcaaggaaaaatcagttatttgaagctgtcagtctcattggaaatagaaaacaagtccggtgctttctatattgtggttttaatgggggaattttttcctcacattagtacttctctgatacgtataatggaaattacaagaataatggacttaaaaacaattcattttattttcagttggaggttgtgtgtgtgtgtgtgtgtgtgtgtgtgtgtgtgtatttaaagatccttttcaaagttgtagtattaaaaaaaaaattacagagacaatttgggtaaaatcagtgctttcttagtaaaaaacctataagacaaggtgaggctctctctcccctctttgggctgccagtatgctgtgaatcagattacacctatgttgcttaaacatattaaatttgataaaaatcgttgaaaataaaactatcagttttttcaaactgggagacttagtatgaaaagatggtgtatattctagcctcttcaatagtcaggaacagtttctttattgtagaaagagcattgggacattgtccttgcctcttgctgtggacaaccaaactgacaaatggttattttgtttgactatttaaaaagcaaagcaatgtgagattataaaagatatgtctttaattagatgtcggactgaatatgaagttaaagatcaagctgcaaaaggggatgaagttactcgaaaacgatttcatgcatttgtactctttctgggagaactttatcttaacctggaggtgagaagtttttcttttgttaagtactaacaaggcctgagaacataagttgatctcaatgaggaatttgtgttcacattgtacttttacaacattaagagtgaaatgaaagagagaggaaagaaaacatgtttcggcacctgctagtgtctgtggtttactggaccgtctgtccataacatttactcatggacagaatgttaggaaataattactgaggtaaaaatctgcgtacttttaggaagctgtggtttacatgcaaatttaagttcttgagatatcaacagtgatacctttttgagttcttacatcttatatattaatacatttagtatgttgactttcagatggtggctcaaagcagtttactctgcagaactctgagtgaaaagagagactagagtctctctaggcttttcactctaattcacccaaatagtttttt

SEQ ID NO: 115029 - DNA, 1087 bp, Homo sapiens
gccccatgtgagcaaggaaataattagaaataaaagttagtaagtagacccaacatatagagtcagaggggtagcaggacatttgttagatctagattctatgttcaattacatttgtggccaagtcccttagctttttttttttttttttttttttttttaaaaagatgggggctttgttttgtcacccagactagagtgcagtggcgtgaccacagctcactgcagccttgaactcctacactcaagtgatccttccacctcagcctccagagtagctgggactacggtgcatgctaccgtgcccagctaattttaaaatttttttatagagatggtggtcacactgtgttgactaggctggtcttgaactcatggcctcaagcgatcctctggccttggccttccagagtactaggaatacaggcatgagccactgtgcccgacttcttaaccttttaatgtgtgttttcttacctaatattagatggtaaactatgttctctactattctttagaaattgcaattaaagttaaacttgctgaacactgcttcagttatatcaacaatctttgatgtgtagtgttttcttacttttttttttttctgtttttaagtagcttagctgttttcatttcccctttacccaatcattcttggagtgtttaagtgttagttgcttgtgccagttaccattaatcacctctttaaagtctaactgaagctcagggaggtttactgatgtccaaagtcatgaagcaaaatgccagggaatcttgtcctggactgccaaacactaaaaagtctgtgctttcctgccccaagaagccccactggtcaacagtttggcagtattctcattcataattgtcactgtgcagttgaggacatgtacaggttttctgcaaaaaatgggttagcatcaggagacattatctcttcgctttctggtagcctcaggtaactgatgggttttttctttttttttttttttttgtacttattgtggttcttgctgtaaggttgggagggaaagtgaatttaatttccttaagcctaacaatgacaaaagacttgtatatatgg

SEQ ID NO: 115030 - DNA, 1055 bp, Homo sapiens
gaacagtttgcagagaccctgaatggttgtgttacaacagatgatgctttgcaagaacttgtggaactcatctatcaacaggtatgttggcttatagcatgcagtgaccttcagatagcttccttgaagcccaaggatagtggctactccttgagggagaccagattcatgatcacctgcctccacacttactctttatagtttccgggagttctaagtctgtcttgtataaaactcctatagttagggatccaagggtagagccagacaggattgcaagttcacatgtgtagtcaagattcaatataggtaatattcacctgtttagccaaagctctatacaagcagtatagtatagaaggtgatatgggcactgaaaacgaaggctacataagtgtcacccccaccaaaaccctgccccttgttttgcaggctctgaaattagcagtaccagaaaagactgcaattcttttcccctatgtgttgaattgaatagtagtattagagtaggggaggaaaaaaattgagagaatttgcttgcctcataagtaggtctttaaaaaaaagaaagccaaaccataaaatgtcttgtcttagcatttctacttgcctttgctttcttttaaaatttaaggatttcatcttaattccttgaaagtctaatttagtcagttgaaattgtttcattatacaacatttagtttttatcccagcatattggtcattaacatattaacgctttttttttttttttttttttttttttgatatggagtcttgccctgtctcccaggctggagtgcagtggcgcagtctcagctccctgcgacctccgtctcccgggttcaagcgattctcctgcgtcagtctcccaggtagctgagattacaggtgtgcaccaccatgcccagctaatttttgtatttttgatagagacagggttccaccgtgttgaccgggctggtctcgaactcctgaccgcaagtgatctgcttgccttggtctcccaaaatgctgggattttacagacatgagccgctgcacctggcctcatt

SEQ ID NO: 115031 - DNA, 1040 bp, Homo sapiens
gcttatttcattcatttgtaatctacctgaattctacaggcattcaggcttactacccctgttctggtatattctctagccttactggtttaccctaatctttacccatagttaaggctaagagagtttttctcaatccaattagtcatagaacagcaggatccttttttcccccgactcttaggataagctcttgttgcaaaggaaacatttccttttagtagccataatccaaagttagctacattcactcattcaacaaatagtcaagtacttatcatgagtcaagcaccggtgatacagcaacaaacaaaatggacagaaattcctgtcttcatggagtctctattctagtagtctcctggctcagtttgcagacatttattgaatctgcttttgttctacacatgaaaatctatttcctggtatcctttttctaacagcctttatggtagtcttctgctgtgctttcttaactctttcaaggcaccaagcccttttatcttcagttcttcctctaatcctgctgctagaatttcctactttccatgtcttcttaccagtgagttgctatatccatttatccctggccattatttcttctcagacaaaccattatgccttgaatatttgtcacagttcacttaccagagccaaaaatttaacataggaattcataaagcattgatgaagagacagaagtccccttcctcccctgcaaaaaaacgagctttttttctaagagaatccctcttcaagttacttcccagtttttgttctgccttgcagtagtatcattctccaataggtaaaattattcactgtctctcactgttcagacctctgcagtctgatctccctaattgtattgatactatttttgtgactgatgttcttccgatttttaaatttatcttcctaaatctcattttaaaactttgagcactgtaggatctattcagtttataaatccccatgtgccaggtcctgtgctaggtgcaaaggtacctttttagtctatcagaagctccctcccattg

SEQ ID NO: 115032 - DNA, 2224 bp, Homo sapiens
tttgtaggctgtctgtacacattccggcgataaccataaatttcatgatggttcctgtttaactcttaaaaacagacgcttttcagatggtttttcagtatatagcaagttgctgtacaaaggaaagaatgcatctgacgccccgtttttttttcttttgcagagcaaacgaggcccctgagagctccacctagttcacaggataaaatcccacagcagaactcggagtcagcaatggctaagccccaggtggttgtagctcctgtattaatgtctaagctgtctgtgaatgcccctgaattttacccttcaggttattcttccagttacacagtaagtacaccctttttcctacaactctgggttaatttactggaataatgtggttgttactttgttaatcagagtatgtttgtgctttctgtactacacgtaaaaaaatttttttattgtgaatgttttgaattattgaactcagaaggaaacaaagctgattcagaaatacattttgtagttatattcaaggtattagaatgtaagcttgagatacacatctgtgttcttgtttctagtgattattccattatgttaaaatagacatagttttgatcctaattattgtatgcagaaatgtcctacggggttgtgataaagtatttacataggtataaagaatgtttaaactttcagtttttctttgtcacttatataacaactttaaaaaatagtcacttttcttaaatagccgtacaaagcacagttggaatatgtagaaaggaatttgttgtactggataaacccagatgagtaaatgcatagggattaattatagagaagtgggagggaatcattggagaaatgattgatgatactttagcttaaatcctgtctttcctatcttcttagttttattgaagtatagcagagaatagtgtacttaagtgttagctcagtctcataaagtgaacactcaactaaccagcatcccagtcaggaaatagaacattatcaacatcccgaaaacccactctgtctccttccagttgttcttgatgtccaagtatagcactgttttgacttcataggatagttttgcctgtgttcaaagtttatataaataaagtcatatagaatatattctttctcactttcaatatcaagattactccatattgtagcatataattggaggtgacttatttttataacattccattgcatgaatatatcccatttgtctgttgatgaacgttggtagctttcactcttgggttattatgaatagggcacattttgtgtcttgctggctgtatgcctttatttctttttggtatattaccaaggtatggagttgctgggacttagggtagccagctttagcagagactgccaagtagttttccagagattgttccactgtacattctgagtagtgtatgatttccagttactctgcttcctggtcggcacttggtattttctgtttaaccattctggtgggcatatagtatctagttgtggttttaatttatatttcccttataactgataatgacacaccttttttattacctctttttggctctccttccatatttgacagtaaaagtatggaaaaagctgtgttccatgttttagatactccatgattcttatgctgtataggaaaaagctttgggattggaaagaaaaagatacaggcatagcaggaaaagcaattgatatggggtgaaaaaggccatctatcgtgtaaggtagaaatgagagcatcttgagttcttgccagaaaattgtatttagctcacagaggaaaagaaccattagagccactgtaagaggttgaataaactcttaaggatgcttgttctagcagctacaagcaggttcccatttattttcttccctattgacttgggctgttttatgatggagggatacaggggtgtgtttgtgtatgtaataatcgtgtatcaactatttttacgtggttcaagtgactttggggctgtcgagcagtatataaagtcatgttagtccacctactttgagccactgcatcttttaggcattccttgccatcctctaatagatcagcacctcctgtgctcaatttaccaaaacagattgcagcctggcacctggaaacctgtgtggcctgcaggtgtcttctctagccctgaatgggtttgttttttctttaagttgttttatttaattaaccaat

SEQ ID NO: 115033 - DNA, 1599 bp, Homo sapiens
agccgggaaaattttacttttttttttttttttttagacagagtctcgctctgtcaccagactggagtgcagtggcttgatctcggctcactgcaacctccgcctcccaggttcaagcgattctcctggctcagtctcccaagtagctggaattacaggcacccactaccatgcccagctaatttttgtatttttagtagagacggggtttcaccatgttggtcaggatggtctcgatctcctgacctcgtgattcgcccgcctcggcctcccaaagtgatgggattacaggcgtgagccaccgcgtccggtcattttattagtctttaaaaaaaaaaaggaacctgaacttttctaacacagctggaacaattcacagcagccgcggcagccgcagcagcagaagaaaaggtttaatttagttgattttctgtggttgttgattgttcgccagtctcatggtgatggaagctgtacatttttccgaagggaccgagaagcggctggaggtttggttctcctggcagcagcccaatgcaaaccaaggatctggggatcttcgcactatcccaagatctgagtgggactttttttttttttttttttttgagacggagtctcgctgtgtcgcccaggctggagtgcagtggcacgatctcggctcactgcaacctcggtctcccaagctcacgccattctcctgcctcagcctcatgagtagctgggactacaggcgcccgccaccacgcccggctcatttttcgtatttttagtagagacggggtttcaccgtgttagccaggatggtctcgatctcctgacctcgtgatctgcctgcctcagcctcccaaagtgctgggattacaggcgtgagccaccgcgcccggccaagtgggacatacttttgaaggatgtgcaacgttcaatgataagtgtgacaaaaactgacaaccaggaagcttgtgtactcagtgagagtagcatgtttgtctccaagaaacgtttcattttgaagacacgtggtaccactctcttactgaaagcgctggttcccctgttgaagcttgctaggcattacagtgggtttgactcaattcaaagcttcttttattcttgtgagaatttcatgaagccttccccctaagggtacctacactagaatttccaggaagaaatagagtttcttaatgcaattttcccaaatggagcagcatattgtatgggaagtatgaattctgactgttggtacttacgtactctggatttcccagaaaggtaatcagtcagccagatcaaaccctggaaaatttgatgagtgggcttgacccagcagttatggaccagttctacatgaaagatggcgttactgcaaaggatgtcatttgtgagagtggaattcacaacctgataccaggttctgtcattaatgccacaatgttcaatccttatgggtattcgatgaatggaatgaaatcagatggaacttattggactattcacatcactccagaaccagaatctttttatgttagctttgaaacaaacttaagccacctcctatgatgacctgatcaggaaagctatggaaggcttcaagcc

SEQ ID NO: 115034 - DNA, 1052 bp, Homo sapiens
ggtgttcatgaagctgaccttttaaagacatcaggaacgctgattagttttatttacccagcccaaaatccagagttgctaaataaactttcccaaagaaaaactacagttctggcaatggaccaggttccaagagtcacaattgctcagggatatgatgcgctaagctccatggccaacattgcggggtaggttcttttccatttcaattgaacaaaagcgcaatagtgctacagaaaccttcacactgtagctcttctgtcttacagtgattttatttgtaattattgttggagattacagccttttgagagtgcatttaaattatttttgactcattttattgttttacagtaattagataggaaatgaactctatttatattcctttttaatcttaatgagtagaagagtagtaatgtttccattcaccaaagcaaatagctgtcagattatttgtatgaggaacacactgtatttcataaatgtgtgtgtacatgtatatgtaaggttgaagttactgtttttataggtcaaaaatggtagaatagtgacaatttcatgtggttaaattaatatgcatatattagtggatttgctgtcttaattaggttttgcttaggtaaatttataaaatatttaaagaataggaaaaaggtctggactagaggaagtttcatctgatgtcaaaacccatattgataactgagggctatgtcttcgacctttaaggtcaagatggtaataagcttcatttgcccaatagcactaatacattctatgttgattgcctggagtactatgttgagaaggattctaaggcccattctgcttggaggaatgtggctatgattgagtaatcatgcctgccatgggtgagggacaggaatagctacatgaaagcagtgtactgctgactttgccttaaagggtgggaacaatctggaaatgggataaggcttatgaatcaacttctctaagaaactaattaaattagattttaatcatgaaaactattagtagttgagaatttgctaatattaatgaggcac

SEQ ID NO: 115035 - DNA, 1096 bp, Homo sapiens
caatatttggactatatagtaaagtaagtgtgaaggatgtatagtcctagtacccaaagaaaaccattgttagtattttcctatctttctttcattacattttctattatgttctacagtacttgttatgaagagggtgggtgcataatggataagagagtgcctctgtaggcagactgcctgtgttagacttctggctctaccatttactagctgagtgaccttaggcaagtctctcagtctgtatctcagttttctcacctatgggatgaagacagtaattgtacctttccataggcttgttgtgcaaattaaaggagcaagtgtatatacaacacttagaactgtttttgacacatagtacatactacataaatattagctattattctttgacaaaacttcattgatgacttatgatgatatgtgagtctgagatctctccttttatggaattatttatttatttatttatttatttttaaagttataaggctgttgtcctagcagcaaatcattttggacgtttttttactggtcagatcacagctgctggaaaagttcctccagctaaggtaggtacaacttttaatgtttctttataatatgcattgattaaaggaaagggtatgtatagtcttaaaatacagttatttaaaaatttttatatgttaacctcactgatgactttttggtgtgtataaatatttcacgaaacctcaaagcttaacgtttaagattgctagaaaaaaatgaactttgactttctgaaagttctagtcttttctgttttttgactttactaatttgaatttttaaaagaattttggataacttgttctctgtagcctatatattattaatttttaaaaaaaactttcaagataccattcagcagattctgggtttctcaatttttgcaacattttggcacatatacaaggtatttttggtttcttcacttcttgtcaatttttggatcaagaagacaggaaatgggaggtggtgtaatcagagtatttggcagagagaaatggtgccagtttctttaatccacactgaaagcagagaggagcagttaacgatgagaggtgac

SEQ ID NO: 115036 - DNA, 1062 bp, Homo sapiens
aggatctgtaaaatacacccctcaaaggatgtggacttctgtggtaattttccatgtctctggagaattgggtgggaggtgttttcctccaatatgcaagttccttacatatatgaacctgagatgttgctttgttctccatctgtcttgttaaatttatctttcatatggagtggaaatatagcgcaaaagaatgactttccatagtaattgttgaaacctgtgctttcgggcaagagagtgattgatacaagaataactatactctctagttgtgtaattccacaaagaaatattgtttttgatgactaaagtttttcccaaaagtaaggatttattattcattttcttattctgtatgcattatgatcataaaggacaaaactatatgctatagatcagttattcccaattcttttatattactttttttgttatctgattcatgttcggtaattccttcccttcaatgtattttatgattatatagacttttgtaatattgttatataaagtttcatttgttttgaggatattgaagacattttgaagaacagagagaaacttaagtgttgcaacatcaagggttggtaaccacaggctgtctacacacctcttcgtagctttcaatgcagatagagcaacttgtcctcaagtggaagatgccaaaactgtgaagttttccattgctatttatcagtcttgttcttagggtgtatttgagcacactttgtgagtgactgggccagatttaacaaatgttctgttaggaaaatttatggcatcgttatactttggtttggtttgttatttctccaaaagcatgttgcaatattggtatgcattatgcttccttcctggctttccctgggttgtaaaggattgggagactgaggctgtctttggcaaagcagcacaaatagcgttactgctaatgtactagtacttccctaccatatgcattgctgtatctccttccttccattttccttatagtttcttgtgcttcagtattagttagggtggtctagccctaaatctatgagttttgctataacagat

SEQ ID NO: 115037 - DNA, 1179 bp, Homo sapiens
ttcagattaagattttaactctatcatgttatcaaatgagttttctgtaaataaaatctactgatttgacatgtgagtagtttactagttagttatgtactgaagtaaaaataggagacattagctgaattgagtgttaaagtgtaagccttctcaacttgggacaatatcactttttaggggcatttgaaataggtggatttgggtttttggttgtccaaagatgggaatgctactgtcaattagtggatggaagcagataaatgaaatgtactgtaacgtgtgggacactgctgcataatgaatcatcacacccaaagtagcattggtcttacctattgagcaatgctgttctggagtgtaaaggtgtaaagatgtagaggacacaatctatttcctctaggcactttccatctagtgattaagtcagataggtagatcagtaatgcaaggtgggttatgataagggctaaactgaactatgtagacagtttttcaatcacaagaaacctatgaaggtttgtagggaggcgacgatttgtttttaggacttagagaatagatggtgttgggatgggagaagccaacgggaatagcttgagcagagacttggcatttgaaaaaatggggatagaaaagtggggacagatgtgagattcattgtgcaggtagaatggacagaaaggagggtgaagatgactgaagttcttggttatacctgtaataacatcagaaatatggaaacagtttttagagtgtggggtggggggaaattttgagttctttttttgagacattaaatttgaggtgaagatgggacaagagccatgttatactggcgctcaaatgacaggtcaagcctgcagacagattgggaatcatcagatggttgttgaagccatgagaggagctgagattttcaaggagaatgtgaggggcaaagttaaagccctttggaaacttatataagcggagaaaagaaggagaaaaactattcaaggaactagagaaagaataataacaaagttaggctgggacaggggaccgcagtgtcgtcaaagccaagtatgaagagagtttaaaaacatgagagagagagagagagagagagagagacagagacagagaaagagacaagagagggaacacccaagggtgtgtgcagtgtcgggggtgggg

SEQ ID NO: 115038 - DNA, 1040 bp, Homo sapiens
cctccgcctcctaggtttaagcgattctcccacctcagcctcccaagtagctgggattacaggcatgcgccaccacgcctgactaatttttgtatttttagtggaaatgggatttcatcatgttggccaggctggtctcaaactcctgacctcaggtgatctgcccaccttggcttcccagagtgctgggattacaggcgtgagccaccacactcaggcaggattttcctgtttttcatggataagtatgattcagataaacaaagtccagccttcttggatttgttatgtttttgggtggaggaagagtcaaggcttgcaaattggtaaagcaataaagtcatgtatttctgacgagaatagaaactaggccagttaaaattatcttgtatagtatttgagtaacgaaatagacattatttagcagtttcatgtcagctttgtaatacttttataaaataaagataccactattcatatccataaccattcattgaacaaataattataatatatactactctttcctaagctactgttgtaggtccaggggatacctcagtgaagacaacagctgaaaattcctggtcttatggaatttacattagttaattaattgattaattaataggcttcaagataatctgacttggagattataagcccatttgtctcccaatttcaatgctacttgaaacaccagagaacagctgtaacataggttattgtatcagagtttcaaagttatagctgccactatttggccttgaattagccagcgcttttggttttctcaaagaatgtggtgtgtttctttgcactttgcattggggctgccttctcgaaaaacatggtggcaggatagtgggtatgggttattcgtgtaactggtcaaatgagtgaaactttgatggaagagaggaaaaccaaagaaagtatgtgcattcactcacatctatgttcaacctattgtgtggagttgctagtaatctcccagatcaaaggtgtctgttatgctcctagaaagtggccaccttcat

SEQ ID NO: 115039 - DNA, 1064 bp, Homo sapiens
gaaacttctgttgttgtgtcccctttaaaacatgtggtatctgaaatctaatgtgaagttgtgaaaaactctaaagaatgaggttcatgtcaccatatattataaaagaggcttttaaaaaatagtactttttgaattgcttcttcttcatattttaccaagtatactcagtattcgtgaatagttcttgtatacacttatattagtttttattcttccttggttaatttaaaaggttctgaagatcaggttgtttcatttgagtagattattctactttttttgaactgtgcctgggtctattcttaattgatgactgaagcctgagcttttttattatctaatgttccatgaaaggctctattgttttcatatttgagagaggaaaataacaaatactgttgaattttttttttttttgcttcaagatattgaagagattatcctaatttgatgacatttgttgtatctgtcaaccaaggaaacaacatttttgcctaatcatatctgttaaatggttaaaaatggccttttgaaatttgactgtatcaaaataaatgtgtatttgaatgttagttttgttcaagtttccagggagcccaacgtttataattattggcctcaatctagattgactatacagttttttagtatttttgatgtagctgcaaatacaaataatttctggcttttattggactttattgatttttactggcattacaagataaaaattagaaaagcaacccagtaagtgttgacattaaatcaacatttgttttaatgtgaaaatgtatgcttctttgtattaagtgattattaaaaatatgcatttatttgaaaaacagatgaacatttatattattatacaaaaatgtatttgaacaggataattgctgtgtacatttattgaacaattgtgtctgccaggtgttggcctaaagcactttgtatgaaaagctttttatacaaactacatcacttaaatccctcagtagtcctctgaggagattttattatcaatcccatggtacacatgaaagaatggaggtacacagaagtaa

SEQ ID NO: 115040 - DNA, 1337 bp, Homo sapiens
gaaaacatgtgacgcgctccaggcgaaagttagagaatcctatcagaagtaaatattaaggatcaagctgttagctaataatgccacctctgcagttttgggaacaggcaaataaagtatcagtatacatggtgatgtacatctgtagcaaagctcttggagaaaatgaagactgaagaaagcaaagcaaaaactgtatagagagatttttcaaaagcagtaatccctcaattttaaaaaaggattgaaaattctaaatgtctttctgtgcatattttttgtgttaggaatcaaaagtattttataaaaggagaaagaacagcctcattttagatgtagtcctgttggattttttatgcctcctcagtaaccagaaatgttttaaaaaactaagtgtttaggatttcaagacaacattatacatggctctgaaatatctgacacaatgtaaacattgcaggcacctgcattttatgttttttttttcaacaaatgtgactaatttgaaacttttatgaacttctgagctgtccccttgcaattcaaccgcagtttgaattaatcatatcaaatcagttttaattttttaaattgtacttcagagtctatatttcaagggcacattttctcactactattttaatacattaaaggactaaataatctttcagagatgctggaaacaaatcatttgctttatatgtttcattagaataccaatgaaacatacaacttgaaaattagtaatagtatttttgaagatcccatttctaattggagatctctttaatttcgatcaacttataatgtgtagtactatattaagtgcacttgagtggaattcaacatttgactaataaaatgagttcatcatgttggcaagtgatgtggcaattatctctggtgacaaaagagtaaaatcaaatatttctgcctgttacaaatatcaaggaagacctgctactatgaaatagatgacattaatctgtcttcactgtttataatacggatggattttttttcaaatcagtgtgtgttttgaggtcttatgtaattgatgacatttgagagaaatggtggctttttttagctacctctttgttcatttaagcaccagtaaagatcatgtctttttatagaagtgtagattttctttgtgactttgctatcgtgcctaaagctctaaatataggtgaatgtgtgatgaatactcagattatttgtctctctatataattagtttggtactaagtttctcaaaaaattattaacacatgaaagacaatctctaaaccagaaaaagaagtagtacaaattttgttactgtaatgctcgcg

SEQ ID NO: 115041 - DNA, 1028 bp, Homo sapiens
tacctaacatatatgtttagtcatctgttttccattgaggaagttaccttcactgccaagttgactgaaacttagatattttttatttcttagaagatatattggatgaaagttcaaaagtttatgtaaatagaacccattagcaggaagagtgaggcttctgatggtttttttttttttttttaaagatacagggtgtcattctcacctaggggatggagtgcagcagcacaatcatacctcactgcagccttgaactcctgggcttaagcaatcttcctgccacagcctctcaagtagccaggactacaggcatgcatcaccacgcctggctaattgtttacttttttgtagatacgggttctcgctatgttgcccatcatggttctgactcattttattcttactcttcttttttcttccttttctttttccagtagatgcccagaatgtaagggattttggttgtgattcattatctctcaggtgctatgtctaagataaaaggtcagtttttgtttctattctacacagattcctcccaataacattagctgagcaaggcaagagcaactagtctttaaacattgatgtcatgggacagtgaatgtttaaaccaagcaaaacttctctccctcacatctgtgttcctccttgttattctcttcttccttaataactcttgcaaaagccagattgtgtatcttctcacacttgactctgaaaagatatctacactcttgttttgttgacatctaatggagaattccattatataagaaagaaccatctggatcatgagaacatggcctataccacactcactctatcagtttatcatagttagcatgatagataccaaaggaggttatagcagctccttccttagagatatttaactttgttatcattaggaaccatctgacttgggttcagaagatggaactatatgacatctggaggctttttcaatgctgttaactctatttcccagatgttggtgttgtggtttgcagatactgcaatca

SEQ ID NO: 115042 - DNA, 1035 bp, Homo sapiens
accactcctatttaacatcatactggggatcctaaccaatgcaataaggcaagtaaattaatagttatataaataaatgctataaatattggagagaaaggaataaaactctgttcaatgatgacatttctcattgtctctgaggtatctacaaaaaagataagaattaaaaagtgagtttagcaagatcacagaatacaaggtcaaaatataaaaattaatcatattggtatatactacttaagaataatttaaaattgaactgaaaacctgaaaaggagtataactcatggctagctactcattaattcaattaacaagtttttcctgtgcagtttgtgattaaaacacttagtcaggacttgacttggattttcagatcacttcaaataaaataatttgtttattgggttagacttctcatgggtcaacgttctcctagtctcattctaagtatttgatgatgcaatcacaactcagcagttgttatatttaatacagattgacaagagcctttatttccaaaaattggtctgaaataactgtgatcaagttaaaataatctgataaataaaacagaaaatgcatctgatctgcatcatggcatctcatcactcaagagcatatgcttaataagttacaaaaagaagagagaaaaagaaagatgtcctgaatagggtggtcaaagatgacagttaaaaagacctccagatctctttggaatccaacatatcactatagatttcataaaacaataattgtctttctgaattgcttacacggtaaacgaattattaaataataacttgaaagtgaagcacagatgtgatctggctgtggttcacctattgtttacttttaatggaaatgttttttcttcaaatcactgacttgaaacatggtggatttctatctgtaatatagacttctttcagtctatgttttacaagttacattatacactatgccatttccacattcatagactaccaaagtgcttcttccaagttgccttgatgatagatgtaccttata

SEQ ID NO: 115043 - DNA, 3240 bp, Homo sapiens
ggctttcaaaaagtggctatgatgatcaattaaaatgtatcatgtgctttcaaacagaatgtgttttgtggttctgagatttacttttctattgttgacattatgtattaagtgcacaacttaggtacaaatggcaactacaaacagaatccttggactggagttctctggatggcttgtatcaaatgaaatcaagtacaatcaccataggaataaaagattctgtttttcctttgcagaaagaatttaacaatgactgtaagctgaaggagaggatagaggaaaatggatacaatacctatgcatcatttaactggcagcataatgggaggcaaatgtatgtggcattgaatggaaaaggagctccaaggagaggacagaaaacacgaaggaaaaacacctctgctcactttcttccaatggtggtacactcatagaggaaggcaacgtttgtggatgcagtagaaccaatggctcttttgccaagaatagtggatattcttcatgaagacagtagattgaaaggcaaagacacgttgcagatgtctgcttgcttaaaagaaagccagcctttgaaggtttttgtattcactgctgacatatgatgttcttttaattagttctgtgtcatgtcttataatcaagatataggcagatcgaatgggatagaagttattcccaagtgaaaaacattgtggctgggttttttgttgttgttgtcaagtttttgtttttaaacctctgagatagaacttaaaggacatagaacaatctgttgaaagaacgatcttcgggaaagttatttatggaatacgaactcatatcaaagacttcattgctcattcaagcctaatgaatcaatgaacagtaatacatgcaagcatttactggaaagcacttgggtcatatcatatgcacaaccaaaggagttctggatgtggtctcatggaataattgaatagaatttaaaaatataaacatgttagtgtgaaactgttctaacaatacaaatagtatggtatgcttgtgcattctgccttcatccctttctatttctttctaagttatttatttaataggatgttaaatatcttttggggttttaaagagtatctcagcagctgtcttctgatttatcttttctttttattcagcacaccacatgcatgttcacgacaaagtgtttttaaaacttggcgaacacttcaaaaataggagttgggattagggaagcagtatgagtgcccgtgtgctatcagttgacttaatttgcacttctgcagtaataaccatcaacaataaatatggcaatgctgtgccatggcttgagtgagagatgtctgctatcatttgaaaacatatattactctcgaggcttcctgtctcaagaaatagaccagaaggccaaattcttctctttcaatacatcagtttgcctccaagaatatactaaaaaaaggaaaattaattgctaaatacatttaaatagcctagcctcattatttactcatgatttcttgccaaatgtcatggcggtaaagaggctgtccacatctctaaaaaccctctgtaaattccacataatgcatctttcccaaaggaactatcaaagaatttggtatgaagcgcaactctcccaggggcttaaactgagcaaatcaaatatatactggtatatgtgtaaccatatacaaaaacctgttctagctgtatgatctagtctttacaaaaccaaataaaacttgttttctgtaaatttaaagagctttacaaagttccataatgtaaccatatcaaaattcattttgttagagcaggtatagaaaagagtacataagagtttaccaatcatcatcacattgtattccactaaataaatacataagccttatttgcagtgtctgtagtgattttaaaaatgtagaaaaatactatttgttctaaatacttttaagcaataactataatagtatattgatgctgcagttttatcttcatatttcttgttttgaaaaagcattttattgtttggacacagtattttggtacaaaaaaaaagactcactaaatgtgtcttactaaagtttaacctttggaaatgctggcgttctgtgattctccaacaaacttatttgtgtcaatacttaaccagcacttccagttaatctgttatttttaaaaattgctttattaagaaattttttgtataatcccataaaaggtcatatttttcccattcttcaaaaaaactgtatttcagaagaaacacatttgaggcactgtcttttggcttatagtttaaattgcatttcatcatactttgcttccaacttgctttttggcaaatgagattataaaaatgtttaatttttgtggttggaatctggatgttaaaatttaattggtaactcagtctgtgagctataatgtaatgcattcctatcaaaactaggtatctttttttcctttattttaaaataataattgcacctgacacataaacatagaccacccacaaccaaaattaaatgtttggtaagacaaatacacattggatgaccacagtaacagcaaacagggcacaaactggattcttatttcacatagacatttagattactaaagagactatgtgtaaacagtcatcattatagtactcaagacactaaaacagcttctagcaaaatatattaaagcttgcagaggccaaaaatagaaaacatctccctgtctctcccacatttccctcacagaaagacaaaaaacctgcctggtgcagtagctcacacctgtaatcccagcagtttgggagactgtgggaagatggcttgagtccaggagttctagacaggcctgagaaacctagtgagacatccttctcttaaacaaaacaaaacaaaacaaatgtagccatgcgtggtggcatatacctgtggtcccaactactcaggaggctgaaacggaaggatctcttgggcccaggagtttgaggctgcagtgagctataatcttgccattgcactccagcctgggtgaaaaagagccagaaagaaaggaaagagagaaaagagaaaagaaagagagaaaagacagaaagacaggaaggaaggaaggaaggaaggaaggaaggaaggaaggaaggaaggaagcaaggaaagaaggaaggaaggaaagaagggagggaaggaaggagagagaaagaaagattgtttggtaaggagtaatgacattctcttgcat

SEQ ID NO: 115044 - DNA, 1038 bp, Homo sapiens
tgcttgtttgtttaccaatgttttgtgccttttgtttttagaaccacacaaaaaacaactcaatagtttcttttgattttacttttcttccaaatatatttaggattctttatttagccttttaaaattgtatgttttaggcatcctggagataacatcagtagaaatcggagttgttgccgtcaaagccattaacagcaactattacttagccatgaacaagaaggggaaactctatggctcagtaagtattctgcttttgttttcaaatccactccagtaaaccattaccatagttttggaaagtttcctccagacaccgaatagctttgttatccttctattgctagtaaatagagccacagtgggttagtcaccactgtttcaagggctggcaaagcagctcttccaattctgtaatctcctctgttgttcacccattagtctaccacacaggctgctgctggcatttgtctgtgaatgttctaaactgctaaccaagtcaggctctcacggaagcatccggtcagattggcatggaaaatgaagacaacttggagaaaaaacactaaaaacaaagatcttgaattgagtagaaacccatgtattatatatgcgttacggctgaagatgaaacaagggctcagatgttttgcattttgttaaaatctgaaatggggaaatgtgtcaagaaacaccattttgcttgttgttcaatcaactctagaattttatttacctagacaataacctttaattcaaattatgcctcaaaatcatatatatatatgtgggaaatattctttgcaatagggtccttgtggagcaggtatccctgcagtgctttgggcacatccatgcctatattccataccaggtgttaagtatttggaataccacttctgcaatcttggatcaaactcttttaaaccaatttcttagaaatttaagatctcacttaaaatgccaaatagttgttttataattgcaattgtaataataattaaattacaagcagtgagacaatttatcctgctc

SEQ ID NO: 115045 - DNA, 1049 bp, Homo sapiens
actcaacatctatgccaggatttttggaggggttacataaaggtgaaaggaaaaaaacaaaacaaaacatgaaaacaattttcaagtgcagccatttaagagtatagtatgaatgtcccttgaactttgtgagtgggaagacatctaaggaaatgtctctgtagctctccttttgaaaatcaatcttaactggacaagacccctggccacaagcctatgcaattagactgcatatcctagtaccacaaatgcaattgttagcagctgtctttgtcaacaggcaagttggagaaacaataaaaagaggagctggtgatgatgaaagaggaagggtgtgaaatggttgtgtgcttcctagtagtctttaagtctccacatacagaaaagaatttgtgctcctccctttagctaaagtgttgaatgactgagaaggcaaagagggatgagaaagctgtttgttgtctagaggaagaaagataggatatcctaccatgtcagaaagctgttaaacactcaagatgaaaacactcatcaggattttagaatcaacaagcagttgtttatatttggatgtttgcagtggaccttattaccttaacatccttgaccaagtttgtgagacaaagaatatccagggtgtggactgagatattggactttgtggttaagggactctttttaaaaaccttttttaaaaggttattatgactgcaaacttgggtaagaaaagggagccaaagtggtccttggcttttgttgtggttgaagcaagtgaatttagaagaaaaagactgagcagaataattctggtttaggcttgggactcttttattagttctcttcctatagcatacaagtcacaagaaatccttcttatgtttcgtagatggcttttatacccagtaaacatcaaatattgtcagtgtgatttttcacagggatacatttagcagtcagtccctcatggtacacgtttattattttgagttgaatatgcatatgttaaataatgggaggattcagcctcaggctggaaaccacgctgaaga

SEQ ID NO: 115046 - DNA, 1103 bp, Homo sapiens
gtactgagacctgaatgacaaagtgtagagtaagctatacaaaaatcaaggaaataaagctcaggcagagtgcatgagttctgaagaatgaaatcaatgtgtgaaaaagaaagaaggccaagtgggctggagaatgttgtgtgaagtagagagtagtgggagaagtttggaaagtagatcctggtcatgtaggccatgctagaaaatctgacatttattctaactaagtagtgatgttatctccaaaattaattgacatgttaatttgggaagctagtgaatggattgatgtaagtgaaaaacatgatataattttatatttgttttttttaattcactttattttggggactgggaaaaatgaaggaaatatacaaatgagaaaaaaatgatggttttggatagcactgacagtggagctgtagagaagtgaaagagtcaagacattttggaggcagaacaagtaagtgttcatgtttgactgtaaatgggggtgggaggtacatagataagaggaaaagagtaagtggtgttgttttgtgctgagattaaggctgtgggacaaggaacagcttcaggaggacaaatcagttaattttggagataagatcactattagaatttcaagggcagccgttaagtgattagaggtttatgaggttagagaataggtcaaggctggagatgtatgtttgggcatcatcaacatatgtattgaatttaaagtcatgaaacagaagtgcctgtggaggcagcatagaacacttaggcctgagtccaacgtcaacccaatattttcatactgagtagagcaagagaagaaaacagaaaaatgacttagaagtactaaagggatgggagaaaaatcaagagagtgatatctcagaagatggatgagaaaactttccaagtatagaaggtcagctatgttgaatgccatgcaaggaggggtaagatgagaaaagacagttgaaattgagcagcattgttggtgcctgatgaaaggcaagtagaagttcgattttttttttttttttttgagctgagaaagggaatgaacagtgaaacaatggggaaaaactttctatttctgagaagggaag

SEQ ID NO: 115047 - DNA, 1017 bp, Homo sapiens
ccaatataactttttcttccaaaatcttttatgcaaaaatatgcaagttaatagcattacctagtagcaatcctcaaaactttactggcacataaattaaatataagcactctccaaaggtgcttagatggtgcaaaagaagtacaagatgataatttgactttgctgacttcagatcttgttaggaggctctcattggggtataacactgcacataatcaactgctaaaaggcttgagccattgtgtatgccaaggataagcgtatatgtattgcatcacatagagaacaaatgtaccacaaaagcagagggtctttattggagaatgttattctgagatttttattttaggagggtaatcctattaattatctaatttccatttttctcttggcttctaaagtagatgtatcaattttagatacaatgtactgactttttatgttgtcatgagtagagcatgtaccattaaaactgatgtgcggaggtaatatgcaccacatggtttcttactgtctacatgtctggctttaatcacagattcttcatgaaatgttgcaagcctggggtgagctagctgttagattcttctggggtacagcctgggctgtggattattggtgaaactgcattacgaggctactggggttaattatgtctgaaagttttcagtacaatccacatcagttgacactctgtgcatactacataaacagtctggagggagacctttattagcagagcaagaaagcagctagctgtctgtgttctataatgtcctttgttttttagagcttctgactcatgtagcccttctgttttatttaatgtattcttaatcaaatatgtgcttattaagccaaataatgaagagtcaagaggttcaaatcttgaacataaattccctatgtctaagaacaattcttaatttaagattatgtgccccaggacagcagcccactgaatctgggggaaagcatgccaatgtttacccagaatttcaacatacattgtgg

SEQ ID NO: 115048 - DNA, 1054 bp, Homo sapiens
cattacatttaaaaaacagatagacttaaaaaaaaaaaaaacagcatacaaaattttcttaggcagcattgaatgattaatgcaaactgggtgaatggtcttaactactgatatctagctcctggttttagatattgtttcagttctgtttttagaataggagaaaataataataactaatgatattgaatgcttaggcctatgtactttatatgtacactcacttaatgctcaaaacaatcctagagtgtggatactaggttatcctattgtactgatgggaaaatttgaagctactgagaagccgagtaacttcactgagtagttaataattgatgagactaggatttgaacccaggtagtatggcttcagttcctgtgcacttaatcactaagctattgtgccctttgataagatgcaactagtctaatttgaaatccttcaattagacagaggcaaattagtcactatgctacatcagcaaattaaactttatagctagaggaaacttccatagagtattctgtgctttcttgacaaagtttgcctacataaagaacaaaaaaagatctcttcttgccatctacaaatgtttacctgcagttaaaaaagtctggctcctgaccacttttattttgaaactcctgatggctaaaaaagaaacagatgaaaaaaatggatttttttcagtagttacttttcaaaggatgataaatggaaacatttaaaaaatacttttatagtgtgaattcattttctatcagttctttcagtttgaaatttcttttgttatttgtttaatatcaaagatttttaaccttctcacatatgaggaacactatttattttattttcttgcagtttgagaaatatttgtcttgatgccaaactgcctgaagacatactcttttacaaagaaagcaaaattttaagagaagttaacttagggttgctgacatttattttcttctttatttaatcttcccatagttcccaagttcagaacttgaaatattatctttattaaagaaagtattcatattaaactcccac

SEQ ID NO: 115049 - DNA, 1013 bp, Homo sapiens
gagaacctgaaaaataagttagtagggctatcattatttaagagactgttaagtacttaaattcattaaaatttctgaattaaaaaaatgtgtaatcatgaagtgaatcatttttcatgtttctctacttttcctaaggttactactgataacattcagtggggattaaaaattactttatcccctttaaaattcctgctgactatgagacagttatttctagtttcagagttgtgtttatggattcttggataatttggtggttattaaaaaatgagcaattcttagtaattattttagagaggaagaataaagtgctgtaaagagtgggagtaaagggagtggtcttgtctgtgtcaaaacatttactgtggatcttaagcaggtcatttactttatcttggcctcagagacttaatctataatatgagtgtattgaactacattattattaaaatattttagtttagtatatttatttcacagactaaggaccagattcctggagtgtacctatattaggaaataaagctatattatgctgaataatgagcacccaaagacatcaggttctaatcctggaacctgtgaatgttactgtatttgtaaagtttttgcaaatgtgatcaagttaaggatcttgaaatgaggagattattgtcattgtccaggtaggcccttaatgccatcacaagtgcccttataagagagacacaaggagattagacatacgtagaagcacagaaggcagaaggcattttgaaaatggaaacagaaagatttaaagatacaatgttgttgtctttgaagatggacaaaggagtcatgagccaaggagactggaagaggaaaggaacagattgtctccctagaacctacagaggagtttggccctgctgacaccttgctctaggcccagaaaaattgatattggatttctagtccccagaacattgagagaatagatttatattagtctaagacaccaactttgtggtaatttgttgcagaag

SEQ ID NO: 115050 - DNA, 1025 bp, Homo sapiens
ttgaaaactgaaggtaacttgaggagagaacaaggtgcttaaaataaagaatagaagatgaatattttcaaggacacaagctgtaaaaggttaaaagaaagaaaaaaagaatagcgaaataggtaaccgtggagatttgatgactatagaataaaaggcaacaaagaaaagtaattcttaatttttaaatatttcagaataagtcttatatttcaacttacagtttcgagacagcattatcacagatacttagttcttattaaacttggtagttgttttttgtttctcatcctattactgtgacctttttggctcatacccttaaagcatttgtagtctagaagtagaaagaggagatcatcacagggagttggaagagcatataaggcagtttctactcaatgccaagaagcagggcagaatttaagtaaacagcagtctctaactgagggagagatgcatgacatcaggaggtcacactgaggataagggactccagctagacagagataaaacaagagaaggaagaatattctaaacgaaggcacataagtgtgtgggtgcagagtcaaacatgaagttttcaggaaatcacagggaggaaacaaagtttgcatgcaggtgggcatcttctgacagacaaagcaaagtacagtagaaggtggtatcatgtgagagggaagtctgtaaatgtatccttacatttgcggatctaaactttctggcaaaatattacattgacatgatttttatttaaacttgccctttacttttttttttcatttttactttttgaagtaaaaaaagaaagaaagtggaagaatatttcaaaagagtattatctatattataattgacaatctaaatatagtaagtagcaagaaattgtagcttaatcaaaagaaaaaagaactaattttatactagggacatggaaaagaagagttcttctgctcttcactaaaatgacattattcttcatatttctgatttgccaaatgatcattattttacaatttaaaata

SEQ ID NO: 115051 - DNA, 1029 bp, Homo sapiens
aagctgacatagctttttagattatatctcattcttctttttcttttctgtgcagcctttcttttacagcacagttgaatccctaaatacccgactactttgcattgttaggtcacctcttaggttagcccgagaaagcctgagaaaagttccacaggaaagatgcactatttaacggaattcaatctctcccaatagatttgaatcactaacataaatgtatgaatgtagattatatctctgtaatgaggcctgaatcattctcagttacttcaaaggactgaaattctaccttccttttttagctgcaataatcaggtcttaatgggttcctttattaattgtttctttgctaggattgaaaaggacagtacaagcttcagattagagtggtacctactaattctcaaaggctgtttttctcttttatccaacttctggaaggcatactttatttctatgcccttaaacatatctgctactatcaggctagctctgtattgagagaaatagatgcagccttttgttacgtgtgatgtcttgagaaatgattgaggctttttaaaacaagaccatggcagcagccattgaagaatcctaaaacctggctcttgaacctcagagaagcaatcagtgtatgtactagcagatccttcagtagctattgtgtttgagcagtttacattttacatatgtattgcctggattctttatgttgctcagcactacctatggttcagttacaagatgtgtgccctattatgtatgatgttattggcagcgtcagtaagctgcttcaagtaatgctaagtaaggtcaaaagtcagccacgctgttcaaaaatttagacatatgcaggcctcattttttcaccctgtggtgcagaccttatgagtatgtgtcacagcccatttttcccttttggacacagaacatgccagttttaagtcatcattaggacttgtgcacttcccaggctgcagctagaaatgatgctaataatcactcacatttgggtgaatgaaggag

SEQ ID NO: 115052 - DNA, 2052 bp, Homo sapiens
tcagctggtgtcaaccctcgtgggcctcctcagcccacacaacccggccctggccgctgccgccctcggtgagccttggattccgccccagggcggaagggagagatggggattgtactgggttactctgccgcagatttacccctcgtcatttctttctctctgcttcgttcatgttttcctagtcctttcgttcctatctggggtggcctggttttgtaacagtcactgcgttaggaatctagagactaggtgtgtgtggctgcgctaacacctaccagctcttcaactctgaaagcctgagctctccaggattccagtcctggattctactttgtgagtgttcagccaaatggaagagcagtggtgatgaagagaaacgccacttaagagagtggggcgggccaggtttcctgttggctgttccaccacaaagctgtgtgaccatgtgtcacatggctgagtagtaacttctttttaccttaattttaaatttagtatgtcttttctttttctttagtaacttttttgcttaatttttcgcgttttacggtagtagttctttgttgtagaattgtgaagattaaatgaagtattaactaagatacctaacgtttactcagtatttatgtgctaggccctggttctaaattttatatgtgccaacttattaatgctcacaataaccgttcacgataggtagcaatgttttggtaaatgaaaaaaagacaaaaacgtaacaaactgaggcatagaaacgttaaatgtgtctgcctgacaccctatagctaagagattagggggtcaaacttcaaactcccattccaagttcctagtaaaaaatcagcagcttccgtgtaactgttcagggcggacatgaaaagtaattaacgtataaataattttaaaaattattgtttttgacgcattcattattttatatcttctaccaagtgtatgtcttaatatttattgaagtaatgttaggactgtagatgtgtgctcaacctagccttgttgtgtgcatgttttttcccttccccagttgagaaagaagtggtcttgaggaaagcgtcatggacttagactactcctgatggatggcctagaaaacctgtttaactttgtcaagacccaggttcttctcctataaaatagagataatgaaaagtatacatacctttgggagttattgtgaaaattgaattggatgttcataaaatagccctatttttatttatggtgaatgatattcttgttaatcttattttcttttattactcctaatgaggaatctctttggttactgttcattgtaatgatggcacaagtagacaataaatgtttgaatgttatatttaagtcataatagttaaattaccacataacccagactcttacctcaatcattcctaagttatcatttgctaagttagtactctttagtgttctaatagtaaccaaatttatttagatgatcagatgaaaaaaattttgaatatctttttgatagattatagatgcccagttcatttttactgggtgcgtggtgaagaaattattcctcgtggtcatcgaagaggtcgaattgatgacttgcgataccagatagatgataaaccaaacaaccagattcgaatatccaagcaactcgcagaggtaaggatttattgcgattatgtatctattgatatctcgtgtaggatttgtcataggcaggttgagtaatagtcttagtagaataaaatgtttcaggtggatctcttgcctttcaagtttcctttttgaagacatcacctctcaaaaatctttttagctttttaaatctgctttggtatactccataaaggtcagataaccattttaacaataacgggttaaagtgtcattttgcctgaccatacagatctatatgtttctcttaatataaaaattctgaaatagtttacgattgtaatttgtgattgtaatttactagactagtcataaatcaaggaagtttaacagttatcaactgggccattttacatatttgcagttcttttggagaaa

SEQ ID NO: 115053 - DNA, 2041 bp, Homo sapiens
tttaaatactatacatttgaaatctgacactgaggtagttgtttttgtcttttactttgaccatcttctgtgtgaatgtacttttgcacacattccaaagactgtagccaactaagtcaaccctttctagataatagctttctgcaggtagaaaaggtaatgattttgtggattaaatatttatattacatcaatggctatcctatataatttctttaaaggttatatccaggatttggattaggggattgttcattcattcagtaaacagtaactgcttttttatatgctatactctgttcaagatgcagtgttgagtgaaacagatcctgctttcttagagcttatattatagtgggggtgtggggtggtaaaagataataagcatgtaatgtttataactagtggtaatactatggggaaaatactttagcctaaagagtagaatgatttataggggggcaggtataaatgaggtatggagaagaatctatttttaaaaagtcattcaggagaggtccctaaaaatgacttactctaagacctgaatggcgaggagctgcctatgcacaaatctgggtaaagacacttccaggcaaaaggatcagcaagtaaaagtccctgaggtgggaacaggcctgaaatatttaggaacaacatgaagggtaatgaagagtgggacaaggagaatgatgtagaaggagacagtggaagccagaggctatatcttccaggactattagagctcattgtggggcatttggattttattctaaaacctgaagtaatgtaatatgaagtagattaacactatgtgaatatccaagaggaattttactacatatttgattactaggctcatctttttttaacatatatatgtattttaaccttatactcaaaattgacttagatttatataatagaattgaatagaggaagtgggagtaggagtagatggaattagacaaagtaagaagtaactttcttgaagatggtagaatggcactgtttacttttgaaagataaagtacttctttttacaataaaataaattacatatgtcaacagtattactcatttgctatctccattaaagatgacataaaatacgtgtggagaaataaagttactacttggccttggtaattgggtaatgacatagtaccagatgtagaaagcatctgtgtagataaagcttgctgctcttagatgaagtaaataagactgatgttgttgaaaaagattaatcatgagattgaggatactagaagggaggaaaatattatttgtgcagaaataaaatatagggttagaatagagatgataaggaaactttgaggtcttcagggattttgttacataaagtatctaagttgtaggaggtatttgataccctctaatgtctaatgtgattgttttgtttgggtaagatatattctatgtgtaaatttcagcataactttcttctacaggattctggagtgaagcagatgttactcgaccttttgtctcccaggctgtgatcacagatggaaaatacttttcctttttctgctaccagctaaatactttggcactgactacacaagctgatcaaaataaccctcgtaaaaatatatgttggggtacacaaagtaagcctctttatgaaacaattgaggataatgatgtgaaaggttttaatgatgatgttctacttcagatagttcactttctactgaatagaccaaaagaagaaaaatcacagctgttggaaaactgaaaaagcatatttgattgagaactgtgggaatatttaaattttactgaaggaacaataatgatgagatttgtaactgtcaactattaaatacattgatttttgagacaaatatttcttatgtcaacctgttattagatctcttactctgctcaaattcatcactgaaagatttaattttagttaccttttgttgatttaaaaataattgcatttgtatattgctaactgataagacaaattgagttattgagctattaaatgcacattttaatataa

SEQ ID NO: 115054 - DNA, 1600 bp, Homo sapiens
tggccattagcccctaaatggcaaaatccactggacagttttctgtattgtactcagtaaggtctgacatattttgcatgtttgaccgctccttcatttttaaaatagtttttttattgccttcagtgaaacatgctcttggttttcctcctatctcatttgctgttctgtcatatttctgtttgctgttcttcctctcacttttcttcaaatattggtgtacttttttttcttttctagactccatttttgtttaaccacactctccctagatgattttatcaaattccatggatttaaatatatttgtaagcacattcaaaattagtttgatttcaaccttgtgttttgtatctgaatgataagcatcagcattataactaaacagactgtgtggttaagattatggacagtttttccctctagttatctaattttcataattacccccagaacgtgagaacattatttttatgatcagaaagtattttaagaaactagttgagtggactctaatatggaaccatcaacatgtatcaaattccacttaattataagcaaattcattatgaaattatatttaaaaaggcatttcatgattacatttgttatttaagaaaatgttatttaaagaaatttacataagtttcattatacatgtattttagcttactcattctggaaatggaaaacttagatactaggcaagaaggctttagattttttttatgagatattttaatagaccagtacttaggtcttaatatttgtgtttttcaaaaatttatgttaaaatcctaacccccatgactatagtattaggagatagggccttttggaaggtgactggagaggggcagcaccttcaggaatagaattagtgcccttataaaatagacccaagggaactttttcatcccttacaccctgtgagaacatgatgagaaggcaccatgtatgagccagagaatagatcctcaccacacactgaatctgctggtgccttgatcttggactttctagcctccagaactgtgagaaacaaatttctgctgtttataagctgtccagttaatggaattttgttattgtagcccaaatatactaagacaacaaccaatatagttaaaattactatgcatgttctactttatattaagttctagtgtacgttgtataatgcttacatcaaataaaaggtaaggttaatttacataaaacatgtttaggtaggataattgtaaaaattatttattagagaaattggtaaaattgtggctttgcatagaggcaggagaaagaaaagagcaaggcactagtgagaaaaattgctatggagaatattgagaatagatacaaggagacctacaggtttacaacattaatattggccaatacttgattggacagtttaaatttttcaacctgaaaggcctttgtgccccaaagtttggtaaggagattttgtaaaaacaaacaacaatagcaataaaaaatcagggaagattaagagatttcataaggagcaagaatttataggtaatacttaaaaggtataggtatgattactattttggtgaataataggcacatggtagac

SEQ ID NO: 115055 - DNA, 1085 bp, Homo sapiens
ggacatgtgtacctgaacaatatttcagcctctctcttcagccagaatttgctcctgagaggcaaattcatatctccagacatctctacctgaacatcccaaatatgctcataatcaacatgccccaaactgcattcatcagctttttgtccttttcaatattcccaaaccaagggttggcactactacttgcatagtctttcaatctagacacctgggagtcattttttactttcattcttcccttcccatactcagtcagtcaccaagtcttgcagattcccaaagatgtttccaactccccattcatttcttcccttatcaatatttaacttatttcagatccccatcatggctcccctggacaattccaagggtcttctaaggttccttactcacagtctcattaccctctagtcagccttcacaatgcaatcagaaagatccttgtggcatacaaaccttttccccctgaatgaaatccatgcttctaaccaagccatgcaagacttcttgttttctttctagcctaaagtcttgtcattctttacctcctatgatttagcaatcgtgatggagttgactttcactaaatgcaccaaattagcttttagcttctttccttttatgtttgtttgtttgtttacctgcatagaaaattggttcaagcatagcttcagttttccttgatctgtgatcaaggctcttccacataaattgagactctcctcctgtttatcccatcatatactcactgtattgtacttctttgttcctaggttccctgagagtatgcattgtgtttgttctttgttcaattggtagcacatttataaaatgcttgttacatagtagtgctcaataaatatctgactaatgaattaatatatcccctcaattagaactccagacacaattaaaatatactttaccatgcaataattcaaactttcgagttacaaatatattgaatctcctactggcttcactcataatcaataagaataattttaaaatgtaattttgtctgatttaaatatattcatcttctgggggaaaatgcagtttggaattgtagcagatta

SEQ ID NO: 115056 - DNA, 1072 bp, Homo sapiens
ataagctccctctaattctaaatttacaaaaatgtttatgaataatttagtgtatgataaatatatgccttccattttacttctaaagcatatgagaaacataccaaaaatgataaagattatatattcttgtagttattttaatatagctgagttatgtaatacatatggaattacttagcacaatgcctggcacattaagaactagttgtttgaagagtttggattttactaaatcctagagtatgatttcttatgtgtgtgctcacaattcaattttgtttatagtgaggaaattagaattttcaaagttgaggttatctctagttttaaaaagctgtcatgattatttattccacccttacttccccaccatcagacacacacacacattgatatagagtcattttcattgctataggattaagactaacacatagtcaggagaaatacaaattgacaattagatctccagtgttgattcacttgacacgagccctgaatcaataatgccccagtactgtcttttacacgcatctactgctttatactacactggccctttcgcttatgctaatgcctaacatcatggcacagactgtgccaggtactgctctaagtattttagaaatattggatcatttcatcctctaagcaaaccctagtgaggtaggaattaacattattccagttttacaggtttggagatattcttggggaagatctgtggctttcccaaggtcaaatagcatctcagggtgcagctgcatcacctacactcttaaccagtatcctctcatctcccaccacatttcaaggagcttcacagtccaaggtctgacaatttctactttatttcactatccacgaaaaaaagtggcagttattttttaaccaccggagcatgaatcatcacaaatctcacctacctccatttctttttaaattgctaagtgcttggccttgaaaacactcacagtgataatactacaaatgaaatgcagcccttctttaaaaatactgtgaactagaataggcaagaagacattttggatgtttcatgccaaacaac

SEQ ID NO: 115057 - DNA, 1054 bp, Homo sapiens
actctctatcagctcacctatacaatcaattattaagtcctgattattttacttcctaaatataatatggaatttgttctttcaaaatgttttctcatgattagacttgagtcattaatgtttagaaagaatactacagaccatcttgctctagctcataacttcattgccttccttacattgggtgaattacacgtgttctctaactgctctttgtttatgttagccttatgtttttcaaatccgttattctcactgctctagcaaatatcttgctatgctacttctctgtttaaagcctctcaaatgacttcccattgtttacagaaatcaatctagctccttaaaatatcatacaaagcattctaaacctctttgttcccacaatcactataggcttctagttcaggtataagctatttccattttgtaatgcctctgtgcttctgcttatcacatcctcttagcaggaggaatacctccgtgtccctttctttagtattcatccccacccctcaccacaacacacacccgtatcttccaggattccttccctgacttcattttgtaagcttgtttagtagattttcagtgcaacaatggcttcctgcacttatgtcactattagtattattgattgcttataacatggcaagaaatctactaagtgcattagctactttatctttttcatcattcctaaactattatatctgaatttcccatctgtgttctgcctcttctagtataatgagctcctgagaaaatgcatcagagcttacgctttgttatttcaccagagagaacagtttctgacagatagtaagtctacaatatactttgtagcaaatgaatgagtagactctggaacaggttgggttggggagggaaaagctatagtctcattggaatgtctttttttaaattaatttatattcctagaaattggtaatgcttgctgctaggaagatgttgatgagaactagtaaaacaactaataatggttactccttagtaaatatttacaatatgaaaacatttctcctaaatttgt

SEQ ID NO: 115058 - DNA, 1051 bp, Homo sapiens
tttcctgatagagtactacagaaaaatataatttaattcagtgtgataacatgaggtgaaataaggcaaacatgaggaatcaggagacttctattttcagctttgtcactatctcattaaatgagctcaaaaaagcatttaaccttccaagcctgacttttcacttctggaggaaaaaaaaaagaaaggtggaacaattatgagaattacctaacaagaattttcagaaattggaagtgtgagtttccagtttctggaataaagattgctagaagcaagaactctttgaatgcatcattatcttgaactgaaatcacccttttagattgaagaagtatttcctagttatagagaaaacaaacacatttacacctctctcaatgtctgtcctcaacccagaatcattgtttgagttgagaaggctggtgaaaaagagactggtttctaatctggttctgacattaagtttctctgtgactttggtttacatctgtgatctcagtttccttatctgaataatcagaggattggattatgtactgtgtattgtctaatccagttttaactaggattgatgtatcccaaccatctggaaggatgcctggcacataagagatgctcaataaataatagattgaatgaatgaatagatccttaaagtaccttcatttggtttgttagatagggtactgtagacttgtcagatacagggactgcaaggatacttgtaaaggagcaatattatggggatgaagtttgaatgaactaatgattttctctcacttgctcaaacatgaagtggagggggaggctattggaattttgctgagatttgcttggtcattttttgtatttatgttcctatcctccctccctttcgactgtaaatgaatttatataacagaactggctttgataataataatcattatatatatatatgtattttaaagtttcctcacatagtttagttccataatgctctccgtatttgtcttctgatactagtcagaaaatttaaaaaaattaatttgaaaataattttagattt

SEQ ID NO: 115059 - DNA, 1051 bp, Homo sapiens
gtgtagggtctgattgctaatctggcacatcattagctctgtgagatagtgtggtttttgtatcctctaatattgaagtttcattgaattcatgattgggtaaaacagattgtttctttatttccaaattgtatatataaaggctttgattttagcatattaattttgcttattgttatgccttgcctatagtaacttattttagtttctccctattagttcatttcataatactaaaaaggaacatattcatgagggacattagtacatagaaaacacaaagagtatagtgaataaatggagtgaatctgaccaatcaggcccatattttgctgaatagagcatctgttgttaggcagtgggtgggacctgagagggctcagccaactggagtttccaaagatctgagttaaaccatcatcaagcaaaggagttcatatccctatcttcaaagtctgaatattaaccattttgacttccttttcttcctaagtctttttgtattaattataacctgaattttatagtctgcataagcgtaagagtccaaaagacttgtagaatgcctaaatcgacactaatgaaagtcatataaagtcatatactggctatagaatattgctttcctccctacagaaatactttttagcattttcaagataaattatgtttttaaatatgtcataaaatggaagttctgtttgatttctgtgaggcggtagcagtgtttttgtatgtgcttgtcagtgacattttggttcacaggatttcaggaaatgacatgcaataataaaacactgcataatacactgataaaaaggcataaaaatggatcattcttaaaatatagatatgggatatatttaaaatcaaatgaagcacatttgagaaatcagattcatcttgtaatttttctctatatagcacattccatctaaaatggaataaatgttcagttctcaaagcctttttatgctaatttgagattaataccaaaccaagatgattcttgctaataattgctaatatttattgaaggcttattacacgt

SEQ ID NO: 115060 - DNA, 1027 bp, Homo sapiens
gatttcccttggatatttgttttgcagcaaacaattatgagactgggagcttctacccaccaggaccagcatgggtctctggagagagattgtaggccagagaataatccttgaactctgaccccatgagaaaccactaggtgactttaggggctcctgatagttgaaagtatgcccacaatcattcttactgtgtccctatgtggcttatttcttgaaagcaggtgaggtttgtaggaccagtgagcccagcctgagttccatggctcttcctcttcctcttactatactgatcaaactaagttctcactttaccttcaaggatgtgtggaatatgtcatgttttttcatagctttaatctagccaagttttagatatttcactttttaaatcttctcttagacattaggctttccatttccttaatcattcccacccccctgattttttctggatatcttccaatttgtctgcattttcatgatattgaggtgccccaaacaataaaatattcaaggaacagacacatatagactgattctatgatgcagtgtctttatttattaaagctgtggtatttatccactcatttattcaatttatttagggagttcactgtagttgcatacactgtgttagatagacaatggtgatataatataatgggaagtagagatagatgtgatccctggccatgttacatttactgtagttggagaaataaacctttaaaaacaattatccacatacatacaaaaatacaaaatattttatgtatatgaaggaaaagacatgattcagggaatgtattactaggccacctgaccaagtctgagagtaatttcttcagtctatgaatgctcatttgggtttattatgtacatattgtggttgtggcctttctttatatgtaacagaacaatgacacggttgttgcctaatatagaagtatcaaggggtagcttatgagaatttatgcccaaacaaatgtttttgtaatcttatgtgaagtatgaataaatatct

SEQ ID NO: 115061 - DNA, 1051 bp, Homo sapiens
tttttatatgtgtcctttccctggaatttaaaccatgctaccttatgaatcttactcagttttacattcccaatgttgtaaaaatgcacataatagacttttcttgccaaactttcttagaggcttcatttttttttcttcaacttttattttaacttcaggggtaaatgtgtgggatgtgcaggtttgttaaataggtaaacatgtgccatggtagtttgctgcacagatcatcccatcacctaattattacatacagatatggtttatttttaacagcttttttgagacaaaattcatataccatacaattcacccatttaaagtaagcaattcaatattttctagtaagttcacagttatgcagccatcaccacaatcaattttagaatattttgtcatcctaaggagaaaccccatatgcattagcactcactttctctcctctcccgccctcccgctcagccttaagcaaccactaatcctctctctgtctctgtagatttttgcttattctgaatattttatatcagtgaagtcatgcaatatatagtattttttattggcttctttcacttagcataatgttttttcaaggttcattcatgctgttacctgtgtcagtactttattcatttccttgctgaataacattccattttatggatatactacctttaatttattcatttatcagttgatggacatctgagttgtttctgctttttggttattgtaaatactgctgatatgaatattctcgtacaagtttttgcacagagatgttttcatttctctttggagtgaaatttctaggtcatcataacagacctgtaataaatatttattgactgaatggacaaagaattattctccaagcaggtcatgagaacatttaatcttagagttaataaattcagatgaaagcaatgaaagctcttattttttcctacagtaatacctggcatctccttcccactggcacctgcaagtatgtgccccaactattacatttccctgcccaatacacagatgaataaatgaaactgca

SEQ ID NO: 115062 - DNA, 1600 bp, Homo sapiens
tctgttccccccaaaatttagtgattgtatttctttacatcatactgtagagagttgatgtttgtgttcactccactaacctcattccactttcccctgccagtatacttcagaatatctcagatccaattcaaaatttaatcttaaaaggtataattattttcacagtttcatagtttagttttgatcactgaaagcatttctttcattttgtctaatcgaacaaatttatgcaaagaattggggacttattcctcattagtattgttcatctataggtggaaataagttcaagtatgtgttgcagtattaattaaaggcaaagtgacctacttgtactatattctgaataaatacttattgaatgaatgaaaaatagaagagtgactcaattattttagaatcttaagttatacagatttatgtaatgtctattttgatttttattaattaaccatgaatttatcctactctagtattgagaaaaagaaaatggaactatagacccttctttcatatgatacttaggaatgtatctgcactgtatccagaaagtcagttacatgccctgtttaccaattgaattctgcttcactaaggataataataactgacattgagtgcatggcatatgatgggcactgtgcaaattgctttgacatgttttgttcatttaatccacacaatggtcctatgctataaaaacagttaatatctacttttttaatagatgaggaaactgcagcttagagagattaggtaagctgccttaagtcaccctgcctgtaagtgtttagagctgagattcacattcacggagtcctcctgaagaacctaggattaaccaccacgttgaacagctttggcctgcaagttacatgcttcttagaaaatgaggctattatctataatctgtattttttaatatcaattttattcctttcaactggtcagttatatcataaattccatggaatttttatggaatccatgctttgccactcttgtatccctatagtggtgctggggaatcaagacacatttatttgccttagcactctttctttctttctttttttttttttttttttgtaattttacttataaattgggagggtggccataaaatttatcatccaaccactgaaagtgaaagaaggtgctatttatgatttccccaggacaacaggcagaaaatagtctctggtcgtacatttagcctgcagagagaatttaagtacattatggatagtctgccatagacacagcagtagcatctgcaacaagtaaatgataaacaaaaatcaactttcagggaaatagccatttttagtagtaaacatagggaaatagccattttaagtaaatgtcaggagagtctcactataaactgcctataatgagacagtttagtaagcttaaagttttattaatttccaaaagcatctaataggttgagatttattggcattcaaaagtatgattcacagattgtaagagaagctggcaaagaaagtcatgtttttgctggcctatggaatgcactcgagaattctttgggcttgcatatcttctgattcatgtgtcataataataatgt

SEQ ID NO: 115063 - DNA, 3951 bp, Homo sapiens
tttagttccataaaagatctggtcatttatgatgtgctcaaatatgcttgttaacactattataggggaaaatatacagtatagttatacaaaaataaatcattttccaccagagggcacatagcaactaatctagaagtaaatcttttgcactggctacatattttattttatcaccacggactagtttcttttacaatttttcatgtagctttatttgttttcctctaaaattttctggattttctgttattttagtttcatttattcccatatatttgggggtataaacttatgcatataagctaactttctttgctgattagattcaaaatttttagttcatcaacattagagtaggagctctgttttggcagtagattggatccctcacttcccagtattttttgctttgctaaagtgatagtaagttactataaaataaccagaacatactaattatatttgattatgctttatttaactcaggagtctctgggccagtgaatacaaaacatcatgtcgagaatcattggaagatatacagagttcgtatttcagctttgtttatccttcctgttaagagcctctgagtttttagttttaaaaggatgaaaagcttatgcaacatgctcagcaggagcttcatcaacgatatatgtcagatctaaaggtatattttcattctgtaattatgttacataaaagcaatgtaaatcagaataaatatgttagaccagaataaaattaattatattctggtcttcaaaggacacacagaacagatatcagcagaatcacttaatacttcatagaacaaaaatcactcaaaacctgtttataaccaaagaattcatgaaaaagaaagcctttgccatttgtcttagaaagttattttttaaaaaaaaatcatacttactattagtatctatggaagtatatgtaacaatttttatgtaaaggtcatctttctgtgatagtgaaaaaatatgtctttactaagttgaaatgaatactttctgcctttgctaatgatagttattctacaatctccacaagaaaaatataccttttatccggaaatattggtttaaggcaaataaataaaactgtgcttgctctaaagctctgcactacaaaagcaaattttccagtctttattccactcataaccactgctttccccaccaggctaaagtgcttcttagtcttaaatagggtttttaacttcataaggtacaccattgtttatgttttagggtgcaggtccatatagtcgtaatacttaaaacactgctacactgatgcttttgtggctcatggtttcctggttctttgatttaacacctggcttcctggtatctatggctggttaaatatctaaacctgcattattagtgctttacaataataattcccttgactgaagtccagaaatactaaagcacttcttttttattgctgtgaatgccttagacttatcttccaaaataggatacttcgtttctattgcatatataactgaaatattttataaactcactgtaatcaaatcttataaaatctgaatcaacatgaaaagttgtcaatgcttgaatgaatactaaaatcataccacaagatactagataacataaatgaccatgaagtgtcccactgctcaaagggcaacaactttaagaacagaagcaaagagtggtggtgtggaacccaagattcttggcgactagggaatttaaaggttggggaggaggaattcaatgatttgacaagaaatactttataaaaatttgctccatgtattggctaagaaaaatataataaaattttggtagtgaaaattgtatcactaatgtttaccaatattactagtatgaataatacacataaggtagtgacttggaagctgctcaatactttgttgctataacaaaatgcaatattttgttgtaaagcatcttaactacacatataagtttgctgaacttgaatacatcccggtaatggcaaacttcattttattcttggttttcattttattctggtctcagggccatacatttattttagtttaattaattattattttgacaacattacttgggtaatatctatataatggtagataaccaatcagttagcttaattaatctaagctatttgaattcagggaaatattagtcaaatctgctgtttgactaaatacaattcaaagcagtgtatttgtgacttggaatatagaacacaaacaaatgtgtaacccatctgcagtatgcattcttccattttaccaccactaaccattgaggctcatacaattttcaagcaacaagcattgcttcccaaaggtaaaataatcaggaatatttctatagtaaatggagtttttaattggcaatactgtttatttttttctagcaaagacaatttatctcagtaaccttaaataggaaaagtactcaaaaattaaagttgacttttggctttttgtagtctctctggaggacttccagaaaattaccactgttggattttaatctgcttccattaaccaatcttacagagatgataaatgaattaactaatattgaccaaatataaattgactgcaaataataagccgcataaaagttgaagtaggaaaactactccaagtttatatattaggcaccttggggaattctcttagtctttccagctaacaaggattttcagcataataagtagatttaatgatggcataaaattcccagatactttcatatacattttttgccaaagtgtaaatcttctccttttgcagtctttttgttattatcccaacatctagctgctcaggccctaatttagaactcattctgatattttcttcttctgtattaattaatacttatgggtcatgaatccctgctcctttgacctttttaatagctcatgaatccatcccattgcctccccaactctgcccacacctgctgcaacactaatgccttgattttcctacctcagtctccttttctattaatccctcttttgcgtggctgcctgagtccactttctcaaacacaaacctcactatgcaactttggaatctctgtaggctcacctttgccatttcttaatattgcattctccaaattgctaatctctatccagtctcttgaactagacttggcacatggagattccgctcagaaagtgctcttcacacttctacctgcttgactaaccccagattatctttcaagactttaatctgatcttgtgtcttagagaagcccccatacctggtagagcatgtaccatcttacatgcttaaataactccacatttatttgtgtttattactctgtgttataaatatacatttgttggtctctctcttggattattttgtttctttgtcctgtaactaccactgaaagggtgcaatacagctttcttgaaatgtgtattgaacggatgaatgtataaataaaaattaaattttgtaaatttctgcttattcttagaaaaagaatctaaattgtgacaaatcagaattgaaaaaagtattctaataaagaaaaacaagcttttataacttcagtatttgcttcttttactttgaaaaacacatagaatagtataaaggtccagtcatattttctgtaatagtgaattagtgtcttgtgagcaaaatgagttctaattcctaaactattacacagattacgttgctttcaacttatttaaatttcccttgttcttcatgtttcatggacagtacaaatgcaaaccttatttttatcctttattctaataacataatgcattgattttaaatgtaaagaattttaggctgcatggtggctcacatctataatctcagaactttgggaggccaaggaggatggatcacatgaggataggaacttgagaacagcctgggcaacatagtaagaccctgtc

SEQ ID NO: 115064 - DNA, 1052 bp, Homo sapiens
tttagatgtttgtagacattattcagataatcatgttgactccattcacataggctgctaaaataaaccaatatgatatgagcttccaagttaagggcacaaaataactacatcagaaatcctataacaccagatagagaaaagcaatgttgtcttagaatcatagactcccatagttggaagggaattgtatctctcccaagagaatcccttctctttctggagaacatagatatcttatttatgttgatttgaacttttaatctttcctatttccacgtattggcgtttttcttgttcttagcatcatataacaaacgtgacagtcattgacatatttgaaaacagaaccttgctcggattcctctattctccgagctctgcctcccactgtctctaaccattcttctgagctcacatttggaagttgcattctgatttaaaacacactctgaaaggatggtaccagaacagtgtggaatggaccatcacttctgaacaatgtaaaatggattcaatatatagtgtaaaagatgaattatttttctgaaaattggatcaatgtacatcattttgctcatcttgtatagcaccataaggatcactgaaggtgtttagtttttcttcaggttatttcactatctttagattgtatacaaatatcaagggcacttgaaatcattcagaacaatgagcttcttgatgtccctcaaaccatttcttgcaatagttgctgaggtgttttcttagtggccattattctgcttttgaagagtacacacaaaagaaaaacaagcactcgtgggatttctttttttttagaaaatattaattatcagttaattgtaagtaacactgtcttataatatgcattatgatttgataattgacgcctgcccccaagaccttgaagggcaaggtattcattatgcatactggttatttagtttccgtcaatctttagaatctgaggcccacatttgtagtcctgctctgataaactttgggtggaaaaagaaccatttttaacctctatttcagtgtaataagca

SEQ ID NO: 115065 - DNA, 2043 bp, Homo sapiens
tgcctgtgcttgtgaaggaaaaagtactttaaagcactaggcaaggataggaatgtgagactcagatgattgggatttttctgtttttaattcttctataatatttattcatgatgacctatttgcttctttgtagttttaaacattcactgctaaatccttatagcaatgtatatattttttctttgtttgctccctgggagatcaaactctgataagacttaagtctgttatagataacctctcacaaactttaatatgcctttctctagtaagcaatattgttggcattatcttatagctttcactgaaaaactatgtcatgtatcttttatgtgctatgataggaatggattttaatgtctcctcatattaggttcctgttggtgttcaaatgaataaatatgtgatcaatggaacatatgctaacgaaacaaagctgaagataacacaacttttggaggaagatggggaatcttactggtgccgtgcactattccaattaggcgagagtgaagaacacattgagcttgtggtgctgagctatttggtgcccctcaaaccatttcttgtaatagtggctgaggtgattcttttagtggccaccattctgctttgtgaaaagtacacacaaaagaaaaagaagcactcaggtgggatttcttttttttgttttttgttttttttagaaagtattatcagttaattataagtatcatttacttatgatatggattatgatttgatacattgcaatgactttaggatttttggggaaaatcttcattttcttatttggagcagtatttaggtttacaacaatggtgacagtgagctggaaacatatacccatggtcttcctgtttcaattcctgaaaaaacttagtattaaaaatgccttttttctttctcttcccccaccacccccctctttttttttttttttttttttttggtgctactggtacctaagtaccaattaggtgatatgtattctggcactggaatattagaaaaatctatgatagcttaatataaaaagtctaaaagaaacaatttttctttcacttagattatcatttaaaaaaatattttattaaccattccagagttctcattaaagagagaccatcctgtcatgtcctatttttgcggcctgtgcctgatgggttacaggttgataaagcagtaatcctctagaaaattgaccttacgtcctgtattctttcctgattttatactaaatttttaatgatttaaataatgacaaactaagcagtcatgtttttgaaaataccaggccactaaactatgtttgatcagaaatgcagataaggtctgtagtgcagataaaggaggtgtaggtgtttaaggtagcatgtctctccttcattccaaacaggagaaacagcatagtacttacttacttaggaaggaggtttaattgagcatatatgttccataaaagtgacaaaccaacttcacagtcaaattcttcttttgttacacagatgaggggaaagaatttgagcagattgaacagctgtaagtattattttttacagattaattttcacttgggtaaaatacagggaaacataaaattgaatgaaatgtttgcagttagggggagaaaaggcagaggagtattttctgtatatgtccacgtggtggtggaaagtggctttccaagtctgcctacctgcgtgagaattcttcttcatcacttactacctgcacttctctgtacttcagctttcttctctacaaaatggatttaataatagtactcaccatatgaggttgttggatggaatgaatattatatatgtgtaaatgcatagcataggttatggtgcacagaaggtgtgcagtaaccatcaggaagtatttaatattattatttttaaagcaatagttctcaagcctggcaatttttgatcacttaagagcctctttaaaaaaatacagttgctcagaccttgctgaatctcctggatcagaacctcttgggttggggctatggcatctgttatttcttga

SEQ ID NO: 115066 - DNA, 2357 bp, Homo sapiens
accttctctaactctttgctggcttttcataaattagtatcaactaaagatttcctatcctggaaattttatctgctcactcaaatgctacctgaggttaaaactttgaagaaaataattactctaaggtaacttagtaggtgggaagaaagaacaggggtttgaaaacatgaagcctctttcttacccaaaacatttaacttatccaaaaaggaacaatacttttgttgttaggctcaataatagaagaccttccatttctatacattggagacaattatatcgaatctatctactattattattactactaactacaccctaactactataaattagtttcattgatatataactgaaagtacttaaaataatgtaatgaaaaaatgaaaggagacaatatttgcacatttaatacatttcctttacctaaactctttcagtaacatacatttctctattttattctcagtccctgaacttcatgggaaaaacaagccattgatctcttacgtaggggattctactgtcttgacatgtaaatgtcaaaattgttttcctttaaattggacctggtacagtagtaatgggagtgtaaaggtaagatagttccttgatttgaagaaaacaacaacaacagaaaacatttatttaaaaaataacaagattgtaacagactcagcattcctaagatgatttatacttttgttatcttgttgtttagcttatgttcataaagaaagagcagtgacaaacagagttgtcatttgatggtttttggcatgtttacgttatacatatgaagatactcttaacgtttcattagctggtagtttgttttttaggtttaacaatttaattacattctttgaaaagaaattacattttgtgtgtagttgcctagtttagaaataaccccattagaaaatattctttttaaaaatcattccatgaaagtaactagaaaaaatgctagacatctttttgggcttctgtctcctgaaacatctgtgatagaatgcaaaatagtggcactatttgagaaaataatgaaaactttgtaacttaatcttacatcttaggttctatcagaaagtgtcattggccttttcaagctacctgagagaagccaaatacttttaattccttttttactgagagaaatcgctattcaaagagctgatattaagaaaaacatgagtattttataaataatttctggtttcctttcttctccccaaatagcctctaatggcaggaaaatttaggacattgtcctttaagagacacccttcctttgccctggcactaagaagcattacaattaaagtcccgttaaaggcaagctataattgtagaaggaacatgtgagacagtgtagatgttacaatgaaatattaaattccttcttaggcaaaattggtgttattatagactattgaaggatgacagatgattcagaagggagtgtgacttattctgtgctaacaggtttagtttttcaatgaaatagttccaaccaaatcccatagatgcagactgaagccattcctactcctttatgtcttctgatggatgatgaggaaaggcagtcattgtgtatatgtaatttttttttaaaaagtgtaattttgtaaaaacaaatgtcaactatggtatttgaaatacacagctttatttattgatgtgtatgtggtacaacaatatgtgaaaaacattagccttcatctaattatatcagatgttgaaaatgtcgttttagacgtaccagtgcttttgtccattgctatactagtcattatcctcttaatttgactctaagcatgagtcttattaggatgtgagaaaagtttggggaataggatgcaggtcaaaacttgagcacaagtgccttttcaaaatgtagaccaaccatgtgcatcagaatcagctgggtacttattaaaaatatggtactttgattgattagctctgaccaatctgtaccaaacattccaggcagtgttgtgcacatggtgccaggttgctgtaattttttttgcacgaataatatactcacagataattattccttggataagctctgagaatatttgtatgcagattagcatttattgaatagcacggttgagtgatggagcaggaaaagcatcaaatggcttgggaataaaatttaatttaaatagattaaataaaacagccccaaatagcttaatatggcaccttgtgaggctgtggaaaacccagcaaatcttagaagccagcttatctgagtgagaaagaaattcagatatgaaaagacagaaggtgtgcagttcacttcggatcccaggctcacagagggtcccctccattct

SEQ ID NO: 115067 - DNA, 1142 bp, Homo sapiens
acagcaaaagtgtacactggaagtttgtgactgctaataagttgctgattacttgccacccgagaaagagaaagatgagtgatggtctatagtgtttctcagtagtggatcaaatattctgagtggttgctgaaagcttccataatatttatcagtgttaaaatctcttagtagaaagtatgcagaaatttaattggtaaagaacaagaactttttggaagtcatgatgagattttgatagtaccaaatgtagtgaagcctgtcaaagctcaactatctgtcttcccctggaagtatctaaaaatataaagtatggaaaggtagcataatagaatcagctaggacttcagccctggatcccagtgttgaagtatagttagcattcttttactacatggagtaatcttttttcctaatttagtggtacctaaaagtctttgaaccaatatgacatttaggccaatttgttctagttcatgaatatacaaatatagtctccaattttacaactccagagagctgttactttcactgggtatatccaaaccccatcttcctagaaactagcctgaatcagcaatttcaccaccttcaaacctggtttattccaaccgtagcactcgtatgcatcctactttatgcaaagtcttaaaaggtcgacagggcacattagaatactgtctcactgtccttatattagtaaatatttccaaatataagctgtggccctgaaccccagaatagttcaaacaaatgtcatgttccctgaacatagtgcattttataatttaaatccacactgctgttattagccatatatagcagaacaaaagcatggtttatggtattttagtcattagtctaggggataatcaagaaaactgaagagatggcaagaaaacagaattttggtttcagcttttccatgttgtcactcagtcattgtcagctacctgcaatttacagcctgatcttaatatttagttgggatggtttaataacatagtcatgtgttcctcatcaaatctcagaatactcaactttcttgaaaagcgcctcgcagcttccattatgcttcccaagcaggtagctcttcaaggaatactgaaaagcagtgtatattctgccaggtttttccccaa

SEQ ID NO: 115068 - DNA, 2584 bp, Homo sapiens
taatatatcactcaaatccatgttacacacaaaacattctctagtagttattagatccataaaacttaataactactaacaacatgattactcaaaattattgaaacaggcattccattctcacccatgagtgtgtgtttgtatttacagttgtgctgtttttacactgtcagagcatacggcacatgttatagggtactctctaccctatattctgctcagtatagagcttaaggagataactatcacagctttaggttttttttaattgtgttaatgttgaatcaaaacttttctttaggtgtgcatataaaagggaataagaaagggaaccaactatgttgatagaggaataattcttcaaatgaatgttacattaagaaattgtcaatgaaacactgctgttaataatataaaaggttttatgtgttagattcctctgaatataactttcacattttgtcctcttttgtgctaatagaacattctagtatgccagtagaaaaaaatatcactttagaaaggccttctaatgtaaatctcacatgccagttcacaacatctggggatttgaatgcagtaaatgtgacttggaaaaaagatggtgaacaacttgagaataattatcttgtcagtgcaacaggaagcaccttgtatacccaatacaggtgagtatacaaattttaacctaccttgctcaccaaaagtagcttaattctaaatatttttgctgactgagcattctttcctctgcagccacttgaatgttatgctaatattctaatttgcatatttacagaattatttctctttttaaatttttattaatggctaagtcttttcattttcattaaggttttgagaactaagcctatattaataacttgaattatctttaggttcaccatcattaatagcaaacaaatgggaagttattcttgtttctttcgagaggaaaaggaacaaaggggaacatttaatttcaaaggtcagtattaataacttgaggaatagttaataacttcagcattatgttcttagatttctcaatcctgtaattttaaaattatttttacaataataaacataatgtagctgaaagaaagtcatatgctttccagagccacaagaggcagccttgaaaatggtcttgtatcccccaagtccacttccttcctgcttctattcctcaatttaaagcacatgttttagttcaaaaggccagcctaccacattattagtgaattatatcagttgcctgaatttctttatttatctctctaaattcatagctcttataatagtcctccacgtttctaagttattgtggtcccagcctctgagagtgtgggttgatgttctatatccatagctccaggacatgggattttaggatccataaaacttaaaaataatatggagatgcacaaacggttgcctactttttatctcaccaagtaaggaggtttaaagatatatacaagccacagaatatcatccacatttcttttgcttggaaacaaacgaattaaaatattttactgttaccatcattaaaccaaaactcaagaaggtctcaatctcataataaagactagttatttgagttagataattatcattatgaaaaacccagtattttgtggtgattagtgaaccatattatcgtgctggtatttgggaaatgcaatctgtcgccatattaactacgtcggactctgctttgcattaattccccaggaaacatgaaaattgttgtaacttttcctaaaactcctaaagcccgactgtctgctgtgacagaatgtggatgctattctcaaggctccatcaatagcagaatggcttgcttcaccattgccatgatctaatggttcactcctgtgtccctcattgcatcccttctgcactcacagagtcattttatttttatgtctttgtaattgttccaatgtggtgaatataataaattcttgtatttatatatcttggtctctccaaaagcagaaactagtatcattctttgattattttagtcatgtatattctttcttaacttttttccctccatttgcctttaacttggtgaaggactagataacaccatatacatttcctttcagtttccttttccttatgcatttcatttttccctcccctgccccatctgcccttcccctcctctttccttaatctctcttttcctttccctttttctgtcctttcttccctcccaccttttgagttcatttccttccttcccttcctgcctccttccttccttttttcctccctttctctttttcttcccaatgagcaaaaaataatactaaacacacaaaatttcagtgaacatgttttattgagtttttaaaaaatatgtaaagaaggcctacagattctgaggaaatgctcacagaatcttgtgacttaaagtgctcccaagatattcaactttaaacacttttttctttttttttctaagacattgtgctctggaaatatatactagtcatacctgctttcaatattgaagataacacatttttctcattagttttgataattacttaaattattatgt

SEQ ID NO: 115069 - DNA, 1102 bp, Homo sapiens
ggcaaagcaaagaaagattaacacaagttgtctggcagctggataaaaccttacacctgcgcaaaaataagcctccctcgtaagaaagcccaaagatgtccggggtccgggaggagaaaagtgtttctcatctgtcccatcaaagcaaattagtgaaacctgcctcaggtgaagtgcaaaggccagtctgtaggcagagtttcgacctctccccacgagattggctagacatcacctgcccaagctctctcccgacctgctagagccgagagggcggaggccggagaggctgcagccgggaagtagcaccgccaccgcacatccgggaacgccagcagccggctgagggctgcataactgatggagggccgggcgcggtaagagcgtctcgggggagtggggcaaggcggccgggcccctcccattccgccttttcttcagcgtcctacccgcggcactggctgcgagcgccgggccacctgcgagtgtgcgcagggactctggacacccgcggcggcgagctgagggagcagtctccacgaggacccaggcggaccctctggcgccatgcgcgccctccccggcctgctggaggccagggcgcgtacgccccggctgctcctcctccagtgccttctcgctgccgcgcgcccaagctcggcggacggcagtgccccaggtgtgatgggtacagggtccagggtagggagggcggagggcgcgcgaggctcgggtccccgcgggcagagggcatcgccggcgcgccgggcaagggtggcggggagaggcgcggggatgctggtaagggcgggtgggagagtcggcggcggcctcccattagctacgtttgtgtcacctaagctgaaccctgaaactgctgcggctcgcgttcctgcgctctttggggcgagtcttgaacgaacagcgccccgcgagtcgggcgcgtaggtaacagggcagagtctggtttttcctaggaagaaggcagtggggtgtgtgggtggttgcagggaccagctagcgacttggcttgggcaaatatggcatgaattttgaaagccacatttccccaaggcctactcccttttcttgattcgagagt

SEQ ID NO: 115070 - DNA, 1090 bp, Homo sapiens
ttaaaattagtgaagtaaactagactaaatagtcatccatttttaaaagtccaaatattaggcattctggtgagaaacattagtctttgatggttcacttgttcaagaaaatagtgggatttaagtcttaaatcattacttgtcctctttcctttataccaaggcccagaagtgccagaatcagcttctggaaaaagtaattgcactggtttaggggtgaaaaggtagtattttttatctgttgctactatgctgaaaagtgaacttacctttaaatggttttcctctttgaaattctctgagaggataaagcttctctgtagcaaaagccaagtttcatctaactattgattattctgtagataacttcattcacagttgggagacaagataataagtttaaagataaaaacttctttccttgagtagcctgtggtttctaatcgtaaatttttgtttgatcccactattgtgggtcacccaaattatttacagccatctatattatcaatataatgaaaacacaagtgtgctctgtggaataaatctgtaatgcagtgaaattggagacttaatttgagcaactacaaggaaataaacatactgtgatctaaatttactaaacaatgctttaaggcaagtatttaaattggtaagaattggattggttttctcttaactgtttgcagtctcttgactattgcttatatttaataactgaatatttgtgttggggcataattactcaaaattacgtttttcttcctgcgaatacaatgttaatgtagtaatgctaactcagctactctttcataaacttccatgtctttttttaatctggcaaaagccttctctcaggataatcattatgctcggtaatcctcaccgtcatacttgaagtagttaatagataatcctccaagcagcactccagatccatctgagtacccagtaaaacacttcttgatgctattggagttttctgaatttctttatctgggagacaatggaaattccatggagaatttcttctattagaatgtatattcaaatcttacattgtttgagtaccctcttctaatcttaaata

SEQ ID NO: 115071 - DNA, 1016 bp, Homo sapiens
aagcactgaggaccaggctctgcaggccaccctgaatatagaagagtccctgtcctgaaggcattcacagagcagggatgagataaagcagcaaacattatagtataatgtcataagtgacaagataagtgcagggagccacgggagcatgcagggtgagaaagaaacaaatatggatctggtggtcagaaggagaagaaagatattttggtataaggactgtttaaaacaggaaagaaggaggaacaaggtttttttttttttaagttttgttgctaacattaggcttgattttattgtgtttaggagattttttttttatttatgttagtggcatgaggtaaagtattataataaactcaatacagagatgtaataataacaactaaaatttattcagtgtttctgtggcaattaaaagagtgagtataagtgccagatggcttgactttcaaaaccactcatgtcagatatttgctgtgttattaggtttaggtatattaattgtgctttattttccccatttataaaatggctgtgagagtcatctatatgttatagatctgtggtgatgtttcaataagttaattatccaaaggacttacaagagtgcttattcatattgagtgctcaataaactttagatattattattattattattattttgagacagggtctcactctattgcccaggctggagtgcagtggtgtgatcttggttcaccacaaccttggcctcctgggctcaagcagttctcccacctcagccctccaagtagttaggactacaggcatgtgccactatgcctggctaattttggtattttttgtagagatggggttttgccttgttgcccaggctgaccttgaacttctgggctcatgtgatttgctcccctgtgcctcccatagtgctgggattacaggcgtgaaccatcacacccagctattattattatttggataatctcatttaattttttcattaatctgataatataatgtggtagaca

SEQ ID NO: 115072 - DNA, 1033 bp, Homo sapiens
ttttttaaaaaaaatgaatattaaatctttatcaaactattgtttggcatctgttgaggtgtcatatctactttttcctttaaacaataaagtaacaaattgtattagcaaataactcaatgttgagctatgagaattatgtgttttgtcatatactttagcattaaagaccttaagttgctgaatgaattaaacaactctttgagcatttgctagaacttgcaaacaaatctgtctgagctttttagggatggttctgggtcagttgtcttatttttctgccatgattattatctcttctgtttttctgtttcttagtcattttaaaatatgtcttcttactgaaagtttctatgttggtgaaatgtccaaactttttagcaaaagtatagtatttggtccgtaattgtaaaattcttccatgtctctggttatttctcctggcccatttttattgttcatatttgttcttgttcttccgtccgttggtttgtcttccaaatagtttagccatttaaaagattctttcaaacaaatagctctctttaatgttgcattcaatttctaaatgcagtaatcttgatactacatttatgaattctttctaataatataccttaggcttcccctctgcctacttttcctggattatttggatcagttattaagtaatcatctaagtttgaacatatgaaattttctttgctctatgaaaatatatcagtattatcctccaaagtcaagattacatcattctagcttatgtccctaggaacagatttgtccttttataattgtgatctattaattaacttgtaccatctattgaaatttatttcatacttttagtgaaatgaaaatttagagggcctttgttgagtcagcatatataatagcatgtatataaatgaaatactaaatgatatgttgactgttcatgattaagtgaagaaatagagaggccttgtgatttacttgtacttctttgtagattttattttgaagacagttttttttttaatgtcagagaatg

SEQ ID NO: 115073 - DNA, 1048 bp, Homo sapiens
tcaaaagttctcatatgtttcatatttattttcataatttgattatatattattgcatttaaagtttcttttttttcataccattgtttagagttggcaggggaagtgagaacagcctgggacaaataatgctgaggagctttttaataaaattgaattagtataagcttgccaaatgttttatcagagcaaaactgaaggtataattgattatacataagtttttaatatacatcaaatattgaattgtgcatttcctgtaaaatcagtgaaagagaacttttaaaacaggtgtgctgctgaatacactcacaaagccatttgtctcccactaccttttgttctggggttttactgcaccaagatgttttatatataaaatccataatatatgctcaagacttgcctattatagtcacttgctattttagaaaggtaaaataatttgaccattaaattgttttcttactttattattttaaggaatcaagacagaatagtacagtggaggaagattctgaaggtgacaatgattccgaagaattttattacggagggcaggtaaggaaacctggtcttccaaatacctagtcttaaagttctaatagccatgttgtcctagtggtaatctgtgcctgagagttaagggacctgtgtgttgttcagggttctgtaactaactagaaaatctatataatttatctttgcacattttctacctatttttagaaattaaggttcccctgcagtcctttcaattgtaatcatttatttacattgaagtcatcttaattcattacagcgattttgcagatagtattttattatgcttttgacttgaatttcttaagcatgttgtgttcagtcactattctgagataatgacacttgtaataaaagtgtatattgttagttttaaatagaagctggttaacctttattaaatttgatgggcccacattactgagcatcttcatcatttgtttatttgtattcactgccattgaattcttggtgttgaaaaattgttatgaagaatcatcataat

SEQ ID NO: 115074 - DNA, 1032 bp, Homo sapiens
gtagataagactttgaatatatttgttattattttcttaggattaacttctgtgagcaaagtgtggttgtagacagggccccttcacactcctgaaactttacttgaacatcattcatcatctttcctcatcattcagtttagtggctctttctttttacatgcctcacgattttatttattaaatatttgccagtgttcagggtcattcaaattatgaccattgggctgtgaggtttgttttgaacagatctgtgaactacaaatggttttgctttttaaaagggttggagaaagaaaagagagaaagagagagagagagcaagagagaagaaaagaaggaaagaaggaaaaaagaaagagaaagaaaaagaaaggaaggaaggaaggaaggagggagggagggagtaaggaagggagaaagaggaaagaaagaaaagaaagaaataacgaaagaaagcaagcaaagaaagaaaggagagagaaagaaaacgaaggaaagaaagagaaagaaaagaaaagatggatgcggcagagactgtatgtagcctgaaaatcctaaaatatttactctctttaccttcacagaaaatgtttgtggtaccctgaactagaggcagagatgaaagtgttcatttgcttggcccttattcttgtcatactttctgtatactttcataccgaaatttgcacataatcttatcctttaagattaatgtttatcatgtagtacagacattatagatgctttgatggtttttaaaaattaattcctatgtaaatatttattcatttatttatgtaacctataaaaatattaccatgaataaaaagtgcaatttccttaaaaatggaaatgtgctctctctctctatatatatatatacacacacacatatatatacacatatatataatatatatatattcatttatttattttttgagatagagttttgctcttgttgcccaagctggagtgcaatggcacgatcttggctcactgcaacctccacctcctgggttcaagcag

SEQ ID NO: 115075 - DNA, 1097 bp, Homo sapiens
gttttggtctttgtattattaatttataggaataatttctatgttctggataaacatttgtgtctagtgttatataacccttctttctctctttctacatatgtatcatacgcagttttctccggtaaaggcattagttctagtgcatttcggatttttctacatttttgtagctagatctcttttgtttctctgccctcatcttcccactttttctgtctgcctctgaagagactgtatcttcttaaatcttcttagagaaaatacagtgctttctcatttaattccactgaggttttcaagatgttagaatgttcttattcacttttgaattttgatagccatgggtttaggataagtgggattggagtgatgtttactctataccttactctttgtacaaggattagggagttcttaggaaacgaactaattttttggggatacaaacacccaatttccttgattgatggagcatttgtgtcccagagtagtggccaacaggggataccatttggcttacaatatagagcatgtgtgatctgagaaggtcctatgagcaacacaatctttgctctaattatctgctgccccacctgttgctgtgaatggcactatctaagctcttatatgtcatcttttcatttgcacactagtctctgttcgctttcacctaattaggacaccatcccagcaattcagttctcctcctcctccttcttgtactattcatttctctttttctcttagaagattcacatcagcaaatatttctcttgtcttaaaaaaataaaataaaaaccctcttgacctcaaatgcctcttcagtttggaccctaacactctgcttcttttgactgttaatttccttgattagagttgtctctattagcttacttcattttcttttttcttttctctctttgaatccactcaagtcaggttttggtcccatcatttctcaaacactgctcttgtcaatgtcatcagtaacttcattcttgccaaatgactcataacctatttgggttttcatcttaattaagttagcagtatttcataacagttgtttacctcctccttgaaaatcttttttt

SEQ ID NO: 115076 - DNA, 1048 bp, Homo sapiens
acggttcttaccaagattcagctgttgattctgagtaagtactccttgggttgctgcaagttttaaaattaatttccagaataccaaaagagttgactcaggccatttttgccagtttcttttaaagattttatagagaggtggaagtttgggttcctcactcagcttttttgctgatatcattccttatttcaaagttttaaacaagcaagttcattgtaccatatctgcatagtattcaaggtccagcttttgagttaagaaataataaaatatagataaatatgaaaataatgattgagctaatatctatcatagttaacagaagaaaggaggttattgagggttgtgtgccaggcactgtgggtagatatttggcctattatttttttatttgatcatcacacaactcttgtggtttaggtacttttgctttcatgctgcaaatagggagactaagatttatagaggttaagcagtttgttcaacaccacccggaaaatataggtagaagtttggctttgaacctaattctctctgactttaaaactgcatcacaaacatttaatttaatatttgataagtagaaggcaccatgctagattctgttacactttttaaaagaaacctgtcttgccttttggaatatatgtttgaaaagataaaacacaaaacttggaaagcaataattttattagaccttttttgtatttcaagatttatacttttaaaaaacatgtcttgtagccatttaagaacacaatcatctgtcagatattttattttatttgcttaagggaaacaatccgtgtactatttttttgccagtcaacttttctctcagagatatgttattctgaaaccaaaatcaactaaatcagcatttaattatgaaataactgcaattttgtcatttccatttgttacagagaaatgtgtccttatgagaatagggggatttctctggtcatctcaacctgccccacttagatgctatgttttcactttgtcagtactcacctgttgatattgatctattgcttgttcc

SEQ ID NO: 115077 - DNA, 1021 bp, Homo sapiens
gcgcacatatttagatcttgcttgaaaatgaattgtcagctatgtgactgtatgctatcatttgtatactgtcaaccatactcttgttaacaatattcaactcaaaataaaataaaagcggttgtgagatttgaagtgggtttttgtattttaggattctatgttgactttattcattatggcttagtgttttagtggtgaaagcctgaatcaggagccccataacttttttgtgtttctagattttttccgccatggcttatagaaggattggcattgttttctttgtttcttttctctgactgaagtcctggagccatcttattatagtcttcccttttatgtacaccaaacagtcatttctttcaaattgaccccagtggaaaattcacatatggaaataatatatttctctagtgatatacagacttgcaagagcttataagcaaatgctgttttttaacatcactttttcattaaacagaaaaagaactatgatcgagtaatgaaagcactggatagcataacttctatcagagaaatgacacaagtaagtatgtcatctggtcttgtacagtatatttttaaaatgtctgagagttctagctatgtagtgaaatgtagacttctctataatacatatcatttaaaaatttgtgcggtattaagatgttttaattaaatcacatcagtgtactagcatgtaacactgtgacttcaggaaagtaagtggataattataagataattatactcctaatactctgccctcaaactcgggcaagagcttgggtacatgtaggtatgtcgggatattttaaggcaaaggttaaatctggtaccattttcctagactgtcaattttaattgatggtagcaatttcaaaacattatttgagtattaaaaacagaaatgttctttaaaatggaacttttccataaatattttatataatgcaaaatcccaaaaccactttggaagatgccaggctcccggagagtatgggtttatgtttttggt

SEQ ID NO: 115078 - DNA, 1049 bp, Homo sapiens
tggcatttacagagtaagctaaaatttgtgaatattacagacaaaaaaacttacataatttgtcttaattagaagaaatgttaaattctgcatagaatttaagaacaaataacaacaaaagttcagttgtaatgtaaaaatatttttctgacattgttcacatttcccaccctttattttctccttctcctagccagatagtgggaatgaaagttaggttctaaaagccttttaaaatcaagttttaagaatttttaaattatattaattttatgcagaagaattttcgatccttgctttcaatgcaaaaaaataactttcccaggacttcccaaacccactgatcttccacctcaggggctaagggcacagccctttgttactgtctctagcctaatgtgatcaaacctttacctagaatggaactttgcatagtaggtcgattgtactttcagctgcatcagacagctttgtccctaaattattattttgccgatgttttcagggatgaacaagaaacagaaggtgtcagccaaggacgagccagcttcaagcagtaaaagcagcaatacatcacaggtgttgtagtgactttagtgactgcttatgattagtgaactgtggcctcatcagccagcagagcatggaaaaataggctttttaagtctgaaaaattatttaatgtggtcattacttataaaggaataaaactcactctgaaatgcagtaactgaattgcctctatacaataattaatcaacagatatttatttatctcccactataataccagagatactcctaggcagtagagtgtagtgatggccaaaagtagacacatattccgtctcttggagcctacatcctactgaggggtataaataaattaaatacatatttagatagatagaatgctagatattatgaagaaaaataaatcagggaaatgagacatttaatgctgtcaggtggaagagggatctgggatgaatgttaaatgggatggtcaggaaaggatactctgagaaggtgacatttgagtcaagacc

SEQ ID NO: 115079 - DNA, 1047 bp, Homo sapiens
gaggcaagagaattgcttgaaatcaggaggcagagtttgcagtgagccgagaccacgctactgcactccagcctgggtgacagagcgagactccatcttaaaaacaaaaacaaacaaaaacaaaaatcactatatttttgactaagagaaaaactacaggacatactgtagtaatagcaatcacaaattttttggtcaaaattttctccatattttggaagaatttaattctgcttaacagcagtacattggatcaacggtgtcattcagtggaaagtagcggctaatttccatgcattagctacagtttttccctgatctcttagagaggtgagtctgataaccttcaaagcataggcaaaatcagattctttaacaatgtttagtaatattaaattatcttcatgttagcccatgtttacatgataccaaacagatcatatttttaaggactattccagcatcttgaagcaaaacagtttctttcttaaaatgagaaacagagcaatacacaaaagtaatacagaaaagtttatttcatatatatacatcgaagagtgtatacgctctgaacctctagtgttaaccaagatcgaataatgagtttgatataaaaaatttttcattttatagaaacataatattttggagctttggacaagggccttactagcctggtgaatttttgtctcattggaatacatacactgatgttttgagcacagagtaccttagcacctctggggagtttctactagctgcgaggtatgaaccaatatgataaccaaagtccttatctaatcgaagttactggagaggactgtggcccacatgagttaaaggtcattctgggagaataactggtctccatgaaagtgaattgatacctagttctgtataagaacccccaggatctctccttcaagatgattactgtcctgactttgactcatcctggtcaattaactctgggaaatggggaacctaactttagagggaagtgttggaaaacacccccaagcaccaatacccataatatgaggtcta

SEQ ID NO: 115080 - DNA, 1054 bp, Homo sapiens
attggtataaactactcctaaagttttagaactgggaaaaataagaagagaaagtctttacttagctgggattttcatgagataatgaaataaaaagagaatgttaaatgtctagcaaatttatggagtaaacttcgctgaaacatatgaagccttactagcgcttttggctttaagcctttgtgagctgattaatgggtgttctaggagattattttgcctaacttttgtaattgtgattctaggtacatgcctcctccggacacaagtactccctgaaagaggccctttgtgaccctactgtggctagccgcctttcagacactaaagctgctggggaagtcaaagccttggatgacttctataaaatgttacagcatgaaccggatcgagctttctatggactcaagcaggtggagaaggccaatgaagccatggcaattgacacattgctcatcagcgatgagctcttcaggcatcaggatgtagccacacggagccggtatgtgaggctggtggacagtgtgaaagagaatgcaggcaccgttaggatattctctagtcttcacgtttctggggaacagctcagccagttgactggggtagctgccattctccgcttccctgttcccgaactttctgaccaagagggtgattccagttctgaagaggattaatgattgaaacttaaaattgagacaatcttgtgtttcctaaactgttacagtacatttctcagcatccttgtgacagaaagctgcaagaatggcactttttgattcatacagggatttcttatgtctttggctacactagatattttgtgattggcaagacatgtatttaaacaataaactaaaaggaaataatctccacgtactaccatcttgattaaattgtgtaattttttataggaattatgagttatctgtagtacttggaaacagaaaatgtgtgtatttaaagacgatgcctatgcagtatattgtttgggatagattgcaaaatttcacactgcatgctttgaaacagttttccttagaaaaagcttttg

SEQ ID NO: 115081 - DNA, 1032 bp, Homo sapiens
gagaacgatggtttccagcttcatccatgtccctacaaaggacatgaactcatccttttttatggctgcatagtattccatggtgtatatgtactacattttcttaatccagtctatcgttgatggacatttgggttggttccaagtctttgctattgtgaacagtgccacaatagacatacgtgtgcatgtgtctttatagcagcatgatttataatcctttgcatatatacccagtaatgggatggctgggtcaaatggtatttctagttctagatccttgaggaatcgccacactgtcttccacaatggttgaactagtttatttggtttacagttagtaatacagttaagagtggagaccttccttgagttttcattctttgagcttctttttttttaatagaaacagctttcgatggtaaccttaaccatgccttccataactcaaaacatgatggactcttagttaactctatgtaactggattttgtttttctcctaaagttgttctacgctgctgcgtatcattcaatgttgatgtgaaaaattcaatgactttcagcggcccggtggaagacatgtttggatatactgttcaacaatatgaaaatgaagaaggaaaatggtaagccagtgggttttgttgttgttatttacttatttcacaaggtaatgagaaatattatttgactacagtttcttttatgaatgaaactttaacagaatgaattatttatggtagaaaatgcagtctagtcatttggcaatggaagctaacttaaagtaaaaaaaaaaaaattccttggcaatattagaggaagcgattagtgatttctgttgatgcctggattgacctcaaggaaggtctgtatccaaaaaagctattgttccataattatgttttttggcaagaattctttaattgttctcatttcagagtagcttaaatgcacttgtttgaaattcagtaggaaggattcggaggcaaatgagatggtgctctgaaagggtttaacacacttccgtgag

SEQ ID NO: 115082 - DNA, 1037 bp, Homo sapiens
gtgactcacgataataactacattttgctttttgacccagtgcacataaatatatacatataaaaataaggcaaagtttcacaagataattcttattacatgtgatgcactgtgatggtttctcatcaattccattctaccctaatctctttcaatgaaaaaaaaatgctggctatactcagtctgttgatttcatgactgggtcacaatccgtacttagaacatttgatttagaggtgataggaatctacaggccagccagactgaatttctgtgcctcccttttcccctggcctctttcccctgtgcctttagaaacagaacactctaattgtttatgagtctggagtcccagctgcttctgaagaactcagctgtcttgtgctctgtgtacaagtcatttttaagtggctttggtctctcaacagctctcccggtgtcatttaccaataaaccagattatgagcttggctggccttaaggaaaatacataaggtcttccaactaattgtgtacttttaatttttaataacatgggctaagatatgatagaaacaatctgtaaaaataatttaaaagaaaagttacatagttacatttgatagttcaacagaatacagtgtcatttctaaatctccttttaagtaagcaagtaacctaaaactggcaaaaatgaagcccacttcagctaggggagggggagatcaattgcctgaaatgacatttcagattatttctaacctaactacaccatggattaaaggtgacaggttgaagagcccaaacactccaagaagtctctatatttaaatatgacatcattttataaggaactttacagattacaaatgtcttctatatcatctttgttgctacactacaccaaaagcagtgttttgactagactatttcttatttttttcatgagatatttaaaaaggctttatttctttgttgctcgggaaatctccatttcctgtcaacatgtatcttaagatgacaagtagctgtgattatgaaatttctgtttgccaagg

SEQ ID NO: 115083 - DNA, 1066 bp, Homo sapiens
ccacttaattcaacagctaatgaagatatctgcctttggaaaagcatatttagaaatgttgaagtagtaggtatgtttggaaagaaaaaaaaatgtttaaaactaaagactttctgtcttcccctatgtaaccttgcccatgatgtctctcgtcatgattgttaaaagaggagccattgaaatagatgtgatattcatttgtctgatttattcaaatatattttatattcgtatagtagaatggtctatttttaatacctgttatgattttgttttttaggaaatatacgaagagtcatcaacttggaaaggaaacaaagagtgcttttgggcatccaacagttaatcacttatgtttttagagcatgcaatcttaactttgttaaactattattattgatcacattttgatttttttctctccacatcaggatagtttactgaagcacaatctcttatactagtgggacaaaagggagaaaaaggaagcaagataaatgggtatgtaggatgaagggttatttaaaatggaactaaagatagaaggaggactgtaggaagaaatggaataatttaaatgtgaggaaagatatctgtggtagacatgtccttccatgactaatttctaattgtaactcaacacacattgaggtatgggccctcctcagtgactttaactagctcagaaacgtactcccccaccaaccccacctcaccgccccccatcccggttctgggagagcattgttattaaggatgcatgacaggaatgttggcagaactggaaagtattaaaaaagcattatcagacagtcttgatattatacattttcagaaatatattaaaaataataaactaaaacccatgatttcaaaagtttaaaaagagtattttctttttttttaaattgcctaaaatagttctcattatggagatttctgggatttcagaatctataatcttaccagaaaactttttgttgttttttattagttgttaattttgtatcaatatacaaatcagcacaaaattgtcataaagctaactagcaacaaggtggtttgt

SEQ ID NO: 115084 - DNA, 1078 bp, Homo sapiens
agaaagaaaagaaagagaaagaaagaaaaaaaggaagaaagaaagagagagaggaagaaagaaaagaaagagagagagagagaaacagatcaagcaaaaggcacttctgaaaaatgaaagcaaaaaagcaacccggcccagcccggagctaccccgcgcggcctccaggcgcagccagcccgacgggcccgttttgcaatccgccagaccggagcacgcccgcggccaccgcgatctttcgaaatctccgagggctgctttcctccgcgcccacgtccgggcaccaggcagagcctctcctctaaaggcgggcaacccagcgcagtgccatgcagacggcgaggggcagtgcccaggagggcagtttacaacatacttaaaatgttaacgctgaagcagggaaagtaatgccttaaggtggggggaggggggagtcttcctaccatttcacggttataagtacctatctcatacctagcaagaaatatttgcaagtgatttctccctcttccccctttttaatgttcggatttgggtcgagaagacttctcatgaatcaccaatatgactttaacaatcattggatcgcaagctgctattattattttaaacattctgcccaaagactaattgaaataaacaaatctatttttaaaaggcaagcttcagaaatttgctcttaacccatttcagaatttaagtcagttatgggctgctcactgttttacagaaagctaagggtcagaaagaagaatgaggcagaggggaaaaaaactgtaaagtgctcaaagcactttggggtaataatttggcttttttttttttttttttttttttgcgagaatgggggatggggttggaagaagcatccactaggcagaaagctacttcccttgaaaatcttcagcacccacatttccaagtttgggcaaagtttctgaaaccacgtcccccagccaccaaataaaattcagtatctctcccccaaacccccaggttttcttttctttctttccttttttttttttaagtatccaaaagatgtgggagggagagagatgagactgcaaatgggtcg

SEQ ID NO: 115085 - DNA, 1034 bp, Homo sapiens
ctgaaaaaaaaaaaaaaaaaagacatacaagaagaaatacctcttttcctgcgtctgaatgcagttatatgaggacataatgcctagaactgtggcatcttctgaactagaagggacaagcataagagcttagctaacaagaaggggtggaggaatagagagaggaaaagagcctagggcttagttgacatcattgagccaatcctgaaccgacttttaaaccaaacctgatgaaaatacctccaaacttcctgttacatgaggtaataaatgacttaattgtttaaacctccattagttagatattctgcatccaaaaacatcttttcctatgctcttacatgaaaaatacttctctgacttccctttatgtcagctctttctgtagactctcctagcatcacatcttccttcttcgtagcacctctcatgtctcagttttaatacactatcattgtcactttctctacaatgtaaagtaagttatctgaagacaaggatcatatctgattttgattatcattttcccagtatctagcctagtccctcacatatagcagcctccaaaggatgtatggaataagtgaatgaaagtaactggaacttttaaaatgtcaaaaaaatgaaaaaaaacagtgctatctctatttgctattttgcttaggaaaagctcatacaaattaatgtgattgctgtcttgggtctatagatcttattggtttctaaaatttcatctttgatcagttgccatttcctgaagaacttggtgagatattggggacaggagctccacgttgctggcaagagatcggaaaagataaatttaccttttactgggcttgcattaaaaaaatgtaataacctctttcatttccttttttcttacatttcaaataaggatatagacctgagagtggaacagaaataatttgctgtgtgcatttttttataacttcaaccaaactatgcattctaccagtaagcgtagtaaaatgcctatgtccaaataccattttattatttcaaataggagt

SEQ ID NO: 115086 - DNA, 1030 bp, Homo sapiens
tctggcaatactttggaaaagtactactgcaggttctcaaggacccaaagagctctccagcttttccagtgggttcagccccaaatatcctaatttcttcaataaattacgagttgcaggtgtttaaatatgcaagtatattttggtcttttcgttatcattgtaaaacaccagtcctaacaagcagtaaagattacactttatggtggtaatatttacagttaatgcacttctgcatttcttcccgcacatttttcttcttacttatttaaactaagcgtttcccctctttttttaagccccagtattaaaaagaaaataaaatcccaaagaatttcgcaacattgcgattgcactggcttgagaacgaaggaagttagtcccttgcggtgatccgtcctttcatcctggcgtttgcctgcagcaagatggcggcggtgtcaatgtcagtggtactgaggcagacgttgtggcggagaagggcagtggctgtagctgccctttccgtttccagggttccgaccaggtaatagaattttcacacttttcttcaagcttcttgggtccctccatttttgcggagtctctgctggctgagttccggaggaggcctcggggaaggcgtcctctgttgacccttttctcgggagaagtcgggcggactagggactgtctgctatcaatgggcgttggccaggcgagtgagggcgtgagtgcgaggccggggaggaggacctgtggttttctggaagctttcgtattcggcttgtcgctgagggagagggtccgtggaggttttgcctccggagctgcaagctgaaccttagccctcagagaaggggaggagtctcactgatttctgtttccactttctgcatcccttccatttgtcacctgtttgcccaccactccagtccttacagaagggttaaatcactgtatcccttccatggttttaagtggttttaatttggtttctgcataggaagattgtttattcatcagtctgcttgggaggaaaacttgtttg

SEQ ID NO: 115087 - DNA, 1479 bp, Homo sapiens
tcaagttctattttgttgtctgttactaagtattttggtaggtaaatatgactttaggttctttagaactagttagttgctcaaaggtaaccttttcttcttgtctgtactcactagacttaatttttcttttatgggctcattctccagttcactggtttttaaacccttgtgcatcaaaattatctgttgggtgcctaaaaaattcagatgccttgccccccagtctatattggttcagtaagtttaggttgaggcttagctctatggtgattctaatgggaagctagggctgaaaacggattaaaaaaaaagtttccatattatatcttgtaagacttaggaaatatatttttccttgggagagagttcagggagatttccagaaacaaaaattcttccatttttgcatatttttctattctaaattaagttttatgcttttcacccatgcacataagaggtattttcttggggaaagtttccttagagggaaaaaaggcattttgataattttggagaaagcaggccatattactctctctctagagactcttattcttccttttggaagggctcaggtttaatatagcacagctgttgaactctgcccttcaaaattttaagaaagtgttttatcctttaaaatggaaaaggcttttttaggaaggtggtctttcactggatgtagttctctaagaaagtttcatgcttctctactcttttgtgtttgaatcgtttcaaatgttgagagaactgtctctgggagtaaaatctggctgcttttgcaatatattttctgtattcttaaacaaagctatatgaagagtttatttctttgtgttttctaggactcaaaaatatgttttttcctttattcagccacttcacacataagtaaatggtccttgaatagggcttactggacaaaagattctgttctagatgactgttcagcaagccatatgcttctcctaaaaatgtcagtctgtcttgatgagctttaaagtgaatacagatgttttggctcttttgaggactaccactctttgtatggaaagagtacttctttttcaagtgatctcttcaatatacttacaggaatttgcatgaaatttatgacttttgccttttaagtctaataagattagacttagacatgtgtaatttgaatttaattttaatattcgtagtacaaatgagatttggggaataaaatacatttcataatatggctttttgttcagattttgtattcaaccttttaaaaaatgtgaaagtgctttgtaatatttacttttgtgcaataaaaagtgatattttggcaggcaaggttacctttttagatgttcagtgtcttctatctttgtaggttaactctggagttatagttcatagatttatgtaatatttaagttggaagaaaactctagaatcattaagtccaaccctttatttaatgcaagaatccctagaact

SEQ ID NO: 115088 - DNA, 2067 bp, Homo sapiens
aacatttgagtcagtgggctgggaaaggcagacccacccgtaatctgggtgggcaccatctaatcagctgccagtgtggctagactgtaaagcaggctgaaaaacatggaaagactagactggcctagcctcccagccatacatctttctcccgtggtggatgcttcctgcccttgaacatcagactccaagttcttcatttttgggactcgggttggctttccttgctcctcaacttgcagatggcttattgtgggaccttgtgatggtgtgagttaatacttaataaactcccttgttagttgtgtccctctagagaaccctgactaatacagagaagaactggaatatgggtgcccagctggaatgactaacaagccttttgaggaatatagagaattacgcatgattgattggtagaatgatttttttaaaaaaatgccaaatagctttgaagtaatcctgttttgattgaattaagggtcttgttgctgaaaggtgaactaggcagtttagccagaaatgtccagtagaggagtaaactggttaattggacatccttttccttgtgttttgtctgttacattttcataagcatatttaagatttgctcttatgtgcttgcttataacataaatctattaataaagattcacagttatcaactatttttatgtagaacatgttggataatgatgctatgcaaagtctaaaaaatcaagaggttaataattggtaggacatataacaaaaactatctcatattttgtgttacataggcaagcactagtagtttttaaaaagtatataatttgggaaaatttgttccatgaggcagtacaaatgaataatcatattgaagttcaacagcttaattctggacttctgaaattttccaaggagatgagtgattaatagatacaaacatactatttttatgtacatatgtgaagagactgtctctaggcagttataaatcttcttcatctttgacaaacttttgcatatgtgtctttattggtgttgtaaaccagggattatctgtttcttcacaaggcatgctctttttaaaatattgtcgtggtttatacatactatgaaatttaccattttaactatttttaagtatatttcattggcattaagtacattcacattgttgtgcaaccattaccatcatatatctccagaactttttcatcttctaaaactgaagtctgtacccattacacagtaattctctattcttctctctcataagcccctggcaactaccattttactttctgtttctgtgagtttgactactttagataccccatataaatagaatcatatactattcttttgtgattggcttatttcacttatcacaatgtcttcatggttcttccatggtgtagcatatatcataatctgcttccatttaaggcaaaataatattcaattgtatgtatataccacattttgtttacacattcatctgccagtggacagtagggttgcttctgtcttttggctgctgtgaataatgctgctataatcatgagtgtacagatatctgttctagtccctgctttagtttgtctgaatataaatcccaaagtgaagctgctggattatatggtaattttattttaaatattttgaggaatcacactactgttttctgtaatggctgtgtcattttacattcccaccagcagtgagcaagtgttccattttcttcacatccttgccagtacttgctactttttgtttgttttttttggggggggggggtgataataactatcgtaataaatatgaagtggtatcttatggttttctttttcatttccctagcactcttttgcatgtttttgtgtggacatatgatttcagctcatttgggtaaatacctaggagcacagttgctgatcctatgttaaaactatgttttagctttgtagaaaactgccagactgtcttccaaattggctgtaccatttcgcattcccaccagcgatgaatgagacttctgttctcttcatcctttctcaaatttggtgtggtattttggatttt

SEQ ID NO: 115089 - DNA, 1027 bp, Homo sapiens
ctacaggactaaactaataacattagttatacaaatcattcctatgtaaaatacttttggtgtgaaattagagtgaataaactttttattatgattgggatttttttcttttcgtttctgatgccatccgtttaagaatcagtgttccagaacaattggtatagctttgcatgtttctggctggtcgtgacaaatcagccactgtacactcatagacagcagtacagtacttgtcactggtggcctttctgtgacagagagcctgaagactgacgtaaagcgcagcctgttgtgaactgtcaagtgagtctgccaaaaactcagcagacagaactaattgcagagaaaaaggacttttgtgccctcttctctttctttcctttcctttttttttttttttaataagacagatattgttaaagtagcttgtttatgtaagatttgtctgtctctcctctcattgcctggatccttttttaacttaaagtcttgcactgcaggtcgttgaggacttccacatggagattggcacaggaccagactcaagacacacaactcataacagttgatgaaaaattggtaaggattttctactacacactgctatggttctgccttcagggttatttttgtactatagatattcagtatggtgttccaggttttcaggaaagtgatttgaatttgaatttctagattatacctaaattttaagaagaaatatttgtcatcaaaagataatttatattaagcattataaacaaatacaaaaccatatgcaaatattaataaattaaaattatgaaaggttttcatttttgtggtgtttataactagcagaacattcattactttttgtaatgaatgttttgctttttattttctcagttacactcctatttaagttgtgagatacttgctagtactatctaaaactaaatatattaggttttcttggaagcatgcaacatttattatcactatatgtatatatgtatatgcatacaaacacatacacacacatttt

SEQ ID NO: 115090 - DNA, 1028 bp, Homo sapiens
aagttctataaaaattctaacattgtgtactatgctcaatacttggttgatgggatttatctgccacaaatctcagcatcacaaaatatacccaggtaacaaacatgcacatgtacctcttgaatctaaaattaaaaattgaaattctgtaaaaaaaagaaaaaaaagactgttctagtgggattggtaatgacactaacggatgtgatttttgatactgtgtaatgcaatatattaacgtttggaatatctatatacctctatgaactagtatttttcgtatgaccagtgcatgatataaaatcatgcatgggtaaaagtttcctttaaagtacaaaatagagcaatggattttaagtaatcaagtatgaaaatattaaggctatgaatattttgctcctttttctaactacatatctgtatgataatgagttttcttcatatattgcaataaaaacaatccaccaaaacagtttgaatgcaagaacagatgttagaattcagctgtcctccattaagctagatagtagattttcaaacgagtgccaaaatgcaaatgagtgccactcttctcacttttcagttttcaaaaatagagttttttaaattaaaatctttatattattacataactggcttattttacattaaatttatattgttttcttcattttaatttattatgtgatagatatttatggatatacaggcatactttgaagatattgctggtttggttccagaccaccacagttaagcaaatgccacaataaagtgagtcatgaaattttgttttggcttcccagtgcatataaaagttatgtttctaccacactgaggtctgctaagtgtgcattagcattatgtctaaaaaataatgtacataccttaattttaaaacactttattgctcaaaaatgctaacgatcagctgagcctttagggaatcgtaatcatttgactggtggaaggtcttgcctccatggtggtggttgctgaaggttggggtggctgtggtaatttcttaa

SEQ ID NO: 115091 - DNA, 1099 bp, Homo sapiens
acaaaaagataaccttaagttaaaggcttacttttgctttgactgtttactttttttttccccctctaaggggtcagttttcttttggtgagattactttcttttggtgtatggcagtgctatctctgctagattactggaaggagtagtgtctgcgattggggttatacagctttctagcatctcaagtgtctgttttgtctggactttactcacgcagcattcttgtgcaaaaatttcaaggctttagtctggagcactgggtcaaaggatatgtctctttgaagggtagacaggagttttttatgttttattcactaagtagtatttcattttacatcaaagaatagcagcctttgagaacctaccatggtggcagtttagcgtgtgggtttttttctttaagactttcactaaatatgtataatgtttcttcaagtgtttcatcctacaaaatgcctatttttattcttagatgaaacttctaatataaaaagagaagaatcatgactaaatataaatgtttgttgcaataaattttgttttaaaagcaactatagtttttttttttttacaatgtatttccctgtgtcagtttttacactacccacaagctattgaaaaaaaaaaaaatggatgaatagcctttaagattgcagcaatactgttgcttaaaattctaaggaagcagtaatgactagtgattttggaagtgtagatttcatagtgaaatggtcattccttaattgttccttttttagtactgtcatgtgtgtatgtaggagagattgattttgaaaaataccagactcaagtaatggaaaatgttaagacttcttgaagctagaaggaaagctcttctttttgtactttttgtgtaagttaatcagtaaataatcatataaaaagtgattgctttacatgtttggaagattattacattgtatttcatatttttgtctcatgacatgtatctataaacatgaactaatattaaaagttttttatgtttataaataaaacatgctcttaaatagttgaaagtttatcaaaacagttaatcatttaaaatgaattttttctactctccttgatgtaa

SEQ ID NO: 115092 - DNA, 1057 bp, Homo sapiens
ggtatgcagatagatccctgatgctttattttacactctatttgaatttggttttgggttttttgttttgttttgttttggtctttttggtagtaaatagtactttgtttttaaagttatagctcttgaattagccagcttgccagataagtttataactcaagaattaatccaaatacttaaacttgttaaagccttatatctgccattttgtagtaagttctcaatgaaggtagggtgagaggaggtaaagaaatagaagtagtatcttttggtgacaattatattttctttttatatcatgtatctcagaatagaattagagcaaaagaaaggagaacgtagactttaaaatttgagactagcaaactttgattctatttctgtgttcaggttttctaattttatatgacctagtgtctgcttctattctactcttcaaaataccacctgcaagcatgtgagatattcatgttttataagatggggaagtttgaaaaatagggcagtgatatggaagctttactgtatgcagtatactatgtctccacaaaactgcttctttataaggcatacttttctagaaatgtgtgaataggctttttgttcagttgctgtttcatgtttaatactttacttctaaaggctttcagcatatttcatgttagttgatgagggtttttaaaatgttaatgcttccaataaaatagacatgaaaaataaacttggctttctctaaacaacatataggatacagaaatataccaaaatgttgggctgagaatgctaacttaaagaactgaggatctgattagtgtaccgatgtacatctattccagtgattactgagtatatattgtgtaaattaagatgtatccattaaagataatttttaaacctaattgggtagtttaagatttgacatccaaagaattaaaacaagatttctgatttagtatgcattataatatcttaaacattcaaatatggcagctatagcctgtgcctaggttgctctgagattagaagtcctctagatctagtagttttcatctag

SEQ ID NO: 115093 - DNA, 1049 bp, Homo sapiens
aagctattatggttaagggcaactttaaagaagctcaaaggaaatggttagtttgctgccattttaatttgaaggaacctaatttttgtctttgcataggttttatatacgatataacaatttggtgattttttttctattaaagaatcttctgaatttgaaattgctttttgagaaaggcagtattgggaccaggaataataaactcatctctctaattctccatagcccttctttctctgccctgcccccttctccaccaagggaaaacatgttaaagatttgtcatagtggtaaaggaagataagaataaattggctgaggtgctgtccaccagtttggtgctgatagcttcaaatatatttgagttctgcaccttgcttttgccagtggcatgggttgatggtgatagttgtctgtcttcatcttaactttgactgcacttcctcttgttctgcctctcctttcccccctcttactctctgcttcttgaaatctctcttcacagtttgtatggcttttcccctctgtcttttgacactctgtcttttgctgactatgtagctgtaggtcatctctctctccctttctggctacatgtgttttcctgataccaccttattcccttccatttttttcatttttcctgccttcccttctgtctctctctagttttggctttctgagtcattctttggccgtcattttttcccccactcccctgtctcttctaccgcccgttttcttcttccttccattctttttattccgtacttctgttccttttatctttcttcttctttctctcactttcccaaaatgactaaggagcaacatcaaaactagtgggagagacaaaaggtgccccaccctctaagcacttttttaaaaattgtcatatttcctcttttgtaaatatataggacttttagaaacatttaataactgaaaaatggtttatacattattacattatttgaaatgttcactctagtgagatacatgggataatggcaagatcatggactaattataaatatagccttaga

SEQ ID NO: 115094 - DNA, 1119 bp, Homo sapiens
ttaaaatcgggatttatgagtcctccagctttgttcttcattttcaagattgttttgaaacaaagatttcacgtgaattttaggatggatttttctatttctacccccaaaatgtcactttttatagggattgcattgaatctgtagattgattgctttgggtagtattgtcatcttaacaatactgatgtttccagttgatgaacacaggatgtcttcccacttacttatgtctttaatttcttttaacagtgttttgcggttttcagtgtacaaatctttcgttttctaagtttgttcctaagtattacattcttttctatgccattgtaaatgggattgtttttgtaatttactttttagattgttcattgtgagtgtatagaacataactgatttttgtatattgattttatatttgcaaccttggtgaatttgtttattatctctaacaggtttttttggtggaatctttagggattttcacatatgtcatctgggaacagagataattatacatctttacaagtttggatggcttttatttctttttcttgtccaattgctctggctagaacttccagtactacattgaatagaattagtaaaagtgggcatcattgtctttttcctcatattagaggaaaagctttcagtcttttctgggtttgtgttgttgtttggtgtgttttgtttgtttgtttgtttttgttttttgagatagggtctctgtgcagtggcataatcttgtctcactgcagccttgaactcctgagctcaagagatcctcccacctcatcttcctgagtagctgggaatataggcacacaccactatacccagatagttttggctttattttttgtagaaatggggttcgccatgttacccaggctggttttgaactcctgagctcatgcaatctgcctgcctcagtctcccaaagtgctgggattacagttttctgttttcttttatcatcattactgtgtaggtaatgtgtctttcttaagactacttttatgataattatcttatctttaaacttcagaaattttgttatactgtgtttttgtgtggttttctttacatgtatcttggttagggttcattaagatt

SEQ ID NO: 115095 - DNA, 1125 bp, Homo sapiens
ggtttatctgagacattgttttgaatcttgaataattttaaaaaacattcattaattctttttgttctggtgttaacaaccagtagcatgaaaaaatataagaataaaattattatttaaaatatttacttatttgatttgattagaacagagaattgctactctttttttagcattttaatgacacaaaaatagtatgtaattttactgcttggacatattgaattctgacttctctttgtgaaatattttaaatctttttctaaaattgttagaattgtaagctgaaggtttttcatgatcatctaattaaattttatcacttaactaagaaataaacctgtgtcccagataaattaatgagttgaccatagtttgggttctcagcctgcttatattttattttacaactatatataaaatactaatatgtagaatattaaaaatataaaatatttaaaacctggctagataagtccatatagacttgtattttttttaatcaggagaattactgtatttaatggagcaaagagaatgttaatattttaatgtgttttttgctgtgggtcaaagaatgattttaggatgtgctaaaagagaaatgactatccatcctatacctagaatatatttgtttccaaagccacaaggtttcctaatttaggggatcttgggcttaactttattctttttttttttttttttgagatggagtctcactctgtcgctcaggctggagtgcagtgggcgatctcggctcactgcaagctccgcctcccgggttcatgccattcttctgcctcagcctcccaagtacctgggactacaggcacctgcaccacgcccggctaattttttttgtatttttagtagagatggggtttcaccgtgttagccaggatggtctcgatctcttgacctcgtgatccgcctgcctaggcctcccaaagtgctgggattacaggcgtgggccaccgtgcccggccaactttattcatttcttctgatagatactgtctaggtctatcatattgatggaatggcttggagggtttaacagacatctaaccctgctgatgtaagagtattacagagggttggaagtgtgcagtataagaaata

SEQ ID NO: 115096 - DNA, 2121 bp, Homo sapiens
taaccaccgttctgacttctaacaacatagattagttttgcctatttttttttttttttttttacttaaagagaatcatcctttatgtgctcttttgtgactggcttttttgcttaactttgtgagattcatccattccatgctatttattgatggttatttgtgtaaatttctgtttgggtttttatgtataatacagtactaaaatgaagaatctcgtatatatcttttagtggatatgtggctttctaatatgctaattagtccctgaaatattagtcactagttaatattcaaacaattaatatagagataacaataatctattaattatctgatcccttatgtttctcaagttaatgacagtagcaacttgataagttttgttccaacagacagttaaattactgatagatccaccttgaacttgtggaggattatgcatcattggagtggatctgtttcagttttagccttagtcttggaacctagtgttaaaaaataaaaaggcacggcctttctgaagttttgatggaaagcacaaggtgtttacccacattctcccttcagactcagtctcccctgtaacaggcagctgctgaaatctttgctcaattctttcagccttcccagcttcattttgaaaccttgctgaatcatgtacagttcaaaagctccctgctctgtggatactctcttccagctgctctggcaatcctggactccgtctccaggctccttgcactgagattacggctttctgcttgagttctcgatgctcctagcttgtctagactagagaataccttatgggaaacaccgtataaagttggatctaaatccaactttagattggttccttttttttaaagattgaattctctagaagtttattttttttttctattagtcactctctggtctctgaaaattatttttctgttttgtccagagtttatagttaggcagataaatctgatataatattctgccattacccaaattggaacttcagtaattgagaaatgagcaaataaagtctaaaaataaaagaacaaattatctttagtggaccaggttgaaagagagattgtatacagttggaggagggtaggatatgaaagacttcatggaataggttggtattcaaagtgaagcatgagggattatttggatggacttccatgtgcagagagtaggagagcatttcaagaggaaggaacaaattgaactgatgggaaagtacaccttgcatttataaaaacaattagcaacctgatttgactagttggttacttctcaggggagtaattaaaaagaaggctagaaagtagttctgtccatattatagaagtgcttaaatgccaaggtagaagactgaagttaatgtgatagacagtgaaaactgtttgaaatttttgaactgggcagagagtgagtttgggatttgaactttaggaagacatcttggtgaagggtggattggagtcaaggaggcagaaagattagttaggatggggttatgggaataatgaaaaagagcttaaactggtggtgacagcatacctaaaaaagaactacaaaatacaggaaatgaaggagaatgagaagggtagaaactgaatggctggaagaatagtggcttcttccagtggatgaatgttgttactattggatatattggatataagttgttactatttgatttctatatgtatgtattcataaataaagtgaggataataataaaggctataccatctttgcaggaaacagagttctgatctcctggcttctgtcttgtttcttattctcaactaagccaatgtgcctgtcaacacttatcagattactgcatcatatttatgttgatacttctgttctcagtatatatactttaactatcaactggaaaatcgtgtgcgctttgaaaaggaggaaccaatataaaattatgatattattagtactaatatagccagccatatgaagctcttttgcttacaaagggtaggggtgggttatgataagaatatatataattataggaatctcagagtagcaaccatggtctgtgaccagaacattggcagcagtaattagtgggtcttcccgtcagtg

SEQ ID NO: 115097 - DNA, 1081 bp, Homo sapiens
agttggattgggtgatgtccaaaaactatagacttaaggatgttaaagcccatgggctagttcgtctttatttctttgctatctagcccagtgccttactcatatgctgtatagggggaaatgagtttttgttaatacagctgattctgtgttaatagtaaaatatgacaaaggttatacgtttatgggcattaatgcttgcctttcagtagtatctagaaataggaagttagggtaaaactgccacatacctacacaaaagatgatttatgtatcacttatcaaattgtattttatattaatgcagcctaaaagtatattagcttttgacagttatttgatttgtatatcaattatcaaatacaatttgttatcaattgtatttgagatacagttgattatttgtatatcaattcagggactattctgaagataaaagcctacctgttatctccttagttttttcatttcccttttaaatgtcaaataaaaagagaagtcatgagcatggtttcccttgacactaaagattgtagaaaatcaatacatcaaggggagtaagattttcagattcagttgctttctggaaaaccttttttttggaggggttcggggctggagacagagtctcactctgtcacccaggctggagtgcaatggcatgatcttggctcactgcaacctccacctcccaggttcaagcgattctcctgcctcagcttcctggactacaggcatgcaccaccatgtccagctaattttttttttttttttttttttaaagtagagacagggttttaccatgttggccaggctggcctcgaactcctgacctcaggtgatccacctgccttggcctcccaaagtgctgcaattacaggtgtaagccactgcacccagccttacaaaacatatttaatgccctctaattatattttgagacttgggtaataagtattgtcaccacagaaagtaacaaacactaaatcatgagccaggcactatgctaagtgcttttcattctcatttagtaactctgtgaagcaggaacagttatctccatttaattgttcaaggcaac

SEQ ID NO: 115098 - DNA, 1074 bp, Homo sapiens
tctctcttctttacctcacttcttatggaaggctggtgttctgaaattggggagtggaaaagaagaaaagactgaatgctccctatgacttcattttctccctgttcccactaccatgtccccaaacatactgacacacaaagaaaatataaatacccctgattcttttagccttaaacttagggcctcatcctaaacatcttaagctcagcatctattccaaaggaactctttaatgataacgtttctttgtaaagagacgaatatcatctggggtttcctctgaaatgtagatgaacctcacttcagttctttgtgtactaaaaagacccacccttctcacccatgtggcttttgtctttccttgtgttatgtaataagtgatggggtagaaggatggggggtggaggaagctacatcatggagagaggaggtagaagacagctgtggaaaatttggatggtggaagactagaatctactaccatttacatgctaatgaaaaccagaaatggtcttttttcccccgtttgatctgatttgaaagtttgtgacttttgtctagtatgtcattttaccccctgtgtttttctcattgttgttagctataaaaactctttgaaattctcaaaataaaggaaggtttctttcaggaataggagggctgaggacaagctgtgaaactgcattcttcatagtgggtctattggggtggaaaacccgcctctgaagtaatagaaggtagaagcacggaaggaaacaggtctggccctggatccaggaaaataaagaaagaaataattggagatgtagcttagtacttagaattatcccagaagtgaacaacatcagtaaggtctgggcttccacctaacgtaacctcttatgagggtctcaacctcacatccatatatcttttaaaaaaacaaaacaaaaaaaaaaactttcaaaacaaaggcaagaatcatgactttcatataggtataaattgcaagtaaaaatttattttactcatataagggaacaaggcaggtgttacaaccagttcagagtaaaagtcaaaacagcactaatt

SEQ ID NO: 115099 - DNA, 1100 bp, Homo sapiens
agagtcagagtcagcagagttctcttactgctttggattcaccttttagagccaagaaaagaggtatgcaggcttaagcataaggtacaccatttcttcgatgatgaagtttgcctgcctttggttgataaatctataggatgtctcaaggggacctccaaaatggttaaaagaaattttccagaaaaagatacattgactctagcatagatatacaataaacatgtattgaaggattttactcatctgatataagggagccaggcaaatgttataaccagttcaaaggacaagtcaaacagcacagatttatgtagggtaaagaaatgttgagatgagttgctaattgagacaaaactgatttttccaggactgggttgagaggggagtcaaatctatgagagaggacagactttatgtatctctcaattatagttgttctccttattcacagttatgttctttaaagtcactatgaaacactaaattagcaagaattcttatccctcgggatatacatggttaggttcctgcaggcctctggtcacatagtttgtcgtctgaccagtacataaccttgttttatatgtgtttttgtttaaagacaccttatttaatacagttaattcatcaacattgaactcacagccaacagcactataactcatgcctaaacaaagcgtatctgaaacacatattggcacatcacagctttcttggaacactagataacatttcagcagtgtttggggaccattttaaacagtgaaattaccaaaaagcagcacagaaatgcaaaatactggcactaaatagagcacaaaaagtatgcttgtttacagtatgagagctaaaacaagaaggcagagcattatcctgcttcacctcatttagaaatgtatgttacgggactcaaattttttgacattctccacatgtcacaaatgaccacagaagcaccatgggcattgatttaggagtcacaaataaactttacgtgaattcatgaaagattttttttttcatagatagctttttcctcccaatgtttaatcctggatcctgtctgtagctagggaagtactgctaaggcgcgagca

SEQ ID NO: 115100 - DNA, 1146 bp, Homo sapiens
tttacatatttttctgtatccctttggaagagttccaaactcttgtaaagaaaccaacttttagaataatagtgagttggttataatgttcatcgctcttcattgcaactattttaaaggcctatgttaaaccacatagagtaatggaaatttttatgtaatacatagatatcagtaattgagcaaggtgaaattgaatcatagtttacatctttaacaacttgagatatggtaaataatctgcaggcaatcttttggacccttttctcacagaggattgattataagggaacaaatagtaagtatatctcagatgtgttgacatatactcttgatgataaatgaacattaagttaagttataaaagctagcctctgcttgctgtgcttttcaggtatcctctttaattctgtttctgtggatttgtctttgttttttcctcctaggatggagctatgacattgaagagaggaaggttccaaaacccaagtccaagtcttatggtgcaaacttttcttggaacaaaagaacaagagtatccacaaaataggttggcactgactatatctctgcttgactgtgaataaagtcagctgtgcagtatttatagtccatgtataataaatacatctcttaatctcctaataaattggacctttaaactacagatacattttgtggtgtctattttaaatgttttttgatgtctcaaattgagcatgtttcaatttcctatatagagagaagatttgaggtgatcatacctctgggaaatcttggtacttttagaatctattaattaacaggaatgcttgaaatcaactgcaacattgaagttttatatttgctttttatagccattctcaagttaatatggtttataaatcaccagccaacattattaaaatgttgtcttagaaatggttttatcataggtagagaagtacacgataacattgcagtcttataaacttaaacccctatgtcgtcattattaaattaatttaattacaactttataatttacgaaggtactttgagcctgaatgaattgcatttcatagtaatctctgcccagaaatcaacacttcatgattatgaggagttcaggtgaagatttcatgttcttaggaattaagactcaga

SEQ ID NO: 115101 - DNA, 1089 bp, Homo sapiens
cctgtacttagaggctaacagattcatgtggacatttaccaggcaagaccaacttgtattgtccatgatttctacgatttccactatcttcaaatgaaaaataaacgctgagtagaactggtgttttcagactaactcctttcaactttagcatttgggagtcccagatttctgtttacgtttgtgtcgcctgtttgtctccaaaataagttctgctgctcttgggtcaaaacaaatgattaattcgcatttcctttgaagccattgtgaaaaccttaaaagaaaaaaaaaaaaaaaaaaagcaagtatcttttccagttggtttgtcttcagcagcaatttactcttattgaagctgttccttcggagtgtgtgaacagactcaagatattattataaagcatcatccttcaatcaaaggattattttataatatgtgctgtgaaattaacttgagtggcaaagtttggtgcaatgagttatttcattcaatggtgattgatgctgttaagtaatatttttaagtgactcgaggaaatactgtgcatttacagatccatccttaaggatgcaggtctaaaaaaagagtaagaaagaaaaatcaagtggtagatagatagaagaagagagaaaaagaaaaaaaatacgtaattgaagatgaaaaatttaaatcccagcttttgcttggtcccaaatgcaacgttatcatcacttagtatttgactacacagagagcttgcaacgtttcacttctaagctgggaatctaaccttcattcctaggtttatttctagtgtaggcaattagcagttatcaacttcctaagcatctcagtcctatccaagtaaatgtgaacagaactgtaagattttgaagcaaatggggttttcttcatgtccatattgcatattcagacttgaatggaaatctaatattcgtgcctggcttcatcctctttataactttagagtgcattttcattaacctcctgacctaatggcgcaaacagaaatgaaaaggtatgtagggtggtggggctggaagtgggagttgccctttgggatccctcattttcaatgcatttggaag

SEQ ID NO: 115102 - DNA, 1595 bp, Homo sapiens
ggcttgcacgcagatcattcacctctaaagaaaacactcccaggtcacaatatataacccacattataacaacagctgcggacaggcatccacattgcaaagttgtaggcatcacagttcgtataaattccgcctcgaaattcccctactttatccctcagaattttgatatgagaaagtttctgatataattaataacctatttatctttattttttcctcttaagatcaaaaaatattttgaacttgaaccacttgcacgtggaaaacgctggattctacagccctgctcactggatgacatggatgcactgaaagacagcttctctcagctgattaatttgttagaagaaaaagaccatgaagctgtaagaatgtgaaatctggcaaagaaaacaggctcccaaaaggccttgaacctatcatgttagtttctcattttaattttattttggtatcaagactatattggcttcagtatctattttcctctggtcatttcagactctcatctctctattaaagtgaatattctgtagatcagatgaattatcatcggcattaacgtcaagtacacactactgagagagaatttattctctgtttaccactaattatcttccccgcatgtctcttccttctgttgttctaagcatctcttctatactctgtgctgaaacggatggaattcatggcttatggaaatcaaatcccttttgaaggactcagaaagactcacaagaccttgatcattttctctgggtttgggagtggagtattatgtgactgggactccacaaaatatttatattattttcaagacctattgggggttttgttttattttatctaatttttttttttttttggtatactgagcttatagactatgagagaaaagtgagcaccaaaaacttcattaatcaccttatcaggaaggaatatcctgccatagtaaaattggctctgaagagcttagaggcaagttacacaatgttttcttgattacatctgaagtctcttctcttttaagagcaaagacattgtttcagtttctgagagtggttagaggaaatttaggtacaatgcatgcatcacagactgtatttgattgattcgagtcttcaaatattgtttaatggaatgatgagcctgcataaagtgaagctgcaatgtaacataggtatctttttctaaaaacttcaagtgtttgattaaaatagagaaaataatttttaaaataatagataaaaattttaaaaacagccagaaaaagtataatttatactggttagggtttaagatggcatggatttgacaaagataacaaagacagaatcatctatatattcattcattacgtgttactgtagtttattggaatctgttaatgccttcctctagtagttaaaggtttatcagtatttctattataaacctctattttcaggggtttcaatgtgcccttaaaattgtgctggggctgcagcaaataaataatattgggactcatattcagtctttggaactagttttttttccatttaatttaaatgacaaaattgcatagggataaatgtacagttttactaagg

SEQ ID NO: 115103 - DNA, 1693 bp, Homo sapiens
agagaatagttagttcagttcacttccacctccacctcatgtgcagaacttccccccattatgttgtacctcttaattgcttccatttttttctctttccccaggttttgtaggaggtaaaccatatcttggtgatgtacagggccagtggtcatgctggaacctgtcaaacccccatcccatagtacaatgctttttgttactgatccaagccctgcaacctaccggacacatttacagatttatcaaatcagtttgatagaagattgccccttctcatggtgccaaaaagcagttcaacctgtaagtaggttactacatatttggtgtccacgacttcatataagaagtcagaattcaagtatttcagcagctgcaggagatttcagcatttccgtatgttttatgaaaactataattgacttgctaaaaagtgtgcaggttacatgtgttgtatggatagatgagaagctacagtcaaacaggcaagaatttgtttctgaaatactgatttctctagagccacatcttttcctttttttcagtgaaagattagatgctgtgactaggcacctaaaatttacaaaccctatttcaaggactctgacgtataagtgtccttatgctaaatgtgacagggtatcaggaactaaaagtaagtttgtggacacatagaggcaaatgccatttacatgtatcatttagaattgttttgttattaacacttaccttctagttaaaaatagatcattggtacaagctatcatttgtcaggcattggaattatatgatttttgtttttaagcgcttttctggaattggcattttaccaaaggaaaaatgaatttggtaagaattcatttggaaagaaacagatgataatttcaaggtaaaataggactattctgcaaagcactaagattacctgctctctaaagaaatgtagtgtggaagattgtaatcagggcatgggctaagaaaagctcaggacattttcttgatgggtatactttataatagaattctgtttctgttctgggtctagaaaattggaataagttctatttaggaaatattttacaaatacattcagaataacattatgtttaatattttaactaatattatatttaataacaaggttttcagttataaccataatatgctttcatagagatgaatatttctacaggaaactgtaggggtgtgggggtgtgcacatgagcgtgggtttgagtattttaattttatttatttatactcgactgtcacaaaaaaggatttgaggtgatagacactagtattgattctgacagtggacatgcttttatgtaacactctaaacttcagactgaagtgggtgttaatgacttcccctctgagaatgcttttgattcagacatgatgaaaagtgtgactggaaatttagagcagaacgtgtagttaaaagcccactcatctggcctggtctgaactggtagttgaacagttaatcaagaactggctaaaaggccaggcgctggtggttcacacctgtaatcctagcactttgggaggctgaggtggtcagatcatctgaggtcaggagttcgagaccagcctggccaacatggcaaaaccccatctctactaaaaatacaaaaattaggtgggcatggtggcaggcacctgtaatcccagctactcaggagga

SEQ ID NO: 115104 - DNA, 1005 bp, Homo sapiens
cgctgtggctcacgcctgtaatcctagcaatttgggaggctgaggcaggcagatcacgaggtcaggagatcgcgacaatcctggctaacaaggtgaaaccccgtctctactaaaaatacaaaaattagcagggcatggtggagggcgcctgtagtctcagctactcgggaggctgaggcaggagaatggcgtgaacccaggaggcggagcttgcagtgagctgagattgcgccactgcactccagcctggatgacagagtaagagtccgcctcaaaaaaaaaaaaaaaaaaaaaaaaaaatatatatatatatatatatatatatatatatgaactcttaagccaacctttcaaccttcttctccatgcccattccctctagtctgcccccacccaagaaaaccaaatacacacatgctcacctacacatttgtcaaaatcttgactcttaaacccgaagaccagtaactatagatatgtgtcatatatcagtaggatatcaccacaaggtatgtctaagaaagctaacttcagtattcccattttacagatgggaaaatagatggaatgtgggaggaatagtaacatggagaaaatagtttcaaggtatggtggccatgtagtagttaaatgaaaagtaagtcccctgctaggaagctgtacttcttgctagcctcaatgaaaccattcaaggatggccatccttgcatggaaacttaaagtaacctgaaggaagaggcagcagcttcatcgcatccagttggttaatcccctctctgtcaatcacctgcatacaagctgaaaaaactataaattcacatttctggagccacatggtcaaaatagcactttatattcagtgtgaaattcttaaaatgaaacccagctggcagatgggaaggactggtgtggggaggaatattgagtgtgcaagggtttcatgattttccagagagctttttatgctttgtgcagatataggaatatttttaaacatctatgatg

SEQ ID NO: 115105 - DNA, 1054 bp, Homo sapiens
tgcagtcatgaaccactgcacctgctggcagatactttttaaaaaaaaattccagaagcaccaggcagcagctacagtgatgctcaccatttggcagttgctcagtgactgtgcaaattatcctgaacccataaaagcactcactttgtgttgaagagccattttttaacaaaatgacaagaacatatattatgaaaggcaaccaagcaagatatacaccaagttgaaaccacaaatgaaaaacatagtgtgggaccctatcatcatgtcttcaattaccctccaaccctacatatatgggggaaaagtttctaaaattgggctactctaccaaaaataaaataataatttgggtaaaatagacccccaaaagttatgaaggtacttacgggaaggaaggattgttcagggctttagcatgagacttccattttttttaaaaagttattcacatattacagctttctattaagtagttataaattttattcataaagctaccaatttttgagcacctactctgggcagtcactgtgctaaatactttacctatatttgtgcccagtctatacccaatcccttcaaagacagctgttattcccttattttaaaaaattaggaagctaaagacatttactgactcgtcggttcaagattacttgattagaaaatggcaggacagtgatctttctagttcaagttgcacagctctgatacaaggaacaaaacaacaactcaaacaccaatgtcactggttgctatgagaaacgagtgagctgatccaaacacatggtatttcaggtacccagcatggaatagtaggtgctcaataaaggttagctctatctgcctccccttgttccctccctgttgccattcagtagaaatagaccatggcagcagctgctgcaagtctttcaccttaatccgagctgtttattctgagtgcacacacaggcgtgctcaaacctttcctttttttcctttcccatcctgttttgtctccctcaatcactttcttctcacttgtattattgtttatagaaagcactag

SEQ ID NO: 115106 - DNA, 1032 bp, Homo sapiens
agtctccttagctgtgaaatgagagggttgaaatagatgatttgtaagtccccttctggctcaaaaattctgactcagagaagatcttttctgtatcagttctttggaatgaatcttattttcaatttatctaaacagttttaaagtgctgtttagaataattaaagtaacactaagaaaggcttgaaaagtaatcaacaaaattgggaatatctcccataatgtggcttgtgtgacaatctgctaaaattttttaagctaataaaagtaaaagacaacaccaaatgaatgctttttaagaaagctaaggagacgtaatggcaactttccaaaagctgctaaagctctcagtctgctcctcccagctgttacttctcaaggtgctcatgggccttcggaaatctgacacaatgtcagacaaatacctttctccggacacttttattacctccttttcctgaaagtcatagtctaacgccaggaagagaacttatagtcatgtctcatttatcttcaatgttctgctttctaattgaaaattttccttcagcggtttttcaaatcagatcttaagcttgaattacaagtcgttataagtcttttaactttacagtgtttacttggtctgaaaaatagtcaggttttttattttattttattttatttttttgagacggagtcttgctctgttgcccaggctggagtgcagtggcgcaacctcggctcactgcaaactccgcctcctgggttcatgccattctcctgcctcagcctcccgagtagctgggactacgggcgcccgccaccacgcctggctaatataatcaggtttttaaaaatgtattgtttaaaaaataaaacttgataagttttttaaatattatgagatttttattttgacatgctcaagaatataccagaaccgaaagaatttcatttaggttgaaaagaatcagtttaggttactagtaaaggagatgcctttaggtaaatcatgcttatttgagaaagctttgtgcatttgacaaccta

SEQ ID NO: 115107 - DNA, 1038 bp, Homo sapiens
tttctcaaatattaaatgttgtttaaactactgacataagagttatgctagacaaagaaaaactagtgtaaatgtgatgaaaaccaaatgagactttttaaaactccacatcaggctgtgtgtgtgtgtgtgtgtgtgtatgcgcaggcgtgcacatgtgtattttgtacttattccctgataaccttttatctctcagacacttaatttgtcatttaggatatctgtggttaggaatggaaggcccattttgtaattggtcactatgccagaggtgaaagccattgacaccgagcctccggggacggagaactcttggcaaggcttgctaccagtgggtgtttttttcagttctgtcaggtctgtgttcccttgggggaatttgtacccaaagagtattgagttttttctgttgattttttccaaaagcatgtgttttctgcattcctgttttatggttccctgcaaaggaggaacagtttctatccttatttggtttggatttgattagcagcatttgggattagtttagtctttttaaagtaaagcaaatgataggtagcagagggtggtggaaatcgcactgggcaagaaaccagaattctggtctcaacttttccctctagcgaaccccagcagaggaactctcactgcttaactggctcttgtcctcaggttatatgcagataaaatgcatgcaaaaaaatgagaaaactggatagtctcaaaagaatttcaaaattctacattccttttaatgataatgacagtaacaacaatggcaagagcagctatcagatactttaaacacattgtttctaattcccacaataatcttggaagttttgtttgtttgtttttcagataatgatgcaaaagtttgctcaatagcataccaatagcaagtggcaaagccaggattgaaactcaagttagtccaacccctgcaattaccccaagattctgattatccaagctagacaatagtgtcatagatatgcacataggttttagactcagacatctgggtttaaaaac

SEQ ID NO: 115108 - DNA, 1043 bp, Homo sapiens
tccttctgcaacctccctttttatctcatttttttccactggtgtctcatttaatttctattttctttaatcttgtagtgtaatgcactcacggagatttttggaggaaggtggagagggctgttttcttctaaactagattcttgcttccttcccagccctccccctttctttcatttttttctttgctctgggagtcctgcttagttgtcatagtcttttctctttgtaaaacttaagttgaatatgaacaactcactcaggatcttttcttcattctctaatgttggtgaattgtccttgtcttgctttttaaccgtctctaattagacctcggggtctagtcccagagctgcattcagtttgaggagtcgacctgaagacccacatgctggagatgaggtagagttagttgagctgggctgcgtgctgggatcctacaatcccagttgttggtaggatctttgctcttcctcagtaattgtattaaatgccctgcatcagggtttgctctacatattcacagatatatctctggaggagtgagatacggggctttggattattcctccaattcaaggaggtgcttgcaagccatttgtttgattagttttggctaagaatgtcagcctcaggtgtctccttcccttgccacatcctatctttcccccagcaagtgtttttatctctttccagctaatggagaaaggagaaacctgtatgcttttaccatggcattattaatccacagacagggaagggaacctcacctgggaattttctgcctttaattctccttctctcccagccctcaacacacacacacacacacacacacacacacacacacacacacacacacacacacccttatttatttttctctttggctagacctttgtttactgtttaagatacagtaaactctgatacagactagcgaacctcatgttagcaccaactaagatttaacacaactggcaattggctatctccttcccttcatcccagcccttgtccttgttttattagctctacaacaa

SEQ ID NO: 115109 - DNA, 1049 bp, Homo sapiens
tactgatatttttagtggtcatcatatcgaaaatatatagggaaggagtatatagggaaggagtaagtaaggttttccaaaaagttatgtgaaggtattcttgtgttctctagatcagtgcttttagaaaatttgtgtgatctaaagaacacaaagaatacctacacagaaccacctgcagactggtgccagtccacaaaatatctgtttgagtatgcaagaagataaatacagaaattgagagtaaacatttaggaaatttatagcaatctgacatctctgcaacatccaaagtatatgatttttgtattctacaaaagcttagctcagatctatgatgggttagaaaacaaatactcaaaacaaaccagctccttcaccacagatggtatttgaagttctgatcaagctcatggtctgcaaaccttttctctaaagggtcagattgtaaatataggctttgtaggccatactcaaagtccctgctactcagctctcccatacccagctgcaatagacaatatataaacaaatgaatcttgctgtgtttcagtgaaactttatggacattgaaatttgtatttcatctaatttttatgttcttaatatgctaatattgttttgatttttttcccccaaccatttaaaactgtgaaaaccattcttggctcttgcaggccatatgaaaacagggagtgggctggatttggccctcaggccaagtttgctgaccccaagctagatcagcagtccagccatcgtcaggaacagatgctgttatttcttagtctcagtgttcccgtctgtctcgggattttaattgccacttactttcactctgcagtttgggttattattcaagaaataccttagagcactcataatgcttagaacattatgtttaataaaatccagaaggaaaatgttccaagtatctcactgtgggaatacattttaggatttactatgacctactggtttacatgaactttgctgagaaaaaaaaaagcatggagaagattgggatggaagatctctttattgtgtgt

SEQ ID NO: 115110 - DNA, 1045 bp, Homo sapiens
acttcaaccatttggatgatgggattaggtacagcttctttcttttaaaagtggtttttgcatcacaaacaactagtaaattttaaaatataaaatcaatcaatgggaatgatttttttttttttttttttttttttgagacagagtctctctgtcacccagactggagtgcgatagtactaccttggctcactgcaacctccacctcccaggctcaagcaattctcctgcctcagcctcccgagtagctgggactacaggcgtgtgccaccatacctggctaatttttgtatttttagtagagatggggtttcaccatgttggccaggatgatctcgaactcctgacctcgggtgatccacccaccttggccccccaaggaaataattttttgttgtttttaagatcacatgcttgatccttgtatatataattatttctaaagtctatgactctacttattaatgtttttcctaatctaaacagcgatttaaaaaatttcaagcctaaccataaccttgtttcatatagaagcagttatcctatttcctatttatctttggtattccccagtccacaactggatgtagatagagaaactaaagggaagggcagatgcctagagccctaacatttggaccatgtggtacaaggacaagatacaagaaaccctgacaaaaacaagcctcttctgtttcctgcagtgataggtgctttagagaaggttacaaataaagacagcctcaggatcccacccacagtgttccagaaatgtgacctgttatcttttaatatgtgagtataaaaggcacagaggattgaaagtggaatactctgagctgggagttcggagacctgaggtcaagccccatctctgccactagctgtgactttggaagaatcacttaaccctcacctccacaaagaggtgaagtggctacttatctggcaagaaaacaagtcagacatattgatatttatatgatgaaatttcagtcttgcaacttgggcacctattttacaaaacatcttgacgtctctttac

SEQ ID NO: 115111 - DNA, 3000 bp, Homo sapiens
ctcaaacttcatctatgaagcctgtgagatattaaactagatgcatacttgtacatgcatcacactttggacttacttcttccaaggttctcccttttatccagcatgcaatcacctttacagtatgccaagagagttaaaccacattttcatttacatatgctcatgcagtaaatgcaaagtttatcttaatttatggtattttaagtgtcccagctcacgttcctgtcacaacttctcaaacatgggatttttttttcttttttttaccaataaagagttttagccacttacatttttattattgaaacaaagaaagtttttgtaaccttcttattccagaatattctaggcacttgaggaaaattgtcaactcacaaaattcagagatcactatcccattgcatgctttgtagtgggttttgttgagatcataaagcagaaatagattttttaaaaatattaagcatcgaaaagatgactgaaaataggaacagacctgcttttatctgtttgataattctctctcattcaccagaacgtgtttctaaattatttaatctttctctttgttcactctgcattttgctcctggcaaaatgtgctgaagtcactgttgtcacatgtttttaatttttgagaatccatctttctaagatagacacaaaaagaaaaactaactgcacagaacaccacattaagaggaaagtagttgaagttctgccatgaatagttaccaaaaagaaaaaaagtatgatactatttggccccatcttcctaactagggaattcaaattgttgaatacctaatagtacttttgcaagtatttcagtttttaaaaaatatgctatggtggacaaagcatgcctattatgtaaatatatagttactaaagacactagcatgtatgtgccttttcttcttgttgttgtttgtttgtttgttttttgagatggaatctcgctctgtcacccaggttggagtgtagtggcgcgatctcggctcactgcaacctccacctagcaattctcaaacaattctcctgcctcagcctcctgagtagctgagattacaggcacctgccaccatgcctggctaattttttgtattttttagtagagacggggtttcaccatgttgtccaggctggtctcgaactcccgacctcaggtgatccacccacctcagagtgcgaggattacaggcgtgagtcaccgtgcccagcctgcgtattttaaaagatataagatgtgcccaggtaacaaaaaatgtgtttaaatgccctatatcgggccgggagcggtggctcacgcctgtaatcccagcactttgggaggctgaggcgggtggatcacaaggtcaatagttcgagaccagcctggccgacatggtcaaaccccgtctctactaaaaatacaaaatgaatgaatgaatgaatgaatgctctatatcaagtggtaagcccgtccgaagactgcagtccttcagatcactaggatgctgctaattgagtaggacacagcagcttacagtaaatattactttctggctactttcttatgatagttgaaattacatctaatttatcaagaaagtgaatgcttatttgatttggctatgaaattatgctgctcagttttaagatgtcttcatgaacccagtctcagtgaagatgtttctgtattttagggtttgtttgggttttttggcctcatcctcccacgaatgtttaaaattagcttggcattttaaatctgtgcttttatgttaggtcttagataattataaaatagaagaaaaattaagagcaaaaaattagatatgccaggttttgctatcttgttgaaagtgatcgatcatctgaaagctgtataatttatttagacaaccagttttgtagagtatcagtttacatcatggtgcatataattttacttcagcatactaactctctcttatattaaagagacgaaaccagaagtctaatgtcagcttaatgcccccaagttgccactcacatctctcatttctctagtgacagccaggcttcttgaaaacactgtctgtgtctaacctcccattttttccttactcctctagacctggaatctggcttctcaccctacacccatcacaatcactgaacaataactgctttttacaggactacttctttggtactacatttggtcctcacttctctatttccctccttcatagcttctttggccccacattcaattgtctagttacttatcgtgggcctcctctgtggatcactcttcctccactgcttcttacatgctgatgttccccagcattccatcccctggcttctgatcgctgggcaaatctctcaacatgaccacatgtcctcccctagtttcagcctcactcacatgcagatgattcctagatctgtctcctgaaggcagctctgtgtatccagcaccctactggacacctcacaagtcttaggttaaatgtacaaaactggatccatttttacctattgtttttctacctactcttcttattttctcagaggcagtgaatagcagcaccaacaccaattcttattttctttgtgatccctttgtctcctcccatatccagtttctaaattttatcaagttcactatagccttcatatcctcaaactaaccacttttctctccatcttcattgctgaaatctctcatctgcttttgccttctcccatttggcttgatcttatcattcaatacttttacatgcttttattgtcattctagtgaaattttgaagagagaagagataacttgtgatgaattcattgtgtgtacacggaagtctaagccagctttaaattaaagcattaatgttttggaaaagttagaaaatacaaataaacaaaaattttaaactaaaaaaacctgaaattataatatactgaacactgactcttaactaacatttgtctatattattgcagatttttccattccaatatgtatgtc

SEQ ID NO: 115112 - DNA, 1021 bp, Homo sapiens
catgttcaccaggctggtctcgaacttctgacctcaggtgatccacctgcctcggcttcccaaagtgctgggattacaggcgtgagccaccatgcccggcctaattttttatatttatttgtagagacagggcttcactattttgccaaggctggtatttttttgacgttaaaaaactttaaatcaagtttatatctgctgtaaatttccattctctgtttatttcttggacctttatgcttcgatttctcatactcggctgtgctttataaattgcagttccttagccatcactgccattgtcatcactagtaaataatatttatttagtgcactcatgctttttctatagcagttgctccaagtaacatcacagttgcacaaacaagctggatatgatagagtaaaaagtaattaatatttttagaaatttatcttcaagtatctttaggtcattgcaaacatgaaaataaggaaactctgctagtattaaacttgaaatcacttccagtacgtaacagaaggcaagagacagaccatcagatagattttattcctatatactccttgacgttgaaatctcagtacaataccgatattggagggtgagactaattctcatttgtgatttaactgtttaaacaggttcatattttatgttccacagaaaatgccttgaccggtgatctcggtaaacctgtataataataagacagtgatttctggctctaaagtctctagaagaaagtcataattataatgttttatattagtttggacacatgtgaaactgacacaattcaactgtttttgacgtacaaaaaaagaaacaaatgttacctggtgcaacctaatatttgctttgtaaagcaagcataggagatatctgtactaagacccggaaagattaaatgacttgttcaaggtaataaggttaacaaatagcactacttgaattttaaaaaccaagttttctgagtcaaagtccagcatatcttctactataatatactgtgctact

SEQ ID NO: 115113 - DNA, 1008 bp, Homo sapiens
ccacacaaccactgctgtcagtcctgctcatataccagggttcccctcatgcctccttcacagcacctttgtttacatctccctgaggtacacataaccagaagactttttatactgttgccgctcaccttcttataactgattaccacctcacagacagaaagtagaatggagaagttcagtaaagaagccagaagatcagttttctctcctaggtcttggatacatcacctatgattatcaagggctctctcaagattcaaccagattttaattaattctagaattagagttgcctcaaattctgtgtgcagcaaagcagaggttgtcattaatccattaataaattggacatttaagatctataaggacatagtttttgttctttattttgttaactattagaacaatgtcatgtttattaaatatttgtcaagtgattgaaatacacaaatgatgttagacaagaagataggctgaaagtacctaatatagtgacctttagaattctgccattatttccaatatctatgcttttgatctctgctcacagatacatggtttccaagcagaaaacagtgagcgcagagaaacttctgtttgcttttaaaataattaatgtctaccaatatatggcagaaattccttaaaggggcagggcgtgttttatagattacatttaagggcagattattgaggaggaaaacaaatcacctagtaacctcataaaaatgacatttttcagattaagtcacaagtaaaggagacttaattgacactcccaggcacttacaaccacttagctgcccaggcactgcctgtgctcactttcttctccagccagatcaacctggtaagtgtgatccaggtctaaggcaacttgccaagaggtgggtacatgacagtagcttgctaaagggtaggctgtacccaatttaaaaatcagttgaaaagttaacatgggatttgtttctgtgggaaaacagagtctagcttgtatgcaatgtt

SEQ ID NO: 115114 - DNA, 1057 bp, Homo sapiens
ttggggcaatcttctagactacggtttggggctgcttgccagccttgcccctccacatttgcccaagttatttttttctgtgctggaaatctactcatctcagtcccctgcttaaagttaagtggctccccatatccattagtataaaagttcaagttctttggcacagcatagaagacgctctatgcatagaagcccctcatcacttatttccagccactctggctcatgtgacatcccagtgaaatgttgtagtttcctaaatgggtggtgtcactaccctgttcttggagcatgtgcaaatattattcctcctacctgcatgtacttcctttctactctagactcagccctagtgcatttttgacatgccacttactcagctattttggtactcgtgtggttgcctatcacccctgctacactaccccagtagaccctcagtgcagggattatgtcttatttgtgtttttgctgcctgcatagcatagtatctgggacctggagggtgcctaaaaaatgtttattaatagatgaatgaactaaggaaacaggaaatcaatttctttccttccaataaacagaacattgatggcacacaggctaaatccaggatgtgcgaatcttcaatcctaaaggtatcatgagtctgtgacagcgggtagctttccttgatagaaaggtatggccacttaatatcctttttgccatttttgttattatagctacacacccagatgacgtaggcagagccagggaccctggccaagcagctgtactgatgttcctagacctatcagcagccttagtcaggtcaggtcaacatgttctactcactcacccacctgcaagccttgtggatggttgtgtctcaactggctttggtccttccccagaagaatcatatgacacttttttcttttaatttcttcagtttcagattctttctcaataggacccttggcattgccacgccccatgggcctagatgctcctagtatctttccaatgtcaaataaagccagcaagtattgccaagagagggaacagaattaga

SEQ ID NO: 115115 - DNA, 1688 bp, Homo sapiens
tcagaatactggactttagcatacctcttgcctgctgtgatgcttcttttatttctttcttttcttttcttttttttttttttgtagagacagggtctccctgtgttgctcaggctggtctcgaactcctggcctcaagtgattctcccatcttggcctcccaaagttctaggactataggtgttgagccatcatgcttgccctgtgatatttcttttagttgctgtgacaaatggatgactccgggagtagatagtaaaacaagtttcggggaagctaaggagagatttcaacattcagtctttagaacattagggtgggcattaagatttgatgtcaggagtctcttattctcattgcaaaccaagtggttgcctgtgactgaggagttatgtcccatacatacagataccactatttcaaatatagatgaaaatatatgtgaataccatgtgattattaaaaatacaaatttacccataaacattcctgaactggcagtgacttaaagcattgtatattttctcaggctacagatactaagcaatataccacttgtaggattcgattcttccctaggttcctttttttccccctttctttacattgaaatgtttgggaacacatgacctagacctttttggatttaggtgttagctggagactaaaaccactaaataaagtttttgtctcttagatggttttgtgctaatgagtctttcctcctattataggcgaaaagcctcagaccttccatttaagtggtgcactttgtatctttcatctaaagaacataaaatactttataaaactccacagtgatagaaaggaggaaaagttgttggggcgggggggcagaggaccgggggacttgcccaaggtcatacagggtaccagtggaagcactgcatagagagcaccagattctcctgacttgaattcattgttctcagaccttgtttccagagacttgataagacttttctgctctaatttcatcatcaaagagcttggtttgaaatacttacattttgtgctggtatctttcaaaatatgatatcttctatcagcagggtcaatcacttgccttagtttgttctggcaaaattgcatggacttaaattctgaagtaatattgatctatattccataaaaactcagaccaggtattcatgacacagatttgatgggaacacttacagattaaacaggaatcatctaagaagtgaagttattactgacagccttttagttcctcaagtgggaaaaattactatgtaaaagactactgtgctacattaaaacaaaacaaaacactattagtgggaattttttttttttttttttttttgaggcggagtctcactctgttgctcaggctggagtgcagtggcgcgatctcggctcacgcaagctccgcctcccgggttcacgccattctcctgcctcagcctccgagtagctgggactacaggcgcccgccaccacgcccggctaattttttgtatttttagtagagatggggtttcaccatgttatcaggatggtcttgatctcctgaccttgtgatccgcccgcctcggcctcccaaagtgctgggattacaggcgtgagccaccgcaccttgcctagtgggatatttttctaacctatgccttgaatttcctagttttcacattataatttgg

SEQ ID NO: 115116 - DNA, 1133 bp, Homo sapiens
ttagtggtgatcagattcaaagactagtgacactgggtgtcatccccaagccccaccgaaaaattcctacagagagacatcaggcagtgaaggctgtcttttgagtgtctgaaaacgagaaagtcaaatctggggacctttggatttggggatgttaaagttgagtatacgggggttaattttgtcggttgctctacttttgtgtgtatttgaaaataccataaaaaagaatgatctgttgtatacccatgtttgtagcagcattattcactgtagctaaaacgtagaggcaacccaagtatccatcagcggatgaatagataagcaaatgtactatatatacacatgcaatggaatgttattaagccttaaaaaggaagggaattctgacatatgccacaacatggatgaattctgaggacattacgctaaatgaaataaggcagtcattaaaagagaaataccttgtgattctcttaaatcaagaatgcagagtagtcaaaatcacagagacagaaaggataatggtggttgccagggtttggggagagaaataaatgaggaattactgttttatgcataagagtttcagttttaaaagatgaaaagagtaatggcgatggatggtggtgatggttgcacaacattatgaatgtatttaatagcgctgaactgtacacttaaaaatggttaagatggtaaattttatgttgtgtattttaccacagttttttaaaaaaatctgagcccaacctaataggagatagggggaggagtgtgagagtgtgagcagagggagtgaggatgtgggaagaaagacctgctgttcttggaggaggggagtggtggaaaaggttgattatgtagaattgggagcacccttggtattgtgagtacaacatttgcatgtactcaccctctatgtaaacacatgggctagaatctggctatgtagttgttccattcttgacaataatttagatagtgagctttttacatagataagtagaaagttcaatatttaaaaagtgacccccttaattaggtcctgctataaatgaagctggattttacatatgtgagggtaaattggcaggataaacagccataattgaaggtcaaaggaagtggcc

SEQ ID NO: 115117 - DNA, 1035 bp, Homo sapiens
aggctggagtgcagcctggctcactatagtgatcctagctcactatagacgacctgggcttgagcgatcctgctgcctcagcctctcaagtagctgggaccacaggcgtgtgccaccatgcccagcaaatttttaaatttttcaatgggtttcactgcatttcccaggctggttttgaactcccagactcaagtgatcctctcgcctcagcctcccaaagcgctggaattacaggtgtgagccacagtgcccagccttgtgctttctttaaaactttttcatgcctcccaacgtgctaattactgccctgttcttaatctagtcttacacaacaaagtgcccttaaaactgtttacattcaaagtgccttttgcataagcatatcaaaattctttataaacactaattaattcacactattctgtggaaggagtcgctctcatttttcttttcaaaataaggcttttggttctttggcattgtgtacctgtcttcctacagagaaaagttatcgtcagtttctcaagagcagagaatcaaacctcgcagaactttataaacctcacttagcattgagctttacaaacaaggggatacacacacccatacacacacacacacacacacacacccctccctggtaagggtttgttgagaatgaagatatcacacttcatattcaacagtgggtagatatatctaaatatcctagaagtctatctcatgctcagggtgattattgactcacattttaagaggagcctgagatgaatcttttttgtaaagcgaggaatgtttttgaaatttgaagaatcaccgtttagtcagttaccggataactagactttaaagtgataactagactttaaatttggccataggtgcatttaacacacgatcatagaataacattgagtgttcccttaatttagttgtctattattaataaatgccagataatttagaaatgttattttttatccttcaatagctatacaatgtatattttattttctccattttacagaggagaaa

SEQ ID NO: 115118 - DNA, 1035 bp, Homo sapiens
atgttgttaaattgctattacctagaattgtgtgggaggcttttgcaaagtagcagagagaggaaagaaagtgcacagacagataaaactctaaggagggaggagaaccccagggcaaaagcaatatgaggtaaacatgcagaaagctgaaataggcaaggtaaaaggtgcagaaagttgaaataggcaatgtaaggacagagtttgatttcaaagatagaaaaggaaattgtgagatgattgcaaaactgtcatcatcatcattatcttcatcattccttctttattttttagagacagggtctcctatgttgcccaggctggtcttgaaccctgggcccaagggatcttcctgcctcagcctcacaaaggctaggattacaggcacgagctaccatgcccagcccaaaactgcattctatgactcaatcagtggtttatcctcaacagcaaatagaaataaataggctatgctcaaaggaaagaagagagttaacagtttggttccaaggctaacgactaggagtgggattattctatcattaacaatctgcactgtgtttcctagacgaaaatgtgtatcaggtgaaatgacacatttctacttaacatcatcctaaattagtgcttttaatatctttttttccacaaagaaatggccacattttttaacttctttttttttttgagaaggagttttactcttgttgcccgggccagagtgcaatggcgccatcttggctcacagcaacttccacctcccgggttcaagcgattcttctgcctcagcctcctgagtagctgggattacaggcatgcgccactacgcccagctaattttatatttttagtagagacagggtttctccatgttggtctggctggtctcaaactcccgacccacctcggcctcccaaagtgctgagattacaggcgtgagccactgtggctggcctgtgaccttttcatgcaatgtaccaatactgtacagccattgtgcctaaatatgtgatatcttacacatttgagatggat

SEQ ID NO: 115119 - DNA, 1039 bp, Homo sapiens
agtttaactaaaagtttaagaaaactgggttttttgctcacccatctagctgaacattctcctgaacatctgcctgaacatcctcctctgaagaagccaatgagaattattgataatgtatgaacccccaggagacaaaccttttacaaataaactgaaagacaaggaagtaaagttatatacagttattaaggaacactcaaccacccctgctttttaaaaccacataatgaagctttagcacatttcacccttattctgtttttgtttctgttttaagctagagactctttgggtcagtggtttccaactggagaaagtacttttttgcctaggggactttggggaacgtatgggaatattctgattatcactataactggggtcactgctagcattttgtgggcaggggccaggaatgccaggacaaggccaacccccgaaaagggagaattatcatatcttaaatgccaggagcatcctcattgaaacactgagcattttaatgaaaatgtactcttcctttgccaaattttcttactgataaactatgataaactactcttgaagatgagtaatctatagctattttgcttatttggaccttagtagtgtaactgttttctgacattggacactcaataagtgtctgccaaaatactgagaattatgagtagtgaggcatcaaatatttaaaacatatttctgttttatacataagcagtatagtcatttttaaaatcatttattgcacacccctaatgtagacaaatgtttataaaatattatttgaattaaatgcaactgcacactcacatcatttaaaaaaatccccaattgcttttttttttttttttttttttttgtgacggagtctcgctctgtctcccaggtgtgcagtggcacaatctcggctcggagcaacctccacttcccgggttcaagcaattctctgcctcagcctcctgagtagctgggattacagtcacccaccaccatgcccagctaatttttgtatttttagtagagatggggtttc

SEQ ID NO: 115120 - DNA, 1045 bp, Homo sapiens
ctcagatttaacaaaaagttaaaagaaaataaagcccttaaaaacaaacctaatacacttatcattgttgtattagtatgaaatgttgtttctttacaagcctaaaaggagaggtcattatttttgtagctttccatagaataaggagattgatactttataatgttctggaaaccagatagattttgaagttttgaaaaggttcagtggtggtcatcatggagtagttgagaattgtctaactagagtggggtattgactttacaaatatttatcaagtaccttctgcatccttagcactctgttaggcactaggatatggggagcttgtgataaagagatggaaaagatagtggctctcccctcaaaggtgtgtataatgtattaaggtacataatgcaaggaaatgaataaaagggagggtggattactgagtctagtacctaagcacacacaacccatttctgggggagagggttgcaggcagggctggctacataatttgcagggcatagtgcaaaacaaaaattccattgttcaaagtcgggcaaaaagtaccattaaaagtactaaaatataaagttttatcctctgctcatccgacttcacttacaaaacacaaattcagagataaaattattaagaatttcaagatagtaacagcagagtactaaactaagcccagagcccttctgagcctgggccccttttgaaagtggggtcttaggcgactgcacagtggctcacacactcatgaggccagccctgggtacaggggtgattcctgtgaaatctaatatgtcagcactaaaccttttttcaaggaagggtttatatagagaaatttgaacaagtttgtacagatcaaaatggatatgttttgttaggtatatgttttatttatttccctttttttggttaggaattagggacagggattatttcttataagggaagacagagactagggtatgaaaaactcagaggaagtatcagacttggagaaatatagtgatactatatgtaccgcagagacaggctgggt

SEQ ID NO: 115121 - DNA, 1743 bp, Homo sapiens
aggggcacaagaatgatgtttctaaatttctcaagtttaattccaggccaaagtagagatagatagatagatagatagatagatagatagatagatagatagatagatagaaagaaaatattttctgactgacattctgacattccattccagtcctttagatgttagactacaaacaatcacaggtgaattctttggcaacttaaacctgttttcatagctcaggctttgtttgagggaaaacagtttgattttgaaggaaattttcaaaattctcatgaaagaccttcagcagaattgtggatcttcaatgtgcatgtacttttcataactcctatctataaaaatccacatttgtgagaaatggctggctgataaatgtcaccagtttgaggatgtaggggattgtggtatgtagccatgttgttcccagctcacgtgtggttgttggccaaatttgaagcaaagagatacagcttcattcatacttatgtgtcattattccattattccattctcactgtcactgttagataagtcttcagctgtgaataccacatttcccccactgtggtacattgtatttgtaacttccaaaatgagctagttcataaactacattctaagttaccctgggagcccatttgctcattcagaatatattttgaagcccatgcccttcaccacagtgcttcaggtacagcccagagtgtttacacatttagtctccagactaaagcaggggctttttccattgactactactaatggccaatcgtttttgctcaatttgcattgagttcagaaaattattaactatcaagacctggttaaaggcctacttttgggctttctcacaatgcagaatttgactggtcaatagaaaccactctgggtatctctgaaatgacagagatacacagaatcattagcaatgagagcatagttagaaattcagaaacatatattacagggcagcaagaagagacctgtgatacagaacttgtcaactttgttgaagaaatttgcaaatatatgcatctgttagcgatcagtgtcctgacttaataggcaagtttaaaattactgattatgctgatgtgcttctgatttctttttgcaaaacagatgagtagtttttattccaaaatttgttccaaatcctattttttggcagtgcgctaggtttagtcacagtgtgaataaagtatgctctctctgtcttgattactctgcctaaaatatctcaacacagtgtacatttggtccctcttagattattacaactaatgttaaacatcaacaacttcttcttttaagctaatgaaaaagttgcaattgacactcttattacccttatgacacctccccaaacccaagttcctcttctcaattctccactattttgactactcaataccctctctaggtcacttcctttgcctctcaaccattgccttttggttttgtgtccctccattaatgtttagaggacgactgatgtctttcattcatctttggataaagggcaccattattaaattggctttgctttattccatgtgtgtcctggatctgcctcccctcttagtagccaaggacacatttctgagttctctatctatgcttgccaaaatgggaaaaagaaaactgttgaacctgaagtcttgtaagatacgtaaccaattcaatccatatttttcatataagtgattttttagcgtccagtgactccaaccattg

SEQ ID NO: 115122 - DNA, 1062 bp, Homo sapiens
tttgtagctcatttattgaaaaatcaatctacttgttttacttcattgtcattgctttgacacttataaagtaattattaaatgtaaggtgaatgttactactatgcatggattgtttagcaaatctcctgttcaaggagcagatttttagtcctgttgagcctgcccttcaggaagaaatgaagtgagtggggcagtgtttttgtgtttttcgggagggctttccttttactcaggtctgctaaaagaatgcaaatcgcttcaaaacagtcatcattctccctttctttgtggccttatgtgttggtcttaatctcctcctttctgtctttttgtttttgtttttttcctcagtaaagagagtcaggagcctgccctttcctccctttctctcacctcacctccagggtggcctgagaattgaggaagaaccttaaattctgctctttgttaagagctctgataactggaactgttggaatattgctaaaatgggttttggagatgttccctactctccctgcctgccatttccacagattactgaggattggctctgttgccaaatgaggctgatattgagcctcaaattttgacccatttttcatcaagtttgtcttaatatagaagttgcaagatttagtagtgcagcaattattgttcttatagaaaaagtcaactgcatgtttgctgaattccatctcttgggctgaagacaaaagagtttgtgcacaatattcgcagtccatagtgttgtaagcaggaatgtctgcagcagccagagagttcagggcaatgttttttgacctgaaacagttacctacctagcaaatgtaatacaaagcctaagtattactttctatggaatgtggggtgtttcataactaaacaaatcagtgatgctggaataatatgctttaaaaaaaccttacaaatctatatttgagtgaatgaaatgaatgttagaaagtttacaatttttatggaaagctggtaattttaggttgttgggtggaggaaaaggagggcaacacactttgctaagttacttgaagttcctgc

SEQ ID NO: 115123 - DNA, 1947 bp, Homo sapiens
gtgaaagtataggtctggttttttaaaaaatggaaatagatggtgcttacattcctacttgattcttcaatttataacaacccaattataaatattactttttgttccagattttttacagaatcaagtgtatgtttgtataaggctacattggcatgagcattagaatgtcataatattcacatttccttttcaaatttaggatgtagtttattacatttctggaattatgcatatgcagaagatctaaagttgaaatttgaaaatttgtaaatacattcagagattgagataattcagtgacttcatggccccaacatacttaactgtcgttcaatatgatattaattgaaggcttttaagaaatccttccaacaaataatagatttctaggtatagccctctgtagttttaccgaacactactttaagtagatatgaagattctcagatcatttgttaagataaagcttccgaaataataatgtagaccctcttaaaaataaaaactaccagagaattaattgctttagccttatctcaaagcaaatggaaacctacttaaacaatacgtcgtttacttacctttgacatatgtggataagggcataaataaaatcacttggaaaaaccttcactgttagatgacaaacttaggtacgtctcaactgggttaggaacataaaaagaaaaaaaaaaaacctgtttatctttttcagggtgtttcagaaagtcttatactttatgataataaattcatcaattttataaataaattaacatacatattttttcattaaatttagtagttaagatgccaatgcatttcattgacaaaaaactgtttaacaataaagaactcaatagtaccaaattcgtaaagaatctgatcttgttccttaatttagcctacatgcattatcttaaattgtgcagattatagaaaaaaacaacaacattgggaactataatagattattcactccgggtgtttagttctgttttgttgaagaaaagggagaaactttcttacatgtttgttacttctcttccccaagttaaggctagactttacggtttgtttagctgtgaagggatgacagacttgggggatggtgaggggagcttagttttggaatgtaaatacatgtagagcttgcctccttttgtttagcatctctttaaactaagacaaaaaaaatcagtgaatgaatgaatagcagcatggtgaaatacctaaatgtttgagttaaaatttttggatgtttgaaatcctatttggatccttttcccagatcacggtgcattcatatgcactcagcaggaaacttcatggagatgcacatttgggcagaaggtctttgacggtgcctttttcttaacttgtgccttttcttctttagaaaaaagtaatggcttaagtctgactgaagaacaatcttttttgtatgttccttataagaatttacttatggttcacagatttttacccaccatctatgtctgcaatccttggatttaaaatagcatatatcctactgcagactacaggaaacaccaaattaaagacttaatgacatactgttgaaaaagacaaaaggcaacaaattataaatcaatccactaaacctttaaagtgaaattcacagaaaaaaaaatgtgcatttgagctaatggttttgtgaagcattagagtttttgtgcttatgtaaaccaaaatacaggtaaacttggcggtacagttggatttgaatccagatattttttaaaaactatgatgaacatgtggaatgtgcttcttcactaggcaacaagcctagtgattatatgggtatttcggtacttctaaatgctgctcatttaaaaaaaaatgtttacccctttttcttatttttagaattattcttcaaatcctgattgtttatggtatctatctagtaatgtggtg

SEQ ID NO: 115124 - DNA, 1139 bp, Homo sapiens
gaactccagaccttaggttatctgcccacctcggccttccaaagtgctgggattacaggcgtgagccactgtgcctggccctaaaccatttttatgatggctgattttaaatccttgtcagaaaattctgatatctgtgtcttggtgttagtgtctcttgactgtcttttcttttttttgagacggagtttcactctgtcacccaggctggagtgcaatggtgctatctcggctcactgcaacctctgcctcctggattcaagcgattctcctgcctcagcctcttgagtagctgggactacaggtgccagccaccacagccagctaatttttttttcttttaatttttattagagaccaggtttcaccatgttggccaggctggtcttgaactcctgacctcccggccacctgagcctcccaaagtgctgggattacaggagtgagccacgaagccctgctgactgtcttttcttattcaagttgaggtgcttctggttcttggtatgacaagtcatttttcatcaaattttagacactttggctattatttcatgaaattttggatggatctttttgagaccttctgtctagtagatgtcgtctgatactgctctacctctttacttgttcaatggggttggatgtctgggttacccactaagtctttgttggcatctggtgggtaggcatacctcattattgcttggcaggggcaggagttcaggctccttaccagccttcccatgatacccccactctgggagaggtggggattcttactgctctgagtacagtctctactgacactgcaggggggtggccttggtactgcaaggtggtggtgaaagtcctaactagtaggcctccgctgacactgctcctgtaaggaggggaaaggacacatcattcccccagtgccagtccaggttcctggaacgtacacagtctccattgacagtgtgagagggggagggtcaccactgatttttaaaatctcattttaatatttcagatatttccaattataagtaactttaatacttcatatgtttacttttttggttatatttcttttagatctacagatatatttagttttttcatactagttttaacaaagctcagagcttacaatt

SEQ ID NO: 115125 - DNA, 1039 bp, Homo sapiens
actttccatttgttccacaaagaaaggattgtttcatttccatttagtggcaggaaagtgctctcatgtttttctgtagatatcaaatctgcctgggatttggccctacttttcctttatctttattggttttagtaaaagtggaaaatttatgttaaaaaatatgtgtatataacataaacacacatactacaaatagacatataaaacctacttttatcattttttgtatcactttatgttgaacacttcatgaaatgtttattccacattaacttatttggtaaatgcataaaaaatgtttttttccttcttgaattgccttttcaaaagcctctggattttatatgttatactttgtgagtatttgtattaactatagatatacatatgtatttgtatatatatctcttttcttgacactacaaattctttatccagattattgagtaataggttgttattgttagctgttctggttaaatatgagtaaccatatgttgtttagatatgaggaaatagggttatgtgttatgatgaacataaatacattcttcttgaatatttgcaaagtaactcataggcttgcttaggaatcctcattatacatcttattcctggagacataataattatatgaattgagttagtaccataccgaccctaaaataacaagtaaaattgtatcagatattaattttaaaattgtgtctttttactaagtttttatacaatacaaagtattaaaaagtatggataaatctaacatcgcagtacatgttactcacgaatttggttttcttcacaaatctgcaaaagtaccattacctgcatgtagcttcatgttacataactgccattgatttttattttggaataattatagagtcacaggaagttacaaagatagctgagaaagatcctgtgtactcgtcaccgagttttctccatggttgcattttataaaaccatatagtacaacaaccaagccaggaaacttgtatcgtaggggccaagggcaagcctccctctttgcctt

SEQ ID NO: 115126 - DNA, 1053 bp, Homo sapiens
taaattgaaaggtataggccaggcacactggctcacacctgtaattccagtactttgggaggctgaggtgggaggatcacttgagcccaggaattcaagaccagcctggccaacatagtgagaccccatctctgcaaaaaatacaaacattagccgggcattgtggtgcacacctgtaattcccaggtactcaggaagctgagttgggaggatcacctgagcctgagaagtcaaggctgcagtgagctctgattatgccactgcactctagcctgggtgacagagtgagaccctgtctcaaaaaataaagaaagaaaataaattgaaagctataattttggtatgtgacagattataagatagactttgatttttactatgtgcagaatatgatttttattcacttaataattatttcttgaacacaatatgtgtcaaagttgaaacaagctagtcagtctaaaaattcagcattaactcagttactaatgaaaaactataaggaaatgatttaacgcatgaaattatttacttctttgataaatggtcatcaccttggtactaaaaatgtatttaggttttcttggtttgtttttagaaattatcccatcaagccctctgcttcttggtagaggctattataggaagttggtatttctaatattcctcccaaagaggcaccttaagaaataacaatacctatgatttgaaaagttctataaatatttctaagaaaaagttccaagaagatgcacaatattcaaggcaagtaaaatcctcccggaaattattactgttataagatgatgctctagtagcataaaatattcaaaatcccttcctggtcaatttatccctgggaaatagctttctcactaatgtgatcggattgtaattaccgaaacaaacaaacaaacaaacaaacaaacaaacaaataacttgccagtagcataggatctttcccactaaactgaggaaagaaaagcagtgattatcccttatcacttggtattgcttttattcagaaagaaacacatgtcttttcgttatag

SEQ ID NO: 115127 - DNA, 1068 bp, Homo sapiens
ctaaaaatacaaaaattagtccaggcatgatagcagatgcgtgtaatcccagctactcgggaggttaaggtaggagaattgcttgaacccaggaggcggaggttgcaatgagcctagatcacgccactgcactccagcctgggcgacagagtgagactctgtctcaaaaaaaaaataagaagaagaataaaaaaacccatgaataaacaaatgtgtcatttagacctaagaaaaatttaaaagccagaagagtcttctaaattttctctcttttgaggataaagtcctcacatgctccattctcagccttgagagggatagagtaggagtttctagagcttgattgcctgtagtcagtatgaggtggaaaatgtattttctgttagtaagtagaaaggctgctctaccttaatcatgccaattatatattatttaatcatacctgaccagtgattggaatgatgatgatacaaatgtttttcttaggaattaggtgtttcacaaaatttccaaacatcctttttcctttctatataacgagcccaagaaaaactttgtcattgatatcacaaatctagtgtgtgtgtgttggggattgtggaaggatgtagatgatctgtgtcatggggaaactgcatttagttcttgcattttgcgaagtctcgggtgaaggacaattattttttagacaacaaagacaagagcatgtcaagtactctcgccatgaatggtggtatattttggaatttgttttttggtagaatggggcacattcaggtgggccattatatgatgcagctctgaataaactttccataacacagctttatttctcaagtgaattatatcactgaagcaacaggtcgcatggtctgttgcctccagggtagtgcctctacagctgggcaaatgttatctagaataggacaatcctcttttctcataagtgccatgtattctatctacacttcttctgcacaagataaaacttgaatgtttcctttaagacctcttccagaatcttcccatcatgaaatagaatgtcgtctattcatctactttgactga

SEQ ID NO: 115128 - DNA, 2165 bp, Homo sapiens
cagttttaattataaaagatataaaccaagaaaatatattcttccttatatatgatgaatcgcttttacgtaaattaccatttaaaaataaaatcatccctttgaattttgtgtctttggatttattaagatgtgctaaaattgcttatctttacaattccacctaaaaccatttttgaaatataatccagtataggaaacaaaacactaaatctatttaattttggagctcaaatttctcatgacaaaatacatttttggactttaaaaaattagtcataaatataattgattctgaaataattaggtttttattagtctgaaaatagagctcatcccatcccttttatccatctgccacattaagtatctgacaatctttacaagtgcttctcattcagcttatacaaaaatatagttttttttttcccccaagtgagttcacaggaacaaagtatggatttgaaggaaaacagagtcctacgcttggtataccctcagcgtttttatcagaggggagtaaacactgaaggaaatgaggtgtttgccttcagtcagtattggaatatgtagaaatgtagaagtagaaattggatggactatatcttttaaatctgattttaaataaaaagcatttctatttaacatattgatattattactggtgccagaaatgagactataaagtaatttattggataaattttatttgaaattttaaaaacattgcaaataatgtgtagtcacttttaaacatgtaatttacatgagggatatttcattttgaataatttgatgtttttctttgattcccagaatgtttcttatatctgatcaaaatccctttttttttttcttttttacgaagcggggtctcactctgttgcccagactggagtgcattggtgtgatcttagctaactgcaactttgaacccctgggctcaagtgatcctcccacatcagcttcctgagtagctgggactctgtaggcatgcaccaccatgctgagtttttctttttttagaaatgggatcttgctatgttgcctaggctgatatcaatgtcctagcctcaagtgatcctctcacctcagcctaatattaattttatttttctcactttataagtaagtagttgggagactttagctaattttttcaagtaatttttcttaactcactgtttaatggacttgggttttaaaaaatagtcaatttctattgaaagaaacatagttcaaatatgactctattaaaacaaaaaatgtatcggaaatagactctgtattggaaatagacactgcattggaaatagctctcatatttaaaagtgggctttatcattacattatcttaagatatttcttaaagatttgctaatttagtaatgatgtctagttcctggatattcctttgtttggaaaatttgtgcaaatttcatttgactcatcttgatttggaaaagatgaggtatactcttcaaaagagttatgttttccctttctgttacatttctgatgaccaagtattaatatatcataaatacatttaattaattttgacactgcctaaggaaacctataaggatatgtgttttattctaaaataatcaaagttttttttaaagttacttttaaaataagatgaatcatcttttggcctacatgtcattcattaatcctgtatgagaatttgattactatgtctgtacatttcttcctccagacagttcctttatttgatatcataactacatctgggattgagttcttaatgtgagtttaacaaacttgtgagctgatttcataaagctatcaaaagcacttgctgataactgaggaatatgattcagtatgtctctgaacttaaaaagtattttaaaaatttaaataactgacaggtttttttttaattaacctatttcatttgctatatttgtcttgcctatgttctcagccagaagtcgttttcaaagggtgcatgtgttttgacttgttagaattttaatattttagattaagtcattcaaaaagtatatttcttaggccaggtgtggtggctcacacctgtaatcccagcactttgggagtccgaggcaggtagattgcttgaggccaggagttcaagaccggcctgtcaacacaatgagagaccgccccccgtc

SEQ ID NO: 115129 - DNA, 1513 bp, Homo sapiens
tgatgatgatttctccaaagacagcaaatgtcttagtatttgattgtcccttattttatatctgtgaatcatatatatatatatatgtttacaaataagaccagtctgttttattaagctaaaaattatatttataagtgttagtttatcacttaatcttacatgtaaattcacagagtgagatggaaacaaatggaagtcttatttatatcactctaattttggtttatttcactgttcaattattcaattacctttaaggtatttcattgttttcaatgacttacatgaggtttacacttgagttttgatgggctcttggtggaacttagttctctgttatttttggaatgcctctgtttgggattttatatatgttttaacaatttatcattataattaagtaaacttaagttcatcttgggaccatcacaagagtattggtaaagatgcactttaaaataaatctccttatatttagtctagactgctaagtactaactacatctgctctgcagagaatcagattaggccaggagagtcttatgtcttcattatgccattattgcagtgcataatgtttggataaaatataattttcctgttaactctaagcaaggtataaataagcaaaaactttttaggaattagcaatttcattacattcacttgtacatgctctcattaaaatatatgttgctataatcagctataaattactgggcattaaattaattacataggttatatacagttggcaattaaagtatgattttcaattcaaggtgttgattagacaattaaaatgattactaaataaaaaattatttctaagatatgtaatagtttggagattcggatagataatctaatactgtgatgaaaggtccataatgtttgcagaatttggaaagccttgaattaaaatcattatattgctgccaagaaacagtggaaataaatgataggtttgttttagcttgttagcatactatgatgtccccttgagttgcaaatataatatttttaatactataacgactctaatgaaatggaggtaaaaacaaatgaagttttaaaagtgcctatcatccattttcaggtgtacttaagcatttcattattaaataccgtaatcatccctgaagttcacaatggttgccaatagtcctgggtcaagcatactaaaacctttgaaatattttctagagtgtctatttttacttggcaggtaaaacctaatgataattagggtggaggcattagacatcacgtaaactttttctagctattgcttttttagttcagtggctagttttcagtgtggattaacttaatctgtgcaaataaaaaataaatgattactttcttacatttcattcatgtatttactacattttctgtattggtcatcatttttcacagaaaactatgtaaactttttctttatcttggacatatttctaagttcaatgtattccaaatagaaaaataaagggtaaggacagaatat

SEQ ID NO: 115130 - DNA, 1981 bp, Homo sapiens
tgggaggctgagacagaagaatcgcttgaacccaggaggcagaggttgcggtgagccgagatcgtgccactgcactccagcctgggcgacaaagcgagactccgtctcaaaaaaaaaaaaaacaaaaacgaaaacaagcgaacaaaaaaacctcttctctttcattcccaactagaataaatgatctattggaggattttttaccaaacaatcctttggatatttatacatagctacatagccctcaaatccttgctccgccttttctctgcaactcagagttccctgattcagagttcctggggcgtcaatttcagattgcttgcttttctcattgccctctatggatgctttcaattccaactatgaaatgaaagatgccatctaacgctaaaataaagttcctcagagttggagtgaagagtgtactatccagcaatggaactggtacctcctttgatttggaagtactactctttaaagaagcatgtgattgtaataatattttaatagccaggtcatacttgtggctcatgtagagcctgtagttaactcagaccctggagccttgagcaagtctattaacctatcctgtccttggtccctctagcttaaccataagggtcacacctgcctcctgttcatggtaattatggataatatgatgttaaattaaatttataggcaatgttgtacttgaaattcaaggtgacctagttgttgtgcagatgtagttttcagaaagacaaaagaaccattgtcaataaagtaatctatatcaaaggcatattaaacagcctttggaaaaaaattgtgtttcctaggattttgcattctttgaccttcactacttctgttttagcaataagagatttagcctgactactctataaatagattttcaatttatattgccagataatacacaatttgatgagactgaggatggttttcctgagaggctaagttaattggtttatgtattattgtcttgtatgtgtctcactttttcccctggcttccaagcctttgaggcgtatgttactttgtctaatagaatattctcttggctgacttcagcaaaggagtgaccaagtctgctctacacttgctggcagggatgttgcagtaatcacaataaaataaggtcctgaggagaatctggctcagacaataggagttacaaagtaaaaacaaggacagatccttaatgttagccttcttcattatgggagctgaacaatatttgataatcacatttcagtgtattttatagatgcactataaaaactacaccataaaaaatttataaaatctgttatagagcaatttccctccctctttttttattatgtcaatagcacccagaagtttttagaagatactttacttccttcacaggtagttaaaggaattactaaacttcattataacactgaaactctgttggacatggtggtaaaaactgtatttggctttgaggatttaaaaaacataatgaatgcagttagtagctctactgtgatcagtcttatttaataatgtttctcatgcctttttcatactttgtgggaacaatgaacatagaatccaagcttttaggtgctgttatttcatgataagactaagagaaatatgactttctgcaaaaattttaggtattctttctgaaaattatggttgtattttcaagatcctgttgttgctcttattaacaaatatcttgttagacttgatatttgattctctcttcccactggaactttaggtatgtgatagttcacctgtttaagtatgagctttctttcattaaaagagggacaaagtgcattgctgatatgcccttgaccacttttaaaacattattaatatctgcataatgctgttagccaggaagaatgtgccattggtgccagacaagtccaaataggattttaatgcatgacgaaatgtaaagataagaaatattgaagaacaaaaa

SEQ ID NO: 115131 - DNA, 1059 bp, Homo sapiens
cattctatttttaatccaattgtatgttccttatggtcaagaactatgaatacttttatttcttttctcctttctaggacttaatacatactagttcaatcaataagaatatataatttagtcattttttacagatctgtttataaccagtctacacggactatctgaacatttagatattttgaactattctttttattacagatataatcttattctaataagtacccttccatgaggaaagaaagcagtcataggtaatgcaggaaataccaatcaagtaggacagaaagagaaaactaagagcaattgaaggtgactactcttttattctgtttttagcatttccttcaagtgagttggctctttgtagtccactgaggaattgtacagagaaatggtgactggaattcattgccttctgttgactggggggtaaatgctaagtcatttctgaacctacaaccttggcaagctctgccccactctctctatgtctgaacctgcaaccttggcaagctctgccccactctctctatgacctaaagattagacagccaaaaatgaaatgatagccatgttaaggtggctttttttttttccttcttgatttctaacttgtttgctctaaggtaaatgattgcctgcttaccaaaaatctctatttgacacataatagaattgccgtcacatgttgtttaaacaatctgtatctgatatgacgtgcatctagtcacactttaacatctacaataaatgaataggagacagaactagaatctttaggagaattttggagttcagtttgacaaatttagccaaaggttatgaagaaaatacagttcttagccccaatgttcttgtagtctggactttcaagcaatcagcatgatttagtccagcttttaaagcagtcagctttgttatgcaactatacttagaacaaatggtggcccaattgtgtgtgtgtgtgtgtttgtcccaattattaaaggtatgctttgtgttttctgaccagggaactactttataatactggtattgggggtaggagtgcca

SEQ ID NO: 115132 - DNA, 1206 bp, Homo sapiens
ataactgttgtctttccatccgttctttcaatgtctcctgagaagagcattctatattcttttagtctgcaactccctccacaactttttaattcagttgtgctgtcactgtcagtactctacctccgggccacagcgatgccctagcagagtcctttactgaggttttatatgaagatgttgtaataggggttgtctctttttctgctgtggctaagataattactttcttctctgcctacccccagccccacatccaccatgttgcggggagacatgaaacatgcagtaggagagaatgagaccaacacagagagagtagcatgaccaagctattgattagttggttttggtatgctagtatcagtctagctctgttgatgtcttacatgaacaagtcaatctcccttacattttgaaactttcagtggaactacttctgacttgttttgtttaatgcagtccctcagtaccagctggctagagtatacttcctggaatactaaattttttatttcactcccttactcaagaaattcccatgtccccaccagcaagagcactgactttgtgagccatagagtctgaggttgaattttggctctttcactaacgagcaagtctcttcaactcactgaccctcctgatccaaagtcccagttcccggggttactgagagattgaagcatgacagtgtaaatggaaagcccttgataaagaccgagcatgttgagcattcagtgggaatgttgagactcctgagcacagctgtccaggcattccccataaggccctggcctgccgtaccatgctaaccatccactcccttcctgaccaaactctgttgccccaatctggcttacttgctgtccccagtaagccctgcattttcccaccatgtggctccccttctgcccttcatctacttacctgaatttagccatttctttaaaaatcaataaagtcaattccattgctctacagcagttgttgacccatgattctaacatgatcatctccctctccaaatccctaggacattctgttgcctctatcattaatctggcagctaatcatagaatgtcctggtctttcctttttttcattcaaactggtttgtattttgcatgattttttaattttttcaaacactttcattctatttttattttctgtctctctctctctctgcttatgtattttgag

SEQ ID NO: 115133 - DNA, 2047 bp, Homo sapiens
gtttggtgacttgtcatttatcttttgctcacttttaaaaactaagatacttactatttatttttaggctctgcaatttatatttgttacatgtattcttttgtatgtatcaaatagtatgttaaactattaaagcaaaggaacaggaagaaaaagtttcagctgcatgttgtaagtgtgagggtcgattaagaattcagacttaacttcaaactccagccttggtacttattagtcttgcgactttgagaaagttatatactcttaagacctcagtttcttcatacttaaaatgagactaatacctaccctatctgtttctttgtgagaaaatcattaaaacaacagtgttagctaaagatcaagcaagtgctggagacttgacgcatgtgccacaaaggagatgctcaataaatgttggcttctcataagcccaacgatggaaagcttactaatcattaagcaaatatttatcaagtgcctattctgtgccaggcactgagatacattcatgggtctctgagtagtagtattaatatcttatatctacctttacggtatcatcaaactagttatatgacttacagtttaaattactttatagtttaaaatcacatttgagccaaattgtgacattatattcataatttagaaagttaacatagggaaaggatcagaagcagaagattaaattagtaggctcttctaaaaattcagatgagacaataggatctaaaagataaaattgggaatagagagaagggaacagctgaagagatatttcagaggtagaatttcatagacacgaagattactaagcgatcacgggtaagagaatggtgttaaagattactttttctgatcatgaaattttaaaatattggtttataaagcctcatattcacttagcatgtactgataatccccagttttagacacacgcacataatatccctggccacattttcttttgcaaaattctttaattcagaagtgctccttccccagcagaaagcatctgaagagaaagtcaaacattcaagtcaagtgggaaactttcaagattaattgcctatactcactagccaccaaaaattttctgtattggttctaatagttatattgcagaacattttaaaagacagcacagtattcttgcttgtctagtaaagtaggaaggtaagtttttgctcaatggggtgattggctcagcagcaacaagaactgcacaatttcatctctaattctaatctaaacagagctgagaaataattcccttgtgtgtttataagtaagagttaaatccctcccattgtaatgtagcaccagatcgaagtaaacagactatgatttcagtgctagacacagccttaaggcagaagaaattacactgtcatgcaaaggatatgtagctgctgctattttggtgcttgaattcttcgttgtcacatagttgaaggcaatccagatgaggaagagtgttaaccaacaaaaagagaaaattccctgcacatggctaggaggatggaggggaagaggaaggctagtacagtaccatctgaacacaccaataaatgatctgctccaacaaatggtggcttaaacttgtctgcccgttcttattgaaaacaagttgtttagaacaaaatgcaagctgaagattaaaatctatatttcaggctgggagtcgtggctcatgcctgtaatcccagcactttgggaggcttaggtgggaagatcacttgagttcaggagcttgagaccagcctgggcaacatggcgaaaccccatctctacaaaaaaaaaatcagaacaattagtgaggcgtggtggtggtaggaggattgcctgagtctgggaggcagaggttgtagtgagccgagattgtgtcactgcactccagcctgggtgacagggtgagaccctatctcaaacaacaacaacaacaacaaaacctctgtgtcaccaaatggtttgcctatcattgattaatttaattggattggcttccagttgcttataaaataagtttaggaaaaattggata

SEQ ID NO: 115134 - DNA, 1826 bp, Homo sapiens
ttgagaccagcctagccaacatggtgaaacctcgtctctactaaaaatacaaaaattagctggacttgttgacatatgcctgtaatcccagctacttgggaggctgaggcaggagaatcgcttgaacccgggagatggaggttgcagtgagccaagatcacgccacagcactccagcctgggcgacagagcaagaatctatctcaaaaaaaaaaaaaaaaaaaaaaaaaaggaatgatgatgcaactaatacatgttacaacatggatgaaccttggaaacattatgctaagtgaagaaagtcatttacaaaaggccacatgtcatactatgccgtttactgtagatgaaatgtgcagaaaaggaaaatccatagacacaaaaagtaaattggtggttgcctagggccagggagagtgtagggattggcaagaaatgggatttgactgccaatgagtatgatgtttctttgtagtgtgataaaaatattctaaaattgattacggtgatggtcgcaaaactctgtatgtactaaaagccactgaactgtgttctttaagtgcataaattgtgtggtatgtgaattgtatcacaacatgcctttttaaaaaaataaaagctaagtgggtgtccaagagtgtggaatgtttaggtcgcatggagaagtttggtgtgactggaaatagattcggtgaagtgagatagatgaggtaggttgtggccatttgacaaagggccttctgcttcagattaacacctttaccttttctcatctagtattcttttatttttttgagacggagtctctctctgtaacccaggctggagtgcagtggcgcgatcttggctcactgcaagctccgccttctgggttcacgccatcctcctgcctcagcttcccaagtagctgggactacaggcgcacgctgccacgcccggctaattttttgtgtttttagtagagacggggtttcaccgtgttagccaggatggtcttgatctcctgaccttgtggtccgcccgcctcggcctcccaaagtgctgggattacaggcatgagccacagcgcccagctctagtattgtttctctaaagctcatccacattgttgaatgtagtttatatttttcacttttgtgtaatatttcattgtgcaagctataccactgtttatttatttgggacatttgctttgtttccagatttttctttcagaaagagtgccacaataaattttcttatacataatccactggtgcaagtctcagaagatagtacagtgccatttttataaagctcaaaaataagcaaactctttaaaggtatatatgcatacatgtgtaataagactgtgctaaaacgaggaaagatattaaatacaacattcaggatagtgatttatttaggtgggggcgaggtaccggaagtaaggggagagatggagcacagaggatggctgtaggttacagataatattctagtttctgattgggtggtacattcatagctagttatttattattaaataaactctattttagaatgactttagatatacagaattattacaaagatagtacatagtgttttgtgtatcccatacccattttcctctgttaagagtagggggacatttattacagttaatgaaccaatactgatacattgcttataactaaagttgatatggtattcagatttccttagtttttatgtatgcttttctctgttccaggatcccatacaggacaccacattacacttagttttcacatctccttaggccccacttagctgtgacagcttcttagactttccttgtctttg

SEQ ID NO: 115135 - DNA, 1374 bp, Homo sapiens
gctcttgggctcaaacgatcctcccatctcagtttcccaaactgctgacattacaggcatgagccacttatgccccatcaatagtatgctttaaatggtgctatacaatttctgtgggttattgcaatttgagtatgctactacttcatttataatgtttagtgaatggacaaacacttcctaaggaaaagaacatgatggtactttttaaacagtggcacagttgtgtgttaaaacctgccccatcacctttaaatatgttaccagtcttatggttttcatttttggaggaaaatcatgttgatggactatttttagaggcttcagaaagaacatttattttcttcagctctgctccaggaatatcagacagaaaatactagaaagtttaaaataagccagtttggagagagggcaagatgaacaatgattaattttataaacatcttttattcctaaatatcctacattattgtacccactgatatttataagatgctgttcctattgcaggctgactataaatcacttttcccaaaatttaatcttccttttaaggtgatttctatcctcttttttttttattagactatacatttttctttctaaaacttttctttcttccaatttatttgttattgcattattctatgttcgtatgtgtatgttcatgtatgtgcacatgtgtatatgtttgtgttcatgacacaaacctactacatgagtagtttctcatttaattcacaaagctgatctgtgagctaggtatttgtgctcccccgtatactcaggagggaattgatgtttggaaaacaacgatttgcccaaagataagcagttagtaaaagacagagctaggattcaaaaatcagctatgtcgtgcctcatagtatgtgattattccatcacaccatgctccctcctttagtggcctctggcatccccccaaccccacgaggtgtcagtttctttatttgtaaaatgaagaatttgaatcagacttttttttttttttttttagacagttttactctgttacccaggctggagtgcagtggcgcaatgttggctcactgcagcctctgcctcttgggttcaagcaattctcctgcctcagcctcccgagtagctgggactacaggggcacgccagcatgcccagctgattttttatttttagtaaagacaaggtttcaccgtgttggccaggctgtttcgaactcctgacctcaggtgatccgctcacctcagcctcccaaagtgctgggattacaggtgcgagccactgcacctggcctgaatcagactgcttaaaggtccccgccccttccccgacccttctgttagtggcttttattattggtcataataatgg

SEQ ID NO: 115136 - DNA, 1036 bp, Homo sapiens
cggggattacaggaatgcaccaccatgcccatctaatttttgtatagtagacacagggtttcaccatgttggccaggctggtcttgaactcctgacctcatgatccacccacctcagcctcccaaagtgctgggattacaggtgtgagacaccgcacccggggtttttttttttttttttttttttagtcatcagatctcatgagactcattcactatcatgagaacagcacagaaaagaccagtccccataattcagtcaccttccactggaattcaggatgagatttgggtggggacacagccaaaccgtatcagtatagaacatgatagagggtatcagttattaagaaaatttatattcattatcaccaagggtccagtgttcctttcatgaatctaaatatcagcttggaaaggaacttttcaactatttctaatatttggttataagtagaatatgaaatacaagcattaatgttccataaaactgttttttatacacattatggaattccatctgcctcaatagtgctgaaggagccaaataactaaaatggaccctttaaaaagttaactacacaataagaataatttattctcaaaagtaggttgtacattactatcaagcaaagtgtcctttaatcatcctgctttctcatcctggttccaactgtcacttggtagaggtaaccattgaaactttagtgtatatctttccagacctttctgtattctttctcacattttctcaaatactgttttctgtctctgtggtttttgcataaatgctataataccagtgcatcctggtcttctaaccaagtgatgaacaggctcatgccattatttaaatacaactggttaagctgtcacttgaacatcgaagtccgtgcactatgttgaattaaaaatcggaaaaacaccagaggacccacaagatgagttctggttgatcactttgtattctcaaggtcgtctcacttcacagtgaagatgctgtcggaacggaggccctaatcagacaagagtgttct

SEQ ID NO: 115137 - DNA, 1469 bp, Homo sapiens
ggcaaaccctttgggtgaaaaaaataatgagttattctaactcatttagacagtttcaagtgaaacataataacaagaaatgagttcacagtgttgaattaggagtttgtcatacatatccatgctcctcaacaccaaagtcaaagtagtagaagcaattaaattcaggtgctgtgccatcagtgtaccattgtgctgtgtgagaaagctgtacctcatttaaatctttgggtttactgctcatcttactatatcaggtaagcatgctgctttgtgtctgcccacaagctggactcagggattacagaatgagtgtggctctggtggacacagggaagcatggagataaagaagttcattggtttctctaaatctgtttttcccagaacagtttggcagcacagtgaaaaccaactgcagaatcctcatttcctaggaaacgtctatcaagccacagatccctcaacttgtcaccagcccatagtctgtcaaggcataagccagttgtactcggaagacacgctgcatccttgtgatgccttgccttgtatgggatttattatcaactgttacccattgtttaggggtttttcccccctctctcttcctgacatcctatgcctcatgtatgaagaatttctttttgaagttatgtagaatgattctactgtgaaagcattattgtgagagctaaggaaattagattgcacaatggggaatttaaatataaaagaagaaaacaagaaactccagaggaactacttcttgaaactatgattctacaagtcctggatctctctatctttagcatctgctaaaattcacatcctccactagccattttatttccttgctgtttctttttgtgggcttcctgatgaggaatgccattccccattttttcattcctgggctcagctcatgttttctgttaacctctcctgttaacttttagctttcttgccagattttcttatggtatatgtattagtccattttcatactgctgataaagacatccctgagactgggcaatttataaaagaaagaagattaattagacttacagttccacatggctggggaggccttacaatcatggcagaaggcaaggaggagtaaatcacatcttatgtggatggcagcaggcaaaaagagagtttgtgcaaggaagcttctgttgttttttttttttttttccttaaccaccaaatctcgtgagtctcattcactatcacaagaacagcgcaggaaagactggccttcataattcaatcgcctcccaccgggtctctcccacaacacatgggaattcaacatgagatttgggtggggacacagccaaaccatatcgttctgccgctggcccctcccaaatttcatgtcctcacatttcaaaacaagtcatgccttcccaacagtcctccaaagtcttaactcatttcagcattaactcaaaagtccactgt

SEQ ID NO: 115138 - DNA, 1079 bp, Homo sapiens
agaaggaatttgctactatattaagggaccctcttgtattacccagcacctacccccatatataaaataaccttctatgttggcgattatgctttagtttctgttacttttttagtaataatttttttatattttttaatttagtttcttgtatagtaagacaatttaacattatcgaatgtggaaagtagaggaggaaatttgtaacaccattaccctattataagatttcttaatctcagcaggttgggaagtagttttatgcgttgtaggatgtttagaagcatccctggcctcagtccactagatgccagtagtacctcctgagttgtgaccatcaaaagtatctcccaatgttaccaaatgtcccctgaggatcaaagtccccaccccacctgctcatttttgagttgcctttattcaaagatattatcaattttgaatgtccctgtcagtcttctttcatgatatatagatccttttacagagctgtagtaagtgtatggatagtgttgtattctgattgttcatgctatataacatctaagcattttctgctgttaactaggtatcagatttagcacttttatattaattctctattgaattttttatgaaaacatggcaaatggcctccttatgagtatactttttctagtttacatttttgcttttcatatatgcactatgtcgctcgtgaattcttttcctaccttttctgttggcaaatgggggcttaggcctttctagttccatgtggtctctagtataggagaaagcaccaggctttgcactcagacagatgtggattcattcctcccctgacactagtagctttgtgatttggggcaatatatactctgagaacatcttatcttataaaaggagagaaaatacagaggtattgtgatgctagaaataatgtatttaaaacatctagcagagtaagaactcaataactgttagtttgaagtagtggtaataatagtgcggtttatattccttattgatccaaatgtaatgcagaccacaaatgtgagccatgtatgtaatctaaattttctaatagctgtgttaaa

SEQ ID NO: 115139 - DNA, 2226 bp, Homo sapiens
ctcagaaaaaataaaaaataaaaaaaagtcttccctatcttttaatgctgttatatttgggattaagttttggttttttcgtggttttttttttttttttttttttttttgagacgttttgctgttgtcacccaggctggcgtgatctggactcactgcaacctccacctcccaggttcaagtgattctcctgcctaagcctcccgagtagctgggactacagacactcgccatcactcccagctaatttttgtatttttagtagagacggggtttcgccatgttggccaggctggtctccaactcctgacctgaggtgatccaccctccttggcctgccaaagtgctaggattataggcgtgagccactgagcccagccaggattaagttttaacatgagttttggaggggacaaagattcaaaccatagtacatacaattatgttttagaagaattattactattatcatcattattaccctcatcatccatatttgtttggcttcacttcattaattttgaattaatgaaaatgttccagatttctggatttatccaaatatttaaaaaaatatattttcactttcagtaattttagaatgtcgcattgaagaagtcccatgattctttaaaaatttatatgttaatataacattttgaaaatgacaatacaattaacagcaaacatttgttaagcatgtgtatcgtattaggtactattctgctttgcatagctctcaactggcattattaagttacctaaagtcaggtagctaggaaatggcagagctgagctaagaagtcaagcagtgaagtgagctccagaactcattttcctaattacgctgccatttggtcttcaacaaataaaaccaatattaacatattgtacttactaagagcctgttcagggtatcattacattgagatggcatgaccctgataagcatttcaattttttgtacttggaaaattccaattaggataaatttactgcagaatctcttgtctgctttgttttggctaattctccagtctgacaatttgctgcctattaataggatttatctcacctcttttatctgttggtcactctacaggactgggatctctttcactagggttatgtcatacagtctttcattcttccaacaaattataagttagagataaagaaacagaaaagagattcagttcttccccctcaaaaagttcacctagattggtccaaatggttgtggtcgattttccataaatgttggatacgttgactttctagagactatttctgaggtctctgcagttgtccatatcagtttcttgaattgtgctttctgttccttggtgctggtgcaatagaacccactgattgggtcttacttagcttctaaaacttctttgttctgctttgttttgtcttaattcacagtcttctcattccacactctgccttcactctcattttctctatagtctgttaaaatgggaagaagatagtttggagtgagccatcctcagttcaaatcatggctctacgacttttaaattatgagactgtaggcaagttcttggaaccattattttcttatcctccagctctttattgaagattaaatcagagaacaaagtgtcaagacatggtctctgtctttgaagtgctgacactttagtgggagagatagacctacaaacaaataattaaaacagcagtgataagtatcataaaggtggtgtgtgtgacatgctataaaaacttacaggtgagtagtaagtttttggtgagtgaatgaatgtgtgagtgaaacttaggagaaagggaactgaaatatgacttcttgtcaagagatttggcacaactctggatagcacatggtatgattttataaatgttcattcattcacctaacatttattgagtgctcactacgtgccaggcaatgtgctgtttactggagattaccaagacgatggttcatgctgagaggaaaaaactaaattgttcattgctctggctatattcagtaaaagagcacttgcgttttctctggtcaaatgatgtagcacaagcatttcatagactgtgattaggccttccttatagcatcaataaacctatttaaataggttcttcctgtacatatttttattctgaaatcccctttttgatgtaactgaataaatgaagaaaaagatgagtatatacacagctttcagatttcctttc

SEQ ID NO: 115140 - DNA, 1572 bp, Homo sapiens
ttttaaaactccacatgaactatatgactgggtgcagtggcccacacctgtaatcccagcactttgggaagccaaggtgggcagattacctgaggccaggagttcgagaccagcctggccaacatgccaaaaccccatctctactaaaaatacaaaaattagccaggtgtggtggtgcacacctgtggtcccagctactcagaaggctgaggcatgagaatcacttgaacccaggaggcggaggaggtggaggttgcagtgagccaagatcgtggcactgactccagcctggggaacaaagtgagaccttatctcaaaaaaaaaaaggaatatatattattaacccaaagactgttttgttctagcttctgtttttgcttttcgcctttggctgccttgtgaataaaatcttaaatgaccgtgatagaaaaattatgtaaagtagtattcactaaaactttacttctgtaattcaatatgaagaagcttcacgtctacctggggaaagtatatcagttttctcaagcctaccttgtttgtctagtgacaataacagattcctagggttggaagaaccccctatatttattgtcctgaacttggcaaagatcatgaacattcatttaaccatctaaattataaattatcttataatagcttctttgggccaggagactttaacttatttaaagtaatacagtataatgataggccaggactttttttttttttttttttcctgtattctgtactaagaatcattctgtcagatctgctttgggtttttctgtgagtgtttctcttaatttatatttctagagtttttgtgtcttgtggggatataaaattcctcaggagtgtaaggagtaaaagactaaagaacattaatagtgtgtgaagattgctaccactgagacctggggaagtgaaatatgggcaaatggactcatttaatttaaaattctttttactcttttaccttcttatatgtgtcttttatttgagcatttttaatgtgatataacttaaaaattaagcttcagagtcaaatagaaaatatcaaaattaagaaggaaatagatgtatttttcactctgcctctaatactattaaagtaaaatctctctgacttgaataatagaaactgacagttctgaaaacatgtgccttttcttaataacacaggcaattgtcttttatttatttcatcagggaaagacacttaagctcacatagatttcaatagctttatgcatcaaactttacaaaagcagaaaagcagataaaaattaaaagttaaatatcttttcctcttaggatcttatcttctttattcttcttccttcttctcagttgtttattagcttactcttggatttacaacattttattgacaatctgtggtttgtggactttattagtcccagtctgtcactttaagaaggagaaaaggaacagaaatgattatagccactatttttggatgtattgtaggttttaggcatttagttctcacagccacactgtgaagtaggtgcttcataatcatcctccttctttagatgaggctca

SEQ ID NO: 115141 - DNA, 1050 bp, Homo sapiens
tcccgggttcaagtgattctctggccccagcctcctgagtggctggtattacaggcatgtgccaccaggcctggctattttttgtatttttagtagagatggggtttcaccatgttggccaggctggtctggaactcctgaccgctggtgatttgcacacctcagcttcccaaagtgctgggattacaggcgtgagccaccatgcctggccttaatatgcatctttaaatttgtttttattttgaatttttggtgttctaatacagtttacatcactgcctgtactcactgcccaattttctacaggtatctatctatcttgttcatttgaaaatagcatttagaaagggaaatgatagaattttttttctcatcaatatatcttaattttcctatacttgaaaataagagggattattcaaaatcagtttcagaaaatgttgacattgtgtaggtttgcaagtgaaaagaaggcaatggaattttgcattagcacttaatattgggccctatttgcttgttacttgtttctgttaagatccatggttatatccaattttctttcaattctttactctgtggttattgggttgggtgattttgattctgttcaacaactggatgctttgagtaatgaacttcagtgcataattatccagcgaaatcatagcaaagggatgagatgacaaaaagccaacttattttcaggaactaaaaataatggtataatataggaattaatacatgtatgactattccagcatctgactttattctgatcatttatttttatataaattgtaatttaaaattgtaaaattttaaatacttgctattaatctgtaaatatcgtttactttttaaaaataacagtaaattaaatctgatgttttagtgaaatgcacaaaccactgaattcttttgaattaaataaggtattgatagtaattcatttaaataattatttcccccttttatcactttagttaagcgatactttactactaaaacaagcatgttatttataatagcacttaattgtaataaaat

SEQ ID NO: 115142 - DNA, 2454 bp, Homo sapiens
agactagatgagcccaagaatagtcttaccccacccagccactctatcaggaaccatctgtggactgagaatccgctcctattctgaagcatacggtgtcctgaaaggccttctagaccccttctgggtttggttacacaggctgagagtgccaagcccactggctaaggctaattgtacaagagcactccaacggcctgcagtgcccctgcccttcacccctagcctggctaatgtccagtggtcctcctggaagacttcctggtttcctctgagatgagactcctcccaaagactgggcgactcagccccttggttcccatggcaccctggctatggaataaacgctggcagtgtggggattactacccccatatagatcattcagtcatcttcttttctgtatgattaattctccagccccctccctactccatttaattttagcatatgtatgataaatcttcattgaataatgaacaactcatcagtgataaaccttttctgaggtattgttgtcctttgaaacaaaaactcccagattaaatggtactcaaaacttattagatattttgcagaactcacagttctacattattatagtcatgtattatagttatcgatttactttaggaagtttgagttgtaagtttgacagctcagagaaccaacatttacatctattattaataaagacaggtgctgcactgataatatagttaatgtattcctaaaagaacctaaatgaggagaaaatgacattttctctttgattttagttaattggtgatattttctcatgaaaaaacttttgacccaaagcaacagtatatatcacatttaagtatattcagattcatttcattgtcaatgtccagccaaagcacatttaattcttgcgcaaccatccctgcaataagttaatcaaatgagcactcaatccctattgcatagaatatttaagagaaacacttaaaaattaaagtgtaccattgcatcaatttcagttgcattagaagttctccttagttccattagcctcaattgtttaaatagccacagtggtactatgtatttgctacacactcaacagaatatatgagcttttctctttcctttattcttcttttttaattggaaggcactgctcatgaaatacaattctttgatttgttctctagacagtagaaagacgtcatggttatttcttccttggtaaattaagccccattgtcaaacataactagtgagaaaaataaatgcattgtgtgaaatcctaacctttaaacataccacatttgcttacatatttttctttctgtttcccttatttttactctaaaatatgaagattcgtaggcctcatctgtcttttcatttttcccatattttcaacaaaggtagccactcctccagagtcagaaataaaatgataaaattagttcaaatctaggtcttttactatgcccaattcttcagcagcctctatttccttaatataccatttaatggaaaaatttgacaaatttgcatataatcaaaaggtgattttgcatctaattttcccccctctaaatatgaggcttgagaaggaaaaagtaaggccttagctgaagcttcatcttccttctgagcattaaaggtgcaagagcaatatacactcagaaacaaagaggagaaaaacacagaaaaaaaggagagccaaggggctggtgtgagggcttcttcctattttatcttggtaggagttgattagattatgtgtctttagtgtatctctggaagatagaacatattcaacttgcagtcacaagagatactttttcatgatgataatttaaaatgttaccaggattttttccttccaaatgtgagtatctgtctatacacacacgtatgtatatgtagtttttgaaagggtaaaacttctaaaaccacagcgaatattatggtggttaaaaaaaagtcaacctataaggagaaaaatcataaaaagttaaaattccctttgaaaatattttagaactttcatgctgtagttttctttccaacagtggagcattctcctatttctcctgttatgcacaagatgtagtatttgatttgcattcaagggtcaggatgaaaaagaatactcgtttttaaatactagaatcacacactgtagtggaagtgttctcatcatgagaagccccagagaactgagacccattagggggatttgtatttgtctccctccctcctttccttctttccttccttcctttcttttttttttgttacccaggctggaatgcagtggctcagtcttggctcactacaacctccgcctcctgggttcaagcagttctcgtgccttagcctcccgagtagctgggattacaggtgcccgccatcactcccggctaattttgtatttttagtagagacggggtttcgctatgttggccagac

SEQ ID NO: 115143 - DNA, 1254 bp, Homo sapiens
attctgtatctaagagtacaagttagaaagtgttagcctaataaattttgcaataatttatatattgatagctgaagggaatttaaaaatattttatgtacaattgccagatgttttaaaccaatactaataaaaatatttgtggggaaatacccatgtttcctccctaattcatcaccaactggcaattttagtctgtacgttcagtgacatgaagccactgattatatatttgggagtcacagctatgtcacactgcaacaaaaatttctaaaaaaacttattctcaatttctgcatttattacattttgtcctcggataatattttgatttgctatttcaaattgctttgctgtaaactatagcaaaggagaaggaaatgaggtcattgggagtaaaataaaggactaataaataaaataaatagacttataagacctgttaaatactgtcaagtaaagccaaagattgttctgtagtatcttttgattcacagtagtttgctaagcattctgaagctcacagggttaaacaattcatttattcttattgtcattgtttccctgttctgtacagaaaagacatggtagcagtgtcatttcagttcacctaaagggaatgactgcagccttacgcaaaatgtagtatccaagatatatttgttctataatttcagtgaagtggattctcaaatttcacggttgtttttattaaaatctgtgtatacatatactcagacattagccaaagccataatatctgaaccataaaacagcctcactaaggattcataaatatggcctctcccgcccaatcattttcatatcatgtttgtccctttagtaggttccaagatgatgtttttcaactcccattacaccctaagaatttgcttggatgagtgaaatcagttgcagtttttttcgccagaacatggtgccacacccttggcaggtaggcaatgttgtcttcatatgtttgcagaattactgaacattagcactttgtcctccagagaatacccaaccctacccctcagctttcagtgcactaatgccacagacaaatctggctctggaggggagatggcaatgtgaaggctccccacaactttgtgcatctgggggtcgtacaaaaacaatggcagtcttacagcttctcccagggagatgtcgaggggcagcgttgaggagaaagggtagacagagtgattgttctttctgttgtgctttttcccttaaaaatgaataaat

SEQ ID NO: 115144 - DNA, 6279 bp, Homo sapiens
ggaaaggtagcaatcaaatagagcattgctgaatgtgtgccaaagtgagtgcagggagaatgagcaggctctgtcacatccttaccctggggccaaatgctgcccaagttttctcggttcatgtcaggccaggtttggggtgctttctttggtctttcagtgaccccagcaggatccagagaacaccctggcctaggcatttggctcaatgccaggacacctttcatgtttgagttgagctatggagaattcaccttagaacagagcaaactccctaggcaagacttctgtgagcactctacattcaacaatagacaccattctcagtgattaccaagaattcaattacacatccttctcaacagtgaagcactgcatctttaacatcaaagcatggctttgtgtttgttcatcactcatcctttatgaatacttcctttatatgtctgcatgtaaatgtgcctataatatatatgtgtatgggatgtaactatggaccaataaggctctttaaaagacaccccagaaatgtatgaatgccaccttcttctaagcacagagacttttaaaatttatgatatattgttttacaggaaaaaataaggtaagttaaaatgatataatttgggtcttcttttcctatttaaaatacatctaagtttgaaaattagtatcagtgtaggatttggcagaataaagatccgcctaaagatcctctggattggagttatctctgagatctggtcagagatatcttagaaacccagcccagtaagggagagagcagcctctcgaggcttggtgccctggtgatttcaggactagaggataggagaagacaaggagcaaatggatctaaacgctttaaggaataatgcaaagattaaaaggttaatagcccctatatccaggatcaccttgagtggttctctggttatttcagtggtctcctttgttccactgaaatggtcttctgggttctaccatatgagccatacaagaaaatctctattttttattttttgtttgcttttttaaaattaaaaaattgtacattccatgcttggtcattcatttcattaggaatttgtctaagaactataggtatgtgcttgtttcacccatccatttattcttatattcaatatggattgatggagcatctaattccataagcctggtaaataaaatgtactctttagaataaaacatctttcatcacctgagggtattgacaagaatatgccaaggattctaaagccagatgccagaagaattccaaaaagattgtggacatcacttggaataaatacatagcacagagcttcaccaggagactatatttgtacgtgtattttcaacctaaacattccggaacgaacgtgtatagattccatatcctggtgatggtggtggtggtggtggtgtgtgtgtgtgtgtgtgtgtgtgttttcaatttgagcagtctattaaccacatgtaagtagctagaggcaggagagggagaggaatgtgcggaaatgcatttgacttgggatgtctcattttccagaatccctgccaagggctggcaagcccagaaaggcagaggctggcaccattccctgccactctccgccctctatggtataccccatcagacgcctgttgtaggcgtgacctagattccctagctgatgcctgggaccagcagggcccattgcattttttttttttctgtgtttcctcatctcttcatctcaagtcttgctcagccattaagttaaagaaatgctccaaaggtctgtgccaaaatgtgtctgcccttgttcttagtggcacaagcccgactgtcagttgacaggtgggcacaccacctggggaacagttagcttcccataccagatggagttttactggtccaggagaaggcccacaactgggttgctggaacagatgctctgcagacagtctctggatctgttttcttcctcctccccatgccccacctttgcttactgcatatgagcagtgccctgtaggactgctacagactacagctctgtagcattataggagacttctaagctaaaatttctttaccgaccttatgtttgagtaacattctccagcccttcaaaacctgagaaataaagtctctgaaaacagagatatgtataactatggaatttgaatagtgaccttaaaaaacataggttatgaaaacatttatattagcatttgccaaaaggttgtttggctggtcttgggagtgttgacactttaattgcgtttctcgcctctcaatagcacaatttagattaaatctaattatggtagatggtagtacataaaagtagtaccttttagatttccaaagtgtggaagaaaaagattttccccatggtctgatatatattcttgttttattgcaaataattgaagaaaagtgaaagtagattcctctggttttcaacctagtacttaaaaattttagaggaaatttaatctggagaaactcttgttttttacataagaaaataccagtgttttcagtcattcctttcagccataaaacatctgtattgtgacaaatgactcatcaattttagtgaaaggagtctaatctcagccctaagcgtgatgtcttgttatagccccttgtggttgtgttgtgcatatttcttgctaagtagtgtttgtagaagtatgtgtactttcatttaaaagagagtcccatggcaagcttcttttccttagcattccaaggattttataattatccttttttatctttccttttcctatcctcctctctccctcctcctttccttctttccctttctttcctttcttccttcttccttttctgtgatatataaaaaatgtataatgtatggaacatgtgtatgtagtttaaagagtagtattagagcaaatggcaatgtctccactacccacattaagaaatagaaatagaaaactccctgtgctgtattattctctgagcccctcattttcatgcatcctctacctcccacctagaagtaaccactgccttgaattttgtgttgcctgtttctttttttttgcttttcaatacttctgccacccatatatacatctccaaataatatatgtaatagccatcttatatttttaactttatataaattgggaatcatgctaaatgcattcttctgtggtcttctatttttgttcattattattttgagattcatccatactcatctctgaggctatggtttattcgtctttattgctgtgtaatattccatcatattgagtgtatcacaattgatttattcattctactgttgatggacatttgggttggtttcattatttggacattacaaacactgatgctgtgaatgttaatgaatgtaacatttgtatatgtacaaccatttctcaatggtatgtacctaagaatagaaagagttatagggtatatgcatatccaaccttattaggtactaccaagaagtttcccagagtagataagaatttccatttgtttatatccttatcagtatatggtattatctgggttttaaaattttgcaaatctttgtgcataaagtgacattttctaattgttgctataaaatacaagaaatatacattcgtatgttggtttttgtagccagaaaacctagacttttaatccttttgattcatttgaatataatattaatacatgcctgcacatattaaattcattagcagatgaaaatttctttcatccttttcatgtcttattttgattactttttcttgtctacctacattgactggtatctcctggacaattttgaataggattggtgacagaaagtgttcctgacttcctctggcttacaaaaggagtgctttcaacatttttcctttaagtgtgatgttttctgtgggatatttacttatttaaatagataaatgcctttaatctcgtagtaggtaaaaaacttttttataaaagatatccttttctattgtgaagtgaattttattatgaatggatgaggaagtttatcaaatgcttttccataattatggggaggattatgtgatttttttcctattaatagtaactattaatgttgtaaattacctaaatttattatctaatattaaatcacccttgtatagtattagatgtgatggctacagaagaaatgtctgaaactctttacccttaattaacgtacagtctaattggagagacaaaacatgattaaagaaaagttaatagatgccacaagggtagattgtaattattttctgcattaatggggctttgagttcagttggcaaaaaccgttatggactgcagtgggctgagccagcttcctgaggcggggggtgctggagctgagactagaatacctgtttatctttttacagcactttgaatagcattactttgcattaccaagttacttctttttgagattctaacactgatttcaagtaatcattcatatgcgacaacactccatatgactgttgttcttcagtgagatttgttgcactttgtctgacaaaaccacctttaggatctactttgttcccagccaatattttgctgcagctcaatttgtaggtcattggtcccatcctgaatttgctgctacaaaattcacttccaaaatacttggacttttttattttaataaactacttgattgccaaggctaattagaaaagagagctacttaagtagaatttaatttaataaacattcatagaacacttacagtatgaaaaggactctgctaggcctccatgtaaacaacaaattatagctgccctcaggaagctttctgtctgctaggagtttatgcttcactagggctgtgctgcctagtgttgtccttggacacaaactgaggaaaatcctcattacttttcacattgagaatgggttttgccttggttgtttcatcaggttaatctacctctgaccaagctgagtaaatcattttcatgctaacagtgggcaaggatgggaaaatgcttgttttcaatggccaaatagatgatttttttttacagttttgttttaaagtactatgtgtacatactatgtgtctttgttctgtttaatttagtcttgcaggttttcttttactcgtttacttcacattttctgccatttcagtcacatacgtatagcccagttttgacaaccccatatgacctcttcagtcagcactgcatacttcacattcctttatcttaatttatacatatctttgtcctgacaattccccaattgtagaattaattgtttttttctcttggtctttttgtgttttgctctattatttgccccttctttatcaccttcccatatgctttctggaaacagtcatgctagttggcagtatatcttgctatcttaacaggaaaatttcaatggatagttcctaggatgcatcatatttttgtaactgtacaatcaatcagctaatatccaaaatacagtaccctggttatgcttattaatatttggagccgactgggcacagtggctcacgcctataatcccagcactttgcgaggccaaggcaggcagatcacttgaggtcaggagttcaagaccagtctggccaacatggtgaagcctcatctctactaaaaatacaaaaattagtcgggcatggtgtcatgtgactgtaatcctagctactcaggaggttgaggcaggagaatcacttgaacttaagagactcaaatatatatatatatttggagccatttagtttcatttttgtttcctgtagatgtagcagtgttactggcttcttccattgtctttgtgaaagcggtgaatgccaatggaaacgagtcacatgtttatattttaacagtcacatgtttatattttaaaagagtggaatatttgtggtaagtgcagttgtggcttaatacctctgctattccttttagctatccaaaccagaggtgctacttcctgaaagtggcagaattcaaagaatctaaccatgacatgcttttgatttttgttattaaggagatctagggctagaaattgctaaagtagcataataacatggcttagtatagaaaccaggagctgcagcccaagatctcggcagtaccatgtataggttatatgactctgagttctctcttttttttttgagatggagcctcgctctgtcgcccaggctggagtgcagtggcttgatctcagttcactgcaagctccgcctcccggattcacaccattctcatgcctgagcctcccga

SEQ ID NO: 115145 - DNA, 1040 bp, Homo sapiens
gtagataatggtaatgaattattattaaggtattatagcatatcttaaaatgctttattttattagggcatttaagagaaaatggtaatagttacttaaaatacatatatgaattatataccccagtgccttttttgttgctgttattttacctttgtgtagtctctatatcattactggttttttttttttgtgctatgttatatcttagttgggaatttccatgttttattcctaatcaaaaatctttaatattgttgttttaaaacagaattcatgtacttctgacaggatttaattagcaaaattattctttttttcctctgtattttaagaaattgaagtactattaggtattgggaaaatatggcaatttttaaggcaatccaaataaaagccatatgagactctacgtggtctggtctaggaagtcacaaatttggtgagtatcaaaatgaactggtatgacatttgctaagcaggtggtaaatgtcaaaaatttgtctactagcccaggatggcctatatgcctcaagtcttgagaaccactgtgtctctagggtaatcatctgaaatgcctttcatctgtttcccgagttgtttctcagactaaaccctgtatagaaaccttcactctgagaccacactgaaaacacatctgcacttaagaatgtggattttaaacactgtgtgtgttgcatgcacataaattatatttaagagaatctgtttttatagcagatccttgatattcatcaggatgcattctaaacttcccaccaatagcaaaatcacttgaatattgtatgataatggtatttaagtaagaaaagagtaaaagtcatttttgcacatttttcagaaatcactttcatatttaaaaagtttaataacccagatcagtcttttttcttttttttttttttaactttaaatgtttatattatacttaaattattaaattacctccagcattcaatctttgcaagaaatccaagtcagtcatttaatgggtagactatgtgcaggaagcatagtgt

SEQ ID NO: 115146 - DNA, 1093 bp, Homo sapiens
gcacggtggctcacacctgtaatcccagcacatgggaggccaaggtggatgaatcacttgaggtcaggagtttgagaccaacctggccaacatggtgaaaccccatctctactaaaaatacaaaaattagctgggtgtggtggcgggtgcctgtaattccagctactcaggaggctgaggcaggaaaatcacttgaacccaggagttggttgcagtgagccaagatggcaccactgcactccagcctgggtgacgggacaagacttggtttctaaaaaataaaaaatgaaatgaaatgaaatgtcattgctcatttaacaaaacaacttgtgttcattctcttcaaacaatattttttgcacacttattgtgtgccaccattgtgtaaggaggtacaaaaatgaataacagaatgacaggtacaaagattaataacctacatataacagataatcacaatatattatggtaaaagccactggaaatatgtaaagagtactaaggagtgcagaggaggaactgaaattaatatgaactaacatgaacagtggtaagtatgtttcacatacattgtatcaggcacttctcctgattgttctgggaaatgtggtattatctccttatccattttataaatgaaagacttaaggtccacaaaaatgaagtaataaattatgcaagatccaacttctaatactgacctaaacctgactctttggactttgtgtgatatgctctttcattctaccacaacaatctcctgtcattaaatttttttaaaaataacaaaaacattttattatttgatttttaaaatgtaatctaattttttttttttaactttgaagtcttgattcaagtttttttctctttggatgttttttttatgttttttgctacttggacaggccccagttgccattttgcagatgggccctttttacaaatgagctcaattgaaatgagagtaatatattgaagaaactaagccaagtgtgtttttatatatttgtgagacagagtggctattgtattctagtacttggggggagaaagcctgctgatttgggcttaacttactgtcctgtctatc

SEQ ID NO: 115147 - DNA, 2091 bp, Homo sapiens
aatttcaaacatataggtaagtatagaaaatatcagacaaacccatccaacccattacccgtgataaaatgttaacattttatcatgtttgtttcagatcttttctttaatgaaacaaatcatgaaagctgcatttaaagccccttcctttcccttcctcatcattttcccatcctttctccttcagaagcaagaaatatcttaaagttggtgtgtatctttcccagtgtacatttctatgctttgactacatatacatgtgtctctaaataatatatgataatggtttgtgtgataaaaatttatatgtgatgccttacagctttttaaaaaatgttctggtgttttctttatatttaagttctttctagattttttgtgattataaacagagctgttgataaatatctttgtacatgtctccttgtatatgcaagcatttctcaagtgaatacatgtaaaattgcagttacgggggggtcacaggatatacccaggtttaacttgatgaatatttaacttggcactttggtttggagatgacaaacagtaagactgggaagtcagaacttttggatttaaatccttctcactgttgaccatctaaattatattgggcaaaaacttaaaagtctgttttctcatctgtaaaatggggctaattctagaacctaccttgtagtgaatggtgaggattaaaggagggcatagcacatagagagtcttactcattattaacagttgctccctgctttcttccccctcctcctgacagggttgttttgagggttgaatgagttaatgttccataaggcaattatatcagtgtctggtatagagtaagtgtcatgggagtgctttttaaatacacaaaagtcaaacaaaaaatatttaatttagtcacaaaggaatatatttatattcctttgagggtacttaaagaataaattccaaatgtaaaaaagaaaatactgcaaagctataaagcccttacacaacccttacaacttttgctaggttaaattataagcagttaacttattttactttcattcatatatgtggtattgcgggcagaaatttttttttaatcattagccgataaaatgtacttttctctctagttatgaggaaaccaggaaaaccaaatcttttggtgattttcacttgtgaaatttgataccaagtcttgttctttaagatgttccagatatatcattctgccctcatttttaatatgtcaagtttgcggtactgttatattagtagtgttattttttcaaaaagtacaaatgcaaatatagaatgttgtactttgaatagcatagaagaaatgagggagatgattaaacaaggtataggcctacctgcatatctttgcagcctcaccaaaatccagaaatctgcctttttatagtatgtcacttgtgtgtgctcctaacgtgattgacagattgttgtttcccctctttgaaggctcaagaggttactcggattattttaaagcatattaaagtgtatgtcgcaccaactcttactctcagatttaaatagaatcttctcaagcattaaagatggattactttgtattacttttattgcttttcaagtgtttttggaaacatttaggagtcctccttaaaactggatttcctagaatgggttttctttgggggaaattttaaggattagttgtagactttccaaagtctgaagtttaacaaccaacaggacctgattaaaacaaattacttagttaaaaaatgaaaacagggcagaagaggaggaaaccccatcgtatctctgtattccttataataaatcagacctgtgtgtttttaacaaaaacgagggtgtgcttttttcccccttcattctcagtttcttttgatcattgatctgggtgaccccacgctcagggtttttttcttcatttgacatggacagatttttgaagtatagctctcctttgggaaccccgggcagttccacttgactaacctgtgatctaatgagcagtgatgcagggttacagtggccattttgtgtgctttgacggaggatggctagacagaaagtgggagaaaggcg

SEQ ID NO: 115148 - DNA, 2311 bp, Homo sapiens
atacctgctttcatcttttgcaatgaatagaatactctcctacttagaaacaggctttttctccttgccactttattttttccttacctatgaattgcatgtgcctttgatgaaaacaatgaactggacatgtacaacggtacatgtaatagactgaatgcaacttagaagtggccactcttccagtgtacataggcttggaaatgaactaatccaaacctgagtaatttgtttatagtacctcctttcacttttgtttattggtatctacagtctctcattctttttctttaataatatctctttatatagaattttatattcagccatgactctattatttcaatagtcacattaccacttcgaggattgataccatgaaaaaaggttatctagtagttttgagtgaagatatgaggcacaccttcaataccaataagaaggtatactacaaaggtctaatgaagaaaaatatctcattttgaaggtagcacatagctttcaactgactgggcctgttatggtctttgctgtgtttgttatcacagtatctaatagtgaagtggtaattactttctttagtagaaattccaagatctaaattggtacacatataaatatttgacaacaaaaaaaaaatttacaagttttttactaggttacaaaggagaagagtcaagtagggtttaattttgttttatttaggcttatatcttaatatgttcaagtatctggattcagttgccctaaacacagtatacatagattgagttttagttcatgctacacctgacataagattatgggctataatgtttacatggtaactagctccataaaataactgggattgttttcataaatgagaagttaaaccaatggagccttatgggaagaaggttctacatatgaactgttaagtaatttagaagtcacatagaacaatataattttagcatgtagaatttgtaatatttattttttaatactggttatgactaattatttgtcaagccaaagcagttctttattgaaaggggccagagtggaaaatctgggtaacttgtgtacagtttagacaaggagaacaaagaaataatgcaatgaaaataagagcttgtcaggggaatccttagagaacagctggttgaagaattacagttgttaactgtgctatgaaagaaagatgctctctcatcaggcgttagcatatttcattgaagagaagactgaataatcattagagggatcctgaaaaataggccaaaaaagatcttgagatggaggtacaatgtatatgcacaaaacactattgttactactgttattattattattatgggaaagcaaatcactgtgtccagataaatgtcccgattttccaaaacatggcacaaattgtttagaaagaacactttctttcttgttatacataaagatttacattttactcagttttcatatagtttcatttaaagtggtatttattaggccagacatggtgactcacacctgtaatgccagcagtttaggaggccaaggcgggtggatcacatgaagccaggagtttgagacaagcctggccgacatggtgaaacccattctctactaaaatacaaaaattagccgggcgtggtggtgcacgcctgtaattccagctacttggaaggctgaggcatgagaattacttgaacccaggaggcagaggttgcagtgagccaagatctcatcactgcactccagtctaagtgacagagtgagactctgtctcaaaaaaaaaaacaaaacaaaaaataaaatagtattggtcaaatttattggagagttaagtgtaaatatttgaattatttaaatgtttaatatgtaaattatttaaatagacagccatgaatatggaaatacatgtttctgcatattttggataccaattttgcatattaactttgatgtttttctttaagtataagttgggacatttttctgttttcttaacactggctttttaatgacttatgttaataagcaaattaagtccattttttaagtgaaaaaatgagaatagattttaaggcaaagcatgaggtcatcaggtacttgagtaatgaatggcctgttactgttaatggaaatgtttttgagcactatagctatctttttttctttaccagagaagctccttgttttcttttcatattgttaaatcttttaaactaatacagttttaagctaatacagcacagttttctgctctagggaaatacaggcttctttaattattctgaatgttgtagtagcccttcaattatttaga

SEQ ID NO: 115149 - DNA, 1160 bp, Homo sapiens
ggctgagactaatgagaagggttaatctgttggattttatccagaactaaggatttgagacataatgcacaaatggtttactttttttcttaatggagcaagagatatatttgtttattccttcccctgaaaaaacagaaacaaaacttcctcttgattctgtaatgcagaagcattgtcactcattttgaatagtcttaatattttcttatataatctctacaaatatgtctgaggagcaaatacaggtcttcttaaaaggttctgaaaacatagccattgatttctacttcagtatctctgagttgtgtggagcttgaaattataatttttatatgttaaaaaagaatagggcataatatgggaagaaaatatgaaatcttagttcctattataaaaatgagaaatcatatctttgggaagttataaaaataactataactaattatataaattaaccccaataagaatatcttaaggaggagtctttagattattctttagagagaagacttcagcattaagcaaacttctttgcaaggtactgcaaatattggcatcacaagtcacagagatgaaggaaatattgaaacattttaacaggcgcatgtatgaaagtcaaatgtacccccagcctcataatcagtaaggcattagtgacatgtctgaagaagacattccctaatattattgcaaattaagtaataaaagacctcaagagaatgaaaagagaaaaggtgcctgaagccaatgaattacaattgacaacctaaaggcagttgaagaaccaattgctagagtgattgcaaagctattcataatgtgcagcagacagagcacaccagaaagctggaacaatgccttcagttcagcaatattgcttcaaaagaatggaaagaggggaacgggaagagccactgaccctgagaccaatttccaggcagctgcacaaactatatactgtaattaaaggttttgaccagtaatcacagcaaagccagactacagaagtctgggggaaccagcaatgttcataatgaggcagacatccttaacttaaagcatggaaaaaacaggtaagaaagctggtccatttctggcagtgactttgaaaagttctgctgcgttagcacaaatacgaaaatcacatatttttggcc

SEQ ID NO: 115150 - DNA, 1014 bp, Homo sapiens
atttgtcaatattccctaaataatacagtataacaactatatacgtagcatttacattattaggtattataagtaatctagagatgatttaaagtatatgggaggatgtgcataggttatatgataatactcctccatttgatatcagggatttatgcgtctcagattttggtatccatgggagattctggaacccatcctcaaaagataccaagggataactgtattttgtttgaaagagtgactacctccgaatcttaccatacatcctttcttactgccttcataccatcaactttatccagatttccttactctctctttactcaagccaatgcatctatttttatccttgaatataaaaatttttattttcctgaaacaccaaacctgacctgttaatattgcttacaaaccacatcttcctcgaatcctcaccactctaaccatgttaatacatagttttaaaaagattcaacttgttaattatcgtatttacaaatgtttgattttatgtttctacatttgtgtttgtctatttgtggactttttttaacaccatatcagggtactattctctttccaaaatccctcatagaaattggctggacatcttggccaaatgatattcttttaatacattttaaaataattgcttatatttatcttatagaacttatgttgtttgctagcatcaaaatctatttttttcctgtttagatttatcacatagagactggtacataatgaagctctaagggaacataatgacatggttttaaagtgatgaattcaatttattaaaaacaaatgaggccgaggcaggcaaatcacttgaggtcaggagttcgagaccagcgtgaccaacatagtgaaactccgtctctactaaaagcagaaaaattagctgggcatggtggcgcgcccctgtagtcccagctacttgggaggctgaggcaggagaattgcttgaactcgggaggtggagactgcagtgagccaagatcacacaac

SEQ ID NO: 115151 - DNA, 1561 bp, Homo sapiens
tgcccaattattttcttgccctttcaaaagcaagtgtagtcttgtacattacatattttttctttctgtaatatacctggtaatgacctgggtttaacttaccagaattttaagattttatgtcttgagagctgatagtgaaaacatgtatttttaaacaagcttaaaaaaacaacaacaacagcaaaactctaggaaaaagaacaccctttacatactgtctgaaagccaagcaattcttgcaacagatgtttgttgtattcactttggggaggtgaattccagaatttactcatatcaactatttttctctatagaaagcattcgagaaaaatttattattatgtcaagtggcccacttggtacattagggaaaattctgatctaatttaaatgataaagctataaaatgagagaaatcttaagggtaaataggttggtttctcatttgtattgaattgtaattgtaactaatttgttttacaactcccataggagagcatacttcagttctgaagttatttaatagatcaggagggttttatgagaagttaagttgatatagtagccaataaatgtaatcctattttccttctacacagttgctgattgtgattcttttacctcctggtttttaaaatcttattttcattttactggacattgtgtcttataaaagaacacgttttgttaacatgaaacagtctatattttctagcaatgtcatctgatttgatgtttgtctatatccttaatccaaaagtatttaactttttcagaaatagtatatcaaaagtacagtgttaagtatttgttgaatattttctattaaagcaaatactaattgagaaatatgaagactgtgaaacagagttttgaggcagaattataaggttgaatggctctatttgttccacggctcattaacacaggaaaatacagcttctaaattagggtgtcaacattaaagttaaaatttgtgatcaggccatttctcaatttttatgcaattttaattcagtttgttattatgacatgcatagaactttgtgttatgtttgaaaaacaagatataaatgcgagaaaagtatttgcaagtatttttgtaatgatataaacattactggttttttagaccatgttttattttggttataaatattcagatttttttgaacaatgcattcattactctgtgcatgaagagtttatttaattttcgctttttagtattagacatcttctggaagagggtgctagtgtgtttctatggtatttaactatcacatttaattataactacttatttataggtgattatttctaccttgtgtactttttttcctttctacaaaggatcagacagagttttgaaagactgaaattcttgggcaatctgtgtctctagataataaactatagtttaaattattttatatttatattgcttgataacagatcatttcttttttggtagctttatgaagtactgagtatcttctctgacttcatgtgacaaatcttttattaaaaaatgcaaagcagtgtttaaatcgtgtaa

SEQ ID NO: 115152 - DNA, 1290 bp, Homo sapiens
tcagctattcattctaaaaaatcttgtaatatgtatgtgtacactactacatgtagacagtataatgtgtgtatgtaatatatacataatacatatacacattgataaaacatagatataagtgccattttaacttcagataactttattcaagttatttgcaatatctgaaaaaagattttttctttctgcttttaaagttatgaacctgtgtatctgttttccttagacatcatataattgaaagtaatgtatctttaaacctaacatatgacttatggttaccctccataggaatgaaagatgatcacattgaataaaggaagcttttagcaattaattgcttctgagtattccttgtgtgtgttgactggctgtctttcctaggtaaagagcaaatatctttttccttctttttgtgattcatctttcagtaagactgatagttataaatgtagcgttgtcatagatatggtctgaaaatgattctaaacttgtgtatactggagcatatgtggctttgagtttcctttttatttgtatccattttaaatttacttttctcaaaacttttgcttgtaatggaatttgcataataccaatatggggactgctttaagtaaagcatttttccccataattaaataaacatataccatacaggtgcatgtctacactttagactgctttaatgggatacatgggctaattccattataagtcttgaagtttatggaagcacagtgacatggttatacttactttgggtctggcctaaaaagaaaaggatatatcctagatttttcccatttcttgatgacagagaagtttctctgtgtactgtattaaaatgccttgttgaaatgctctcaggaatgttttaagaattaaatcagtaccttattgttggcataaaaatggagttgtggaattgaatcttaaacattttgtaaacaataactttaaaatcgttgggagcaggcattggtattatagaagaggcagtagaagattgaaaagtgagcaaagtcatgtgttactagaaatgtatttagataacggtcgtctttttattctctctttcctaaaggtgttgcacatcctgtgccctattgctgataagcattcttactcatttgcacctgctaatttgtgtatgttttatggaatttaccaatgctaaaaagatggtattttaatctgcaaaatacttgtgaattttaggcaaaattctgatctgtcagaatcaaggaaggtgcattcaacttaccaaaaagcactaaactttga

SEQ ID NO: 115153 - DNA, 1859 bp, Homo sapiens
tcattaagaatggcttggattttgtgtcttccttcaaggccaaatctacctattggctctactgccttctttgttcccatccactgtgatttctgccttttctaaattcctgttttaatccataccacagagtttagcacttaatttttaaaaggtacattggtttccagtaggaattactgttgggaacatttttcagttgctgaaagctctttttaaaacgaaaatttgttttgtttttgacaggggctgataacatccggaaatactggagccgctactaccaaggatctcaaggggtaatatttgtattagacagtgcctcttcagaggatgatttagaagctgctagaaatgagctgcactcagctcttcagcatccacagttatgcactttaccctttttaatattggccaatcatcaagacaagccagcagctcgctcagtacaagaggtatgtctcattagcatgacaactctttgtcttccttgcttgtacttttgctgccacgttggaacctggaaaaatgcatgtaattaggaatgtgctggttatgctgctttcaacatgaaaccttagttttcataggaagcagaaagcctatatcaatctgttagcacttgtttacatacctaaccctacttggagagcacagagttttctagctatttagcaatggttaaaagatgtttctggttatatttttcatctattttgaggggctaaaggcctggttatttaatgttgttttaacctgtggacttagttcattctcttcttcagcttttctaggaacatatcgtgagtatttccatgcattactcgccttcaggtgtcatgttcttgttcctctgaagtgttcaatgttgactaggattaatggatcctattctgtaatctgctaggctgaaaattgatgtcttgcaaattccatgccatcaaatacattttaacatggaaccaatgtttatcttcctcatttaattttatttcttagcttgtatctctcctataaaagcatgagactaattctaggcaaatagagtctcagccaatagagcttgtgattcatggtactgcagtaatgagatatgtgaatagtttttaaaacttaaattatagtgaattataacgtaagtacagtgaaatcaaaactcctgatgtattcctttatacttgtaactttcaggatatgatttcccctctccttcagaaaattgcatgcttcctcaagtgattttggaatgagatgattaatatgaacaatcttgcctttcagcctgaaaaataaatgaggagccaaggacataacatgttctaactccagacctccctcacacttagtgtgtgacccacggcagatagcctattcttgtgcctggcttctcacctctaaaatgagaataatccaatttattatgataagttaataggattaatttggataatttactttgaagtttaaacacctaagtagaagaaccatataaatagagtttttattcaaattttagaaacacagtttaaaaaaaagaaaggcaaggacccattattcaacagacagagctcatgtctcactttagttgcctcattcagcattaagtacgtagcaccttttaaagaatagagtttgaaaaataccttatagataatattaagtaattaagtaaaaaacagcaataaaaatctattcagaaagtcattaatgtgaagatcttcagcattataatgatggtgtctcctaatgtgcttttaagaccttagtttgtaaatcttttaacttctcagcatcagtttttctgcctatagagtagatataatagtatgtaatgaagggtagtttatgattataaggtc

SEQ ID NO: 115154 - DNA, 1129 bp, Homo sapiens
ggcattagttggctatgtggaatttacaataaagcatgctgcattgagtcttacaatgaaaactgtgcactgcacatccttcatgttagtgaaatttataacaagctagtgtacagatacacatgcacactatttttgttgttttaaacacttaccaccgagtaacactgcctccagttttgtccctccagcttatggatggttctcaagcatatggatagtgtctggatgtagcctgtagcagatgctgttggtatcctacccagatctcctttcctgggccagtgcatccatctcccagctgctgtgggtattggctgctaatgactcacacctgtactcttctccagaggcctgcccttggctgacagtaattgccccaaccaaatatgtttgggagattatgagatcatgccccaaccccctcctgctccccagggatggctaatgactatacaagggtgtaatagctcagctcccttgcctttggactagacaacttctgtggttcaatccatgctttagagttccttatcgcatcaagctgaggctagatttctgaaacaatatctttgcctagcttcttcccccattctagcttacttctttcacttctagtttctcctgacagcactccctctaaatcgggtgtacaagaaatgatgtctcaggctctgtgtctagggaaccggacctaagatgttgcttatctcagtacccctgctgtttccttagttccaccaccacctaagtaatgaattccctatattaaataatctctggcttaaatttcctctttatttttgttttgttttcttagttggaccctgcttgatatgcatcaaccctgctcatatcccatgtcttcacatacttaacattactcaacatcaaatgtccttgatcctcttattaaatatatacctagttatttttgtatagtataatggtgaaatcacagattttaggacctgaaaattagtttcaaaggcttagtcaattatacttccctccttagattgttgtaagaattgtatgagcttttctttttaaaacacttagtacctggaggataggaagtgtttaataaatgggagctgtttggctactgatattattctttcaagaa

SEQ ID NO: 115155 - DNA, 1045 bp, Homo sapiens
ctgggtagacctcttagttttgagattgccctcccaactccagctcttctatcttgggacttgagtcagccaaggttagaataaagatagtttaaagtaagacttttattcccgctagaaactagctctaaatttatgcctaaatttcagtagatcttaaatgtctttttctcacattaaagacaatgagtatccatatgtgccatgtcagaaattaaagccatgttaaaaatttttataaaagaataataagctcataacatgttaatataaataacatttttaatgaaaatcaacaattttgaaaacaaaaaaatagtgagaaaattggcaaatctttttaatctggtttaatagaagagggccggatgctcatatctgcttctacagttaatctgttgttaatatgttgtttgggttgaagtatatgaagaaagtctagtctcacatagataactcaaaaagggaggcatgatttaataacctttttaagtaactgttgattgtcttctttgatactatactgaaattcttcaacaggtggttgtttcttaatcagttgtagtgtggaatctggaaaacttatcagggaactttttgtactcagttaattaacttgcattggtctttcttgtactttgaatgtatttttttatctatgcatggttttgtaacatcatgcattcgtcatttggaaaatattggttcactgagtagtgtagagcttccaaatgtttacagattactttatgaatatctgtctattaatatcaccaccaatctcatcactgaaaagctgtcaggctcacttaaaacttagcagaaataagttttctaaaattctagcttttgcttgaaaacaaattttaccattgacaacaaatactatcatttgttttccttgaaatgacaagcttgcacatctatttttgagaaaatgtctatcaaacagtcaaatctgaataatcatagtttgtcagttgaaatttcaagtaaaaatggagttgtgtgaagtagcttacaactcaaacagttgtacaagtgc

SEQ ID NO: 115156 - DNA, 1057 bp, Homo sapiens
aattagttgctaataactttactcaagccaccaccatcaaccaaaaagatagattatttgtatagcaaagaatgatttgcttggtaaattctacattctacttttgagaaatcagaataagtattctataaaagattaattctttaaaaactattgagtttccattatgggttagatgtggtcagagtatggtgatgaatcagacacgaaaatgcacaaaactcccatatggttcttccagtgtaatcaggaagatgaactatgcatttagattactatgctacagggtagaaagtgttacatggagaaccaagagaaacagaccagaagatttttagaaattattcccagctgcaagatcaggtaaagcttggtggagtaggcaacatttgatctggcccctgaagcgcatgtagtggtttgaatttacaagaactaaggggacaactcacacggtagtaactccaggcaaaggagataacaaaaccaaatgcataagggtggaaaccttaggtctggtccaggagagcaaaacgttttgctcatttgtggagtatctaaggagatcaacagaggaacatggtaggaatggcaaagtggagccagattatggagaactataaatgctaaatcaagtcatttgagaacttcaagttataggcacttaatgtttttgagcagagtagtgatataatttgagctagttttctggacaagtattagtatatttgtgatagtttgtgctagttttctaggtaagtatcttggttcatttgagactgggtaatttataagcaataggagttttttttggctcggtacggctaggaaatccaagttcaaggggtctcatctggcaagggtcttcttgctgcatcaaaacgtgcagaaggtatcacatggtgagagaacatgcaagagagaggagaaaatggagaaaactcctcaaatgaacccatttccaaaagaacagcattaatccatttttgaaagtgaagtccttgtgacttaatcacctcttaaaggttctacctcttaatttttgaaggggcattga

SEQ ID NO: 115157 - DNA, 1029 bp, Homo sapiens
tcagtcatttgtatataagaaaaaatattcagaacagcagcaagcctatgataaatgtgtttaaaacaaatttttaaaaaatggacgttgatcctatgtcagaattacaagcttaagcagattaacatacttttatatgtgctgccctataactgtttcgacctgtctagaataagaagagcatgaaaggagtgatatcttcttatcagtcaactatgaaaataagtcctaatctaatatcagaattgtaagaaaattcagcactgtggaaccttactggatacccaataaatgtctcttctcatgtagcctattctctgtcctcaggcaaatatagtctttaactatcctaatctaaataaaatttagacagtaggtgtaacatcattcaaattacactgtctctctcccttttctcctgagtgtgttcttcgtgggaaactgtatttggaagtgaagtgcttaacctcaggcaatgtttcaaagtcatttgtcttctttttggctagtgcattgatccctactcctttaatgctgtgtcactctcttttgtataaccttctctttccaagtgctgtatgacacattaacacttatattttaaagttaattaaaattaatttcattttgagagttccacttgcctcttgagacagtaagatgcattccagagcataagatagaaggttggcaatgactgatttagtgatatgattaagtatgaagaaacctgcttgatggtatatgtgatggagtgggctagtcttgttttaatatatagtaattgtgtaaagagggaagtctgatcactttaagacatgattttaatggttcattcatccaccttcactcatagaaactattcatttcgaattgtctgaaataggatgatcatgttactagcatcctctttaaaaatggcaatttcaaaacacaaaggggaagcttgcttctgagaatagaaaaaaagggactgtaccgctttagaaagaagctcagagagaagaaacagtatttcagataagaaat

SEQ ID NO: 115158 - DNA, 1001 bp, Homo sapiens
aaagattcaaggttagaaaggtcatttgggtcaaatcatcaagagccttgaatgacaggctaataagctctttggactaatgctttgcaaggtttttcacattatcaaacattgaaaatgataatattttaatggtatattaggataaacagaaactgcttactgctagaggtgatgacaagagatggggagagcatgccccaggtcccactggacaccccaagggctacagggatctcagcacttctgtaatccttccaaggcacatctaagttaggaagaagataagatttgtagtttcagatttcatctagacatttctctcaaattcaatttaaagctgttttgtgttctgcccattttctcccctccacacatacatacgcatccttccttagatgtgccaaataggttcctagtttccaaatcaactacctagagtgccattcatttaagtttccttcaaaccatggcttttaattgaaagaagagatgattatgtacctgtgtccctggttctttaattttctacctaagttttggctaccaaaaatcaattctatatttcccaggtatgtatcattgtatttgtttttccctacttgtttttgattttatgatacttttgaagaataattacatctcagtactaatacaactaattttgacatgaagttttctcacgatagcctatgatctcctaataagttaataatatatcatttctgataacactttcagggaattagtctgtggccctcaaataataataaattacattgttaacttttaaatctgaaagagctattgtagactaaacaaaattaatgattttctgtaaaaggattttccttgattaaagaattaagtttcaatagcaaaatatcataatttaatgatgccacatcgtcactgggtgttgcattaggaaagagagtgcttcccagaacactttttttaaatctctcttgacagttaaccaataaaattaagaatgtaaa

SEQ ID NO: 115159 - DNA, 1548 bp, Homo sapiens
attccttcagggagctcacaggctatagggaataatagacatgtaattataaaactgtaatggagtgtgataattgctatagtagagttacgtgtgaagtgctgtgaaaaccaagattggttgcaaatcatagaagacctagcccctttcatgttggcacaaatccacgaatttgggggtaagtcagttaaatcagctacaaagctaccgaactactgccgtctgatttctttctttctttcccaaggatactgtaagagacttgtcaaatactttcctgaaatgatcccatactatggtattccccaaatgtaccaacctagcaagtcagtccaaaaggagctgagaattatttagaaacatttattcttagtgaacccatggtggttcacaatgatcccagtttttaaatctggggcaatatttgcctatcaccaatcatctggtaaccttcccattctccagggttacataacattgctcagagcagttttgcagttacatctgagtttttctgctatcttgtatgtaatctgtctggatctggagacttgagttaacttaaagaagtttgatatactctctcctatctgcaaatttactttcctcttaactgttttcaaagttactctttttatgccctctctagttttttttcttatctgatcttaacatttttgcgagtataacttcattttagcctctaatctttccctttctgatagctttatcctcctttaactgtcttcctgttttggatgaccattcatggtctccgccttctcatcttcttccaattgttaggttgaaatcctttctacagtctagggtaaatgatcatttttggtagtgtagtctctagaataacatagtaaccatttcttctttgatggtcacaattaagtttggagacttagatttgtcattgttttcttatccttctttgctatgaaactgtcagctgaatcaggtatacatttgtcagaactgaggaccttatagcggccacatgtctaatggcatctggctctgatagtgtgtctgttaatagcgatatgcctgctaccaagactggacaaatcacgtatttggccatggataatacttgtgtggggtactgccagcacttgccactttctctctcctcggggtttgattgctgatctaccctcctccttatcaactcatttttatcagtacctctgtcagtattcctaactgaatccgacttgtgtggaacttcgactctttaatatggtttagacaatttctgatgattaatgataaaataatttaaccttcagtatctatgtccttggtaggcacttcccagatcttctatatgcctgtgttgtcctgtgtaatttggtatagatctggcacttagtatttatctgattttcttttaaaagtttatgtttgaattgagtttctaaatatttccttagattagatattaaaaacagaaaattcaggattaaaacatcgtaaggctcttgatacataatacaaaaccgcttattagaaaatttacatagatttacattc

SEQ ID NO: 115160 - DNA, 1072 bp, Homo sapiens
tctactgcagttctaaatcaaattttaaaacaacaaaacattttaatatctgtagctggaaggagaatgtttggagctgtgcaactggcaggcaagagtgtagtgactgaagaagagatgattcttgggccagttttggacacaaactgaactaaactaaaaaaaaaaaaaaaacccaggcagactgtcctgtctagcttcccagtaaagtcagaggggacagtcctggcagtactatggatttgtatgctgggatagatataaacagcaaaactctcagccctgtggctataaaaagaattattttttatgatgtgttcgttgtttaagagcaggctgtgagttttgtttaacatttaattccaatacagttcaaaaaccagaattctatcttgtgtgcttaagctctttcagatgtttttattgtgtaacattttctccagattcttcttttaatgtatgtttttttttccctcacaatctgttaaaagatcagtttgcgtgaatcttgacactgtgatgctatttcatggttttaatttgaatgcgagctgttgcagctggaagcatatgattaatgatacagacttgtttgtcacaaaaacagatgatattttacatttagtcaagatgcattgaaaaattgacttgcttgtattttactggctgtaagtcacattttaattcacttttgaattctccttataatttgaattaatcttaaacatgcagatatatctctcatgatgtagctggctattgaaggtatttgaaggatgattagaaaatcgcatattaaatatacattatccattagttaagtagtcatttttaaaattttttttgctgataaaattgtactaaatgagtcaatgaatctgggagtcagtatacaaagagagtgggaataaagcttataaattcattgttcttgatggcttatatatttttatatacttttacagtttacctgaataacaaggtgatgtttctgatctcccttgccttctgctgtcttgaaactctgccccacatgagacaaggcagtgttttccagattttctaccatcac

SEQ ID NO: 115161 - DNA, 1218 bp, Homo sapiens
ttctgcattctctatcctgttccattggtaatttttatttttatttttttagagatggggtctcactatgttgcctaggctggcctcgaactcctggcctcaagtgattctcccaccttggcctcccgaaatgttgggacaggcatgagccactgtacctggatcgagatcctcctattttaagatgtgtggtggtactcttctggaagaaaatcctaaatataataatagagatttatacattagtaactcttattaagtaatttgtagcattacaaaagaattagtggttttataaaaggtttcaaattttctgtaaacattgaagtctcaatacatattaagttatttgatttggctgcgtattttccagaccatttctaaggcatactttgactctaaaattctcttttgtaagtgattagtcactgcatgttctcctcatattatttcctcatcctactttcctttaaaaaaaaaaaaagctttctctcttaaaatccatgttacgggattcaaagcttctgaaatccaccatgcccaactataatatacaatttaaaattcacattaaatttcattgggaatattctttataggctgtgatgaaattaaaatcttacatactcctccatttatcatctggaacaatatctctgtgaacaaggaacaaaagaacaaagaaatgatggttacaagataaggaaatctagtaggtaagagcctgcacaattttgagataaagttctgaatttttacttttcttgtttttatatattgtatcatggtgtctaccccaggtttattagagaagctgaaatattaaccttgattggcagagtggctattatcgtttttatgtgtactaggctagggctgggccaccagtttaaagaggtgtcaactgaggagtggaagaaaaggttgtggcatgtcaggttataccctaaaagtgtaaagtcccatggcaatacaatgtgagccctaatgcagaaaatactctcagaggaacatgtcctctttgcatagcatcgctgggaatctcgtccagggagttcaatggggcaggtcaccagaggaggacacaaggggcaagtgcaggacggccatgtgcatcatttggcccatgtgctgaccatatgaaacctgctttgggactggaaaatgcctgacatggctaacctagaatatatcactttgctggttcctggcaccatc

SEQ ID NO: 115162 - DNA, 1158 bp, Homo sapiens
attgatacatgcaacaacatggatgaatctcaaaataattatgctgagtgaaagaagccaagcaaaataaaatagtgttctcctactgagataaatttgtattctatttatataaaattttagaaaatgcaaactcatatttagtgacagaaagaccagtgattgcctgggagtgggagaaggaaaatatggcaataagtgaaagagagagattaaaagggtcatgagaaaacttttgaggtgctggatatacttattatcttgattgtggtgatggtttcaccatgtatacatgtcaaaacttgtcaaattgtacatgttaaatatatgcagtttattgtgtgtcagttataccacactaaaactattaaaaatatttctataacttgcaaaattaaaagatactcttaattatctccagttaaaaatcgttgaaattgtgttttgtggagactttggcccttttcttggattgctttccaatgaaaatttattctagacagattaaggtaaaaaaagcttgaaaaaagatgaaagtgactgggaaaggactcggaaagaaaaccgtcagtttctaggtaatcgtatatagctgaattgttaagattaaatgtgtaagcacttcaaactctaagataaagaaattatcaaatcaattaacttaatgtgtagacttttaaaatctcagtgctaataagagaagacagattgatctgtctgtgtacagcagcactcagttaataaaaaaaaatgacagattcattatataaagagtgagagatttctcagtataacccagttgtggttcatgccgtagtgatactcaaaaccatagtgatataacattttcttcccaaccattttggttatatttataataattattcgtgttggtgattctgcatttggcaaagtgcagatcttatagaaaggagcaggttggggaaaaaacggtaatgacattaaggtgaaaaaatatattagaaagcatctgcttccaaaatatattagcataattcctatctagacagtttgtgttttgtgtatgggtaatgaaataccattttttgttgttcaagaatctttgcagtttcaaatcatcttcagctgatcttctataagtcttaccatatccagaccatatctttggttaaagtt

SEQ ID NO: 115163 - DNA, 1047 bp, Homo sapiens
tttagggtatagattatgatttaaagaagaaaaaaattgaagtttatgtgtcttaaaggcaattaagaataaacatgataataaaaataggatgatatattcataaatgaatttttaagaaagttttgaaagtttacctattcagctcatataataaattatcttagggaacggagtaagagttcaccgggatcaaatacaaattttgctttatctgtagtgcatgaatttttttccataactttttttttaaagcataaagattttttaagaaaggaaatgtactgtaaggacaaaaagcaaagaatatttgatacatttagcaaagttcaagaaagaaagaaataaaacaatcaaaaaagttgtgataaatagaaaacacgtatatctgtatcaataaccacaataaatgtaagtagattaaattcccttttctaatacggatagcataaaaatattacatattcagctatatatggtgacaaaagacacttctacaaaaaaagataggttaaggtaaaaatatatataggaaatgatacccttaaaaaaggccataaaaaagaaagtacttaaagtaatatgagatgaaatagaattcaagcaaagatcattaaatagactaaagaaaaagatttcatattgatatactaagataactaagtaatcatgaacctttaaatatttaactacataatcctgaactatataaagctaaaactaagagaaatgtaaagtcaacagatcgatccacaattagtagggaaatttagctctccttatttgagcagataacagatcaaataaataaaaatatataaaggatttaaatagccaattaacagacttgatctaattgataattgtatatttttataatcaaatagaaaatatatgttctttgaattatccatataatgtttacacatgtgaccatattttatgtgttttctggttaatatccagtaaaattagaaattaatagcaaatagacaaaaataatggcacagccaacaaaatttaaaagtactccagtcttgtgtcatg

SEQ ID NO: 115164 - DNA, 1125 bp, Homo sapiens
tctttgtatacttcggtgggagagtgatgttggccataatgattatggaagttctcagaaaaacataaaactagattcccataaatggaatggcaactcgacaactgttgaagaggtaatatgcttatagctatttatcacttaacagactagattgattctctgacacgttcaaagctgattaaaatagatctgagtagtgttcttttgaggaatcaaaaatttgttgcatttaatttcttgcggtccaaagtattgttgaaagattctactgaagatgcttgattattttaatcttgaaattccctggtatttatggcatcattgtgagcagcaataatgcgaagaatttatgtaaagttaattatcactgttggtacaagtgtgtgaagcccttaaatttaagcaacgtacatgattgaaaattggaagttgtttttttaaatgtcttttgttatatatgtctttatatttttcttccatagccaaaattctattttatgaaaaaaatggtaagaaaagaaacaataaattaaatctataacaaaaatagatttaaatcctcaacaaagaaaagaaagcaagacaaagctaaaggtacagacaatggaaacacgaaataaaagaggaattcgtcaggattattaatcaaagggctcatcagagttattaattggagctccacatttggagctgtgcctttatttttcttttctccttgtgttaagtagtggatagcagctgtgtttacccacaaactaaatccttgagtgtgggtgctagacccagagaggtagggcagtgcctcagtaatgtgctgactgccaggtgggttagaaagcccacccacacaggagacaagccacttgtctgtccctattaatcactggaaacagacaatggtaaacaaaagagctggcacacagagattctcaaacaaaagatgagcatataattatgacacaccgcaatatgaagtaaatcagtaccatgaaagaaagatgccaaatgaaaaatgagaagaaaaaatattcaaggacctagaggtaatagagtgatcagaagaagacattcagagagatgtattcatgaaaaagactcaagcacagaaattaagaatttaaa

SEQ ID NO: 115165 - DNA, 1201 bp, Homo sapiens
aatgttcttataataatttttctatgcaaagtttttaaaagactgtgttctattagggtattttaaattataattgtacttttaagaaaaataaatgtatggcatattaaccatgccatatgcttaaaaccttaaatacaatggttgctcagaaactattgataaattaacgtctagaaattagtttaatttaatttaattcaaaaaagaaatacaagcagctggcagaacattcaaatgaaacaaaataatctttctcctatttaaaatttccagatgcatggtttataaaaaaatgcttttttgctttgtggcttctgctgattattccttggtgacaataatattacttatggatatttaaaaatcaaagaacacattgtaaatgcatggtttgagagttatatgggttttaaatatggctgttactaagtattttatttttaggttggacacaaagcttttattgaacaccttccaggtataagaaactattggttggttaataagacatttattacatatgatgtttacttggatgaaacaaacagtaactgtatgtggacagttttaaaaaaagtgaacaccaaggaattcgtaaggttggctctgtgccatcaaaattcagtacaatgaaagatcaagttaggggactagaggtacataaggtgggaataggtctgttctcaagcacggtttaattttgccgaaagagctgttccctgacagttgctgaaatggaaattacaatggagaggataccataggatttggtggttatgttttagttggtacctatttcgtaatgaggttaagagatgcaggtaaaaggcagagcctcagggatcagagcagatacattcgttccaggctagtgatacataagtttttggcatgtgttagtattgaagagcaaatttctagcctatgcatagattcttttactttctcaactttaatagctctgtttccagttgacacagtgtctgaaggaagaggggactttctgagtagaatccaattgtgtatcctgtgtcacatgctcgggggcaagcacttaagggagttgacttcttgacagctcattcactaagtcatttcctcaaatattttttgaggctaggtactaggttatgtctcaaccaggaacacatgaaaagctaggctaacctgtataaagtgtagctttcctaggagttaa

SEQ ID NO: 115166 - DNA, 1374 bp, Homo sapiens
acacacttgcatatgtcacagttgaatttattgtcttgaatggtaatagttaagtcataaatatatagttaatcatagaactgtatactctgaatattttcttataatataaaacttgtattacatgtattataaaatgattgcctatgcataagtggataattatgattgtacttttaagaaaaatagatacatgacatattaaccatgtcctttaaagaagacactaacataaatactatgtaattctaatatgaaatggttataatttaagtaccttaatttctagggttgctgagttatatgtgagaaagaattataagacattaactttaagaattaaagttagatgcagaggtcctcatagatttaatattttctttgaaatttctctatactttcaaatgtctttcttatatctgataaaagttgcagagtgacattacatattaaattaaagaataaggcaatattttgaagtaaaggggatagtgttatatattgccgtaatacacaactatgttttttgcttgtttgtttgtttgtttttgaaatggagtctcggcgtgtcaccaggctggagtgcagtggcccgatctcagcttactgcaacctctgcctcccaggttcaagtgattctcctgcctcagcctcccgagtagctgggattacaggcgtgtgccaccacacccagctaatttttgtatttttagtagaaacggggtttcaccatgttgcccaggatggtcttgatctcttgacctcgtgatctgcccgccttggcttcccaaagtgttgggattacaggtgtgagccactgtgcccagccacaacaactatgttttgataatggcagaagataatattcagttatcagtttaccttggaaattatgtgtttctagtataaatatcagctacaaaaagtaaataaatcttaaccagcctaaaaagagacaatttgagcatcctaagtgttttaatttaaaagttgctaattctttttttatgtttttgttttctaattttaggttttagtattaaagcagtgccattccagaatgccatcttgaatgtaaaagaacttggaggtataacatttcaaatcatttctatgtctgcccttaacttttatgaatttggtaataatgtattatatgtaattcaaacataatgataacttattttagtaggtggttcatttttatcttgataatatatttcctagaaatatttccttctcttcgtatgttttaaaaattgttgaagagttctaagtaacataaactttgggggttttttgaatgaatcaaagaattacactattattggcaatttatacagctcattggttttacttgttcaaaaaattctt

SEQ ID NO: 115167 - DNA, 1079 bp, Homo sapiens
ctctactaaaaatacaaaacattagctgggcgtggtggtgggtgcctgtagtcccggctactcaggaggctgaggcaggagaatggcgtgaacccgggagatggaggttgcagtgagccgagaccacgccactgtaccccagcctgggtgacagagcgagactccatctcaaaaaaaataaaataataaaataacattgctaggatactttgcttagtgtgaacttttgaagacgttttagtagtcaacttatgaagactttgcaagaatttaaagacaataacagtgacataatctgcctgttgggttaataaatttcaaaagttgtattttgcacataggtgcagcaatttctggaaggatattacttccctttgagagcctgcgtattgtcagcttttaagaatcaaagcagattaaacattggtgatgtgctccataaccatttccttttcaaagttgaggcctgtgcctgtcttacttctctagaaaatctacacttgagttgtcctgagcataaccactaatagactgcttaatatttgcagagagcttttcattttcaggatttcaccatcattgctttttaatccatataacacccgtgtgaggtaggtagatacattcaggcatccaagtctcctgcaggtgaatttctgtgccagcaggaatattatgattggcactgactttccttaatttcccagaggccagacacctggagaggctttcctgcaggctcaggtacatgccagtgtttcagccacatgggactgcctcctctttcctcctgctcatttactaggattcagtgacttcatgcaccattaaccataatgctgtgctgactgtgtcaatctgcattaagcccacaaaggaaggggtatgttttagaagattgttagagggcccaatgaacattttccatcctttctgtgcagcagacttcagctgttgacatcttcgtcactccaacaaaagtacttttcattcaatggtaacttttacatctccaactacatacttagattaataagtgagcacccagaatcaagtttgtaattatattcaggcaggca

SEQ ID NO: 115168 - DNA, 1046 bp, Homo sapiens
tacattatgactgttatgatatcccttttttttggaaagcatttttcttagaaagcagttgttcatataaatcaaaagttatgaaaatgttcacagacctagtaattatgccactggcaatttattttaagtaagtaacttaagggaaactatatgcataaagcaatttcttgcaacattttgtattgcaactaaaactttaaggtagtttaaatgccatacaacaagggagtttgttaattacattatggtaacttgatcaaaatgattatagattagaagaatatatacagtcttctatttaaaaattaaaaattagatttacatttattttttgaatttaaaccatggaaaactatgcatttgaattaaaaaactagagaaaaactataagaataacagtgtactttattgatgtgattgaattatgggtaaaacctttattcttttaaattatttctctataatgtcttgaaaatataaagccaattaaaaatgcaatatttattgaagagttttgaacattcgaaaagagaatctaccttcagagttggtttcttaaaatgaaaacatatgagaaggatgtgttcgtttaatttcagcaaggcgagaatgtctgccttttcttcagaaagagaattcaaactttattggtttattaacttcagcaatttttcacctctgacataatttttaaaagatacttaaattgtcaaaactcaaagagccaagaaatcctccagagagcaggacctgttggtgaggagagaaaatttgagtaatttgcaccttagtctagaaataaaagtgaactctatccagactgaattcctttactgtatatgtatgaggaatttgttgataagaggggttgttaaactgtagattacataaatgttcacttttttttttgaagcagaggaatggaatctaaaggcttaggagaatatattgatggtacatggagaataacctagagaaaactgaacactttgaattgaaaaaggttgaaaacatcttctagggatatataccatatttgaaaa

SEQ ID NO: 115169 - DNA, 1069 bp, Homo sapiens
atagtgcagagacatcagagtattttaagcaaggaaactacatgatcagatgtccatttgagaagaatcaagctggccatgatgtggaggctaaattgtgagtagcgcagttggaggcggaggcagaagattactgtgatggtgcaactgagatgatgaaggccttggctgaggcagttacagggggaagaagaggaaggaataggtaggatatatatttgagagctagaattgacaaagcctagtgtagttgggtttggagggtgagagtgagaaagccatggctgtctcaattcctggcttacgtgatggttggatgatggaattattaactaggatttcctacaaaaagtagaaaggatattgttgatcaagaaccttacttcagttcacgtcagcttttgccggcaagtaagttttaaaaaagtgcaggttttgagagcttttcagattttagaattgagataagaaactgtggagctgttaaagggttagagacattgcttgattttaggatgagggaaaggataaggggattgtaatgagtagagaccccagagaagattagcagagctcatgtgtagcctctttgcaggaagctgtttctgactaccttcttttctccttggacagaactgagtactccctcctctccccactgggcgttgtccgtatttctcccagttagtgcctgtagcactgctttatgtatgtgcccatctccccatcttgggttagaatctcttaagggcagctagagcatcatatgtggtattgtatacccagagtctgtcacaaggtttaggcatggatacagatgtctgttaataagcaaatgaaagtaaattgaatctatatagtcttctgttagccttataacagcccttatatgacaggtaggaatctttttccatattctgtttctaaattacctgaagatcaaaggtatggtgacatggctattgttacatagctagagataggatgccagttcaggtgttcaagtgaagtttagtggtatccaaggtttaggatttctggtggaagtaggtactttattggttgttta

SEQ ID NO: 115170 - DNA, 1044 bp, Homo sapiens
ttttttttccccttttgatctaggatccagtccaagatatattgcattttattattatgtctttttagtcttctttaacatggaacagttcctcagtctttctttgacttttaagacattgatattttggaggagaacaggccagttgccttatggaatactccttagattggctttatctggtttcctcatgcttagattcagattgtgtggttttggcaggcaagctgtgggatgatgtcatgctttttgcagtgcacctgccatagcaggaagggaggcatgaagtagaaaaacatttcataactaagaatgttaactttgatcacttggctagagtggtgtctccaggtttcactgttctaaagttaccgttttcttccttataggtaatactttattcaattacctcttaatacttactcagtcattttaaatgtgactatggtttatttccatactgtcatttaaaggaacatttttttccccttcttttggcagtgttttagagcactttgctgcaagggaccaccacctgcacgaccagaatatgacctggtttgcataggcctcacaggttctggcaaaaccagtctgttgtccaaactctgcagtgaaagccccgataacgtcgtgtcgaccacaggtgggtactgtgctggggttctgtcccttcttctttctcatcccaagatgtcctagtttcctgtgcaatttatcccctcccttctacttatagtttaatgctttaatcagtttattttaattttaaacactatctctttttcaaaaaagatttgaaatgaatttaatagcattaaattgctgtatcctatatccctctagcaggtcatttcagtggcactgaataaatgaagcttgggaaaatattaatacaaatgaatcctgaaatctggaactctgatatatgacaaaatggattcatcttgggcccatagagtactttccttccttgaagtgtcactccagcctatgtttcttggccacacactccctgaatagtaaactgatgtagtctgaatc

SEQ ID NO: 115171 - DNA, 1037 bp, Homo sapiens
aaaatcgcaatgagcagttatttacctgtatggcgcctttcttagtagcatgatgtattgcacccaggcctcataacatcctcctgaagaaaggaagcggcagagagtgttaaaatgttactggttaatcgtggggaaactgaagcatggataggtttatgaggcttgaacagagttacacaatgccttagtgtttggcctgggaatgaggcctgagtttgccgcttgctgtcaggactgccgacagcattgtgtttcgcattgtacaacagtgaaaggggcttactcttaacaatgcaagagctgctgtaggagacacacacaatgaactttggtacagtatagtctagaggccaaaatgagtaattttaagtaaattgactataggatccaaagcttcattaagttttaaaacaaaaaacaaatgaaaactctttacagtttttaggaactgactcagaaaacatgaccattccttccccattggaagtagcatactgttgaaagttttatcttgttgactcaaaatctgacactattcctgttacccataggatgatttattcagtcagttcaaatacatgttgatttctaagagtctgtgatttatgtcaaagattttgccttgtaataactatcaatctagccattaagttccaaagaaccttatttccacagcctgtggttttgtggggaggcttttgttttattcagttttggtttgggttcttatagaacagctggaactatagagcctggacttagagaaagagcttggggagacggagggggagatgtcatgttggatgtccttatgacattcggttatatgattgaaaccatgggactggagatgatatcactggtgagaatataaaaagggaagagagaccaggctcagtggctcacgtgtgtaatctcagcactttgggcagccggggtgagtggatcacctgagctcaggagatggagaccagcctgagcaacatggtgaaaccccatctctacaaagatacaaaaattagctgggtgtggtg

SEQ ID NO: 115172 - DNA, 1061 bp, Homo sapiens
agtgagggtcacagaagttgtcttgaaagaaatgatcattgagctgaattttgaagggtaactaagagccagccagaggaaaatagtgaggaaggatgtgtaggcagagggtcagcccctttactgacatggagccggaaagagaatggatcagaaactgcatggaggtgcataggattgccttgagggccatgtatttggtgggaaaaataataattaatattattatcaattaagttttgtgtgtcaaaccatgttttagctgttatagacgttatttcctgtggtccccataacaactattggatgccagaaatgaaggcaaaggtcagatcataaagctccttgtctgcccagataaggagtctgtactttatcctgacagctgtgggtagctatagaaagattttaaatcacgggaaaaacatggtattctggagactgaattggagtaggataagacctgaactaatgacaccagttaggagaaaagatagtgtggttatccaaaggactgtggtgatgtcctgaacaaagaaaggcactgggatccaggaggaacagggaaatagtagaggcaaagttggacagattcataggaattggtgactagtagaatatatgggactgagctccatctttatggagcctaaaagattgttaagtgaagaatagaataggatttccacttttagggactacaagaaaaacaattttggtttgttttcctttttttttttttttttttgttataagcctttctagcttcagttccaaaagcacagtgaatggaaagaatctactttattgagatctttcctcctagggatttttgtggtgatatttaaatccatttgaaggtctacttgtggaacctagtctctctctctctctttttttttttttttttttttttttttttttaaagacagtgttactgttgcctaggctggagtgcagtggcacagtcatagctcactgcagccttgaactcctgggctcaagcaatcctcctgcctcaccctccccaggacctgggactacaggcgcacaccatcaca

SEQ ID NO: 115173 - DNA, 1362 bp, Homo sapiens
ttgctgttctttagccttctcatcaattctgtgaattatcagtatccttccaatgaattgcttttctgttatttgcaatctgaaccctgttttgtacaaaaggaaaatgaggacatccctttttaagaaacacttgggatgttcaagaatcttattttcctggtagtttaagaactcctttgatagagtgagtgctttgtttgacaaaaaaaaaaaaaaaaagtcgatgctactgagactttattctagtaaagctctagttaaatgtataaggcccatggagcctctctaatatcttcatgaatctgtatatggtacttgtataatctatgtaatttgggctataaattcaagaaacataatttaaggcatttgtgcctgtactaatttcagggaataatataaagcaaatactaaaaggattagtaatataaattaagtccacatgctacatttaatcttgaaggaaaattttttttggtatttaattttcaataagtgatttgtgggtgctgaaagagatcagctgacatctgataggtgaccccacatagatctgcctttatctgtgtgttcagcttttgctcgtgaagtttgacagtagtcagaaagtgcctctttaataaagcacacctttaaataactctcacagattcattccagcttttaaagtgagaagatggcttgaactcccactgctgccagctcagctgtggatctgaaatatccagctgtgccctctctgcctctctcatcaccaataacagactttgcagtcagaatctgtctggcacgtgtgttgatgtgtgaggcgagatagcattttgctcaccgtattggcttctccgcgctagaccatagtaaacatttgtctttgtcagcagttaaagcagtgtgatttgaggatgtacagggattacggacacttctgctctgttatgcttttgtctaggtctacatagaaatttatattcaaaaagagtcgatttaactgttagaatagaccagtaattcttgaaagtgtgtttttaggggttttcttcacctttaggggaagaaaataatccaacgattgtcccactatatgtcatactacgagcttttaattgttgttattattgcaaaccaaatggactgcctctgtgtcattagccaccattgggatttggcatatcatatcagatctttgaccaaattggtgttaaaataagcctaaaccctgaattatctttaattatctactatgagaagaatcctgatgtgtggtcataaaaataagttttctttgggaaaacactattgtaactgaaaaatctaatattagcactcatgatgataataacacctattgattattgagta

SEQ ID NO: 115174 - DNA, 1071 bp, Homo sapiens
tatggactaactttttacactattgacattttcttttgttgtaccaaatgttttagttttgataaagttcaatttgcctattgtttcttttttcatctgtgtctgtggtatcatgtccaacaaattattgccaaattcaatgtcatgaagcatttgccctgtgtttttttctaagaaaaaactttctatgtttctatgttttttatacttttaggtcttacatttaaagcttttattcatttggagttaacttttgtatatggcattaggtaagggtacaactttattcttttgtgtgtgcatatccagttttcctagcaccatctgttgaaaagactgttctttcccactgaatgatcttttcacccttgcccaaaatcatttgaccacatatgcaaaggtttattttggggatctctattctatttcattggtctatatgtctgtgtttatgctaataacatgttcttttgattaccggacgtttgttttgaaatctgtatgtgtaagtctggagctccagctttgttctttgttttcaagattgttttgtcatttgtgattctatatgaattttaggatgggcttttttatttccataaaaaaattatttagattttgataggattgcattgaatccatttgggtagtgttgacagattaacattattgtcttttgtccatgaacatgggatgtgtttccatttatttgtatcttctttaatttctttcagcaatgttttgtggcttttattgtacaagcttttcacctccttggttaagttagttcttaagtgtcttattcttttacgtgctattataaatggaattattttcataatttccttttcaggttgttaattattagtgtacagacatgcaactgatttttgcacattgactttgccagtgacatgaacctgtatgtagaaaaccctaaagattgcacaaaaaaaatggttagcttgagacgtaaaccttaggcaaagagaagtttgtgatttgtaagaaatttaaaattaataggattaaaaagagagctgtgggccttgttatgtatttgctttggaa

SEQ ID NO: 115175 - DNA, 1231 bp, Homo sapiens
gtaccggttcactgcctgggggttgaggacccctggattagagtattacagaaatatttaagaggtgaaatcaatacaagtaagagacttgtatcaattttggacattgtgagagacacaggattgaggataagctttggatgatggattggatgatgctgcaatttactgaaataggaaatatagaaagaaggaacaagtttcttttgtgggtggtaggattgatactgaaattggatttttattagtttgagagtacttaagggagatctagatagagatgtttaacaggaagtttaaaaactctagtttggctctccagagcaggacgttgaagcagatatgggattcagaagccatcaaaatagtagaagccatgggaatggaaggaatgtcctacgtgaaacatgtcaaatgaaaagtgtcactggacctacatacatactcttgatttctgtcttcaccaccccagtaagatggtgcttgtgaagatcaccaatatcctccatatttccagatacaatggttatctgtgtgttctgatctaactactcagaagcattcatcttagttgcttacctcctccctcttgaaacacttaagttttcttactttcatgacacttacgttttctgttttttctctcaacagactgactggtttctcctcttgtgtcttcttgtaaagattagaaaactttaaaactctgtctagacccgccccccaccccaactctttgtcattagcatgaccttagtgttataattctagaggaagacaaaacacaggaggagtcacataaaagtataagatttgccaaatttaataggatgtgatttaaaaggatgcatgttccttccattcaagaaaaatgcggctagaatatagaattccatcaacctctgtccaatgataaaaggttaggaaataattcaataaaacaattgtaaaaaatcttgccgtcatgggacttatgttctagtgaggggagactggcaataaacaaataaatagtaaattactgagtaagtaagaagacagtaagttctgtgggaaaacatgtaaggtagttagaacatgttgtggtgggaaaggttgcaatttttttggcttttttttttttacttatactttaagttttagggtacatgtgcagtttttaagagtaatcagggcaggtcttactgaaaggtgatatgtgagcaaagacccaaacaacataaaggagtga

SEQ ID NO: 115176 - DNA, 1158 bp, Homo sapiens
caacttattcattacaggtattactttagacatgagaaaaaatagagaaaaattaagtgtgtgtcctcatatgtgcttataagtggactagagataaaagaaaaaaggtctcctgaaatcagaggttgggccaactgtcagattagtggaaggagcaaattatttccttctctagtttgtgaaatgactgtggggccttcagttgttgtagtagctatttaaaccatcaccatgttttgtaaccttttaaaattctcctgagctttttgcatgtttcttaatgaataaaggataaatacagtaaagtctgggttgatttttttctgtattttcattgatgatgtctgaatataggatctatcttgagccttgctgcccaggtatatattgaccacaggtggcttaatttggcttgtacatagtgaagtacatagtacattagcaacattaactaagtattttgagagtacagaatgtagtgtaagccttaagtggggagaagtagttatggaccttgggccttgagaaataagaatgatattgcctgttggacaaaaggaatgtagatttactttctgagtaaataaacatcctgaatgtctcgagatatctccttgtgacttccatctactagtagaggaggactgagacaccctactctttgtggcatacctcactacgcaggcctttgggatttgaaggagcatgactagaagtcctcttgggaagttggtaaagctaaaggtaaaattctcccttggtacaagttagatcaaacatggttcattttgtgcctgtgctgtatcaggtatctgaagtagattctttccaagcttaacctttcagacagtttttaatctataaatattagtgtttaaaagtcaaaaccctgtgaggtcattctaccatttctgttacctccctcctctcctcacgttaccacaaagctatatgtttctttttttgccaggtctaagatttttattagggtgagattagatttttcatattaggtggctggaaagtacagccagctgaaaactatcagccatttagactacatgcttcatttgaattgtgtttctggatgcaagtcaagtgtgacaactgagtttcataactttctctagcttgattcaaaaatgttttagggccaaa

SEQ ID NO: 115177 - DNA, 1035 bp, Homo sapiens
tttattcatgaaaggtgatatttcagataataatttgactttaggaaaccttgtaaataggtacaaagaaaacaaaagtacaacaccctcccctccaaatactttaaggataattgcatatgaaatgaccttttatataactgaaaagagctaggtctttattattcattttttggcatcccacttgtattagttttctattgctagtatattaccacaaactaagtagcttaaaacaacaccattttattactttgcagttctggtggtcagaagttcaaaatgggtctcaccaggatgaaactaagatgtcagccaggctgcattcctttagaggagattcccttttcttgccttttccagcttctaggggtcgcctgaattccttggctattggccccttttcattttcaaagccagcagtgattagtcagtctttcttacaatgccatctccctgattctgactcttctgacttcctcctttctgcttaaggacaattgtgattacattgagcctacctggattaattcagaataatatttgtaaggtcggctgattagtaaccttgatgccccctggccatgtaacgtaacagtcacaggttccaggggttaggatatggatatcttttggaggagccattattctgcctaccataatactgtatcacacaaatacatataatttttctgccttgattattctacaatatgagtggttgtttcttaattatacttgcctaagaaataagttaaataataaacttcttaaagggacaggagtcattattgagctaaagagagagctcattcatatgacttttaaaatgtcaaatttcgaatttatttgtgccatatactctagttggtacccatgtttttgtgctgtgagggaattccttcttgctttgaatttcctgccagttacatagcttgctctcttgatttttatccctatataattttaaatttctgacttgaggttttctaagaggccctagttactaaagttaggaggtcaaggagatggtcc

SEQ ID NO: 115178 - DNA, 1450 bp, Homo sapiens
agagggttttcctaactcttcatctaaataagatcacttacctcttagatttctttccctctcagctttttgaagtataacggtatacaatctggtaaacttttaagaggcaccctgttctttcccttcatagtgcttctcattgacagtatttaaacatgcatttctgactctgtttactattgactttccttctagactataacttcaatgagggctgtgggcatatcttccttgttcactataaatatctacctcttggcactggtgggcactcagtcaatatgggttgaatgaatgaagagtacaaactcagaaggttgatcctactggcacccttttcaagcttcgagaagtcctaattatggtatttgaggtgctgggattagttttttacccccttgcaactctacataaactatgtaactactagcattaaacagacatagactttgggccagatcaatataatctatttattactgccactgtttggtttgttttgtttttcctgtccagttctcttaatctggtatcattaatctagattagccaaagaaaaaatacagattctgggggtggaggagaaagggccaaaccagaagaagaataagggggaaggaggacaatttagtctgttccactagatactttttaagtattaaacagtgttcatgtctttcttctccattcaccagaaaattatgaatttgaggaaaaggacaaggaagttagagagttggtcggtcatcaggtaactttagttactgtttctggagcagtctttgttcttactgtgcctttgaccaggagttcctagaggacaggaacatggctttcacatatttagtcctccacagcagaatttaagttacttaacagttaattatggtggtgctcaaataagatttgttgaatgattaatcatgaacacgatatcaggtttcagtttctggttgggattctagcataatagtttaactaacaaagccctcagcttctgtaaggttatactctaaaggcaaagaactgctcttcggtaagtgtcagatgggccagccagtaaggagaggcaatgattctgggacgttgttattttgccaagggtggtccctaaacttttgttctgtttggaacaaactagctggaatacctttttattccctgatgggttttccctaacaggcagtgcaatgcagtggtttatattgttttgaaagcagattagactcgtgttcaaatcccagatcttgttagcagtgtcatcttgggcaagcgatctctgagcagatgcctttaccgtcatgggggcctgatgtaaagtgtatacctcccaggggagttatgaggattaaaaacaataatcctcccaaagtgcttggaaagtacttcatccaaagtgagcgctcttcatgccattgcagttgttgggatttttgaggagtgtgca

SEQ ID NO: 115179 - DNA, 2068 bp, Homo sapiens
agcttctcttacaactagatgtggctgtgttgctcggttctgactagtgatcttatgggggagggggtctgcttgaggttctgtggggaaagtttttgctttcctgtgaaaagggacagatgtggccttttcccttttctaccttccttttcccttttcctcttcttaaacagaaatgtgacatctggagctgatgtgcccttcttactaccttacaaaaaaggccagcttctttttaattaagtctcatttgtttaaaccagggattgacattttggttaaaccattggttggcaaattatgacccattggctgattgcctatttttgtaagtaaagtgttactgaaacacagccacgtattgactgtggctgccttcatgctatgacagagttgagtaattgtgacggagactatatggcctgcaggtcttaaatatttactctctggccctttaggtttggtgatgccgtttaaagcacctaacatgaattttctgttacttgtagccagacacattcctaatggaatcaaccaataaccaagatccttaaacaaattagtgacttggcatttcttcctactcaaattactcttttctggttaagtaggtgtgctccagataagcatattcctcattttggactttatctactcctctttatttccttcctgaactctctgattatcatattctttttaaaagtaagataagagtataaaagtatttcatttggccggtcacggtggctcgtgcctgtaatcccagcactttgggagactgaggcggtcggatcacctgaggtcaggagttcaagaccagcctgcccaacatggcaaaaccctgtctctactaaaaatacaaaaaattagccaggtatggtggcgggcacctgtattcccagctactcgcgaggctgaggcaggagaatcgcttgaacctgggaggcagaggttgccgtgagctgagattgcaccactgcactccagcctgggtgacaaaagtgaaactctgtctcaaaaaaaaaaaaaaaaaaaagtgtttcatttaagcgctgcctaaaactaatgtcagctctttgatattccaatcttttaactgcccaaggaattattttctaatgctcagataaaattgtcagggctttcactcggtgagtagggtctattcatggatcttaaaacctgaaccgatagaacagctctacagctccttgtattctgctcccaaccttcctgtcccctccaaacttgttgccctttgtggtctggtggaagcaggagaaaaccctgcaatagcccccactctgtgacattttggaatactttgtgcataccaaacaaaccactaacttgatttgggaagataaactgaaaatacatttctagttcagtaatagctataattggacagtctgtcttttgaacaataaaaataatcctagtttcgttttgtgtaaagatataacatcttatgtgtgactgcaaaaataagcaaaaactacttattaaaatatgtgtattttcattttgtttgctgacagtgtcaggtagtaattgtgctggttttgcagactctgtaatgtgttattgcagaaaaagcactagattgggttctatgagactgaattaaccatgagttgtttgtcaactgaattaacttctctgtgccacagttttgcatctcaaggaaaagagattgaactatgtggcatataaggtctctttcaattctaatatatttgtatttgtaaatattcttcagggtggctagaacctacttgaggattagtcaattcaaataatagcaacagcagcaacaactgcaacaaaacttcctttggaaaatcaacatactttagtcagaatggccctttaatttttaaggcccagatgcctcaaaggatttgtcatgtacagttatcatttgttgtcagaggactattctgggggatagaatgttatgggtgaatttgggttctgtgatggccatttgcaatgctttagcttgataatcaaatataatatatttcacaatacatttatcattttgttgaaataacgtaat

SEQ ID NO: 115180 - DNA, 1194 bp, Homo sapiens
gttttgtccatcttcaaatctttgaatattgggttaatggtactaagttaaaataattttctgcactaatttcttggagtgttagagctttcacttagtttgtggtatttttttggataaattatgacccatttattgaagatttttattatctctgctatatggatataaaactggaagacttctcaaaaaaatatgggaacatttttgctaaacaaaattttcctccagaacgttctctccctctcccttcctgcctctcttcttgtcttccttctttattcctgttttcctcaaactgctaaaagagttattcatttggattccttttgaaaagtctgtttcttaaggaacctcaatggtcctgactgtgttttgattaatttccagtgcattgttaaaagggcggttatttgagagagcatctcaaaagtaaatctacttcctgccaccttatcttttgcaatgcttatttggggttgtggcagtggagggggtgactcgagcatcctcagttagtcgtctagctagaacagttaccattttggacttgagaactattttaagtttgttgtaagaaacagtataatttttacaagacacatttatagtgttttaaaaaagttaactacccttcttacacgtgtgttttcttagaaattggaagggttgaatggaatgccagtgttttagcaatgtgtgaaaagttatttcaataaaatcctttttcttctttggtttaaaactttattctgcctgggaatcctccacatttgtgatttgggcattactatttttaggaggaaattttaactggatacattatgctatgtttgcttgatcagacaacatatttaaaggagatacaggatgttagtgtgtcaagggaccttagagacatctaatttaacaactttatttttccagttggagaaacagaggcatgggtaggttaagtgttttggctaaggtcataaaactgggctggcaggactgctattcagatttctcactctgcatctcccccccattaaatcactacttttaggtagctaacagtagattcactcttatttgttccccacccctaccaccaaacatgcttaatctttctcaatctccatttgactaattagttcacagctaagaaagcatattttctttgagcagattatgccaatagagaaaacagaa

SEQ ID NO: 115181 - DNA, 1018 bp, Homo sapiens
ctgctctggctggtgtctcccatttgcccttgttggaaagaaaaacacgtatgtgggtgactatggccagattttgccctttcatgttgttactctggagtaacgtgatctgctgccccaacgcggtgggaataaccttttgacaggcagtatgtccattctcagtggaaatgttttcccaagtctggccaggctgcctttgatcatacctccttccaatgtggggtcacagctactatgctatgcaagagtcacaggttcctgcaaggaaagtgagagacatgagggtttaaaataaataaataaatatgacccaaaccttcttaagttctcaatcattgaaatgaagtcagaagaatggaaatggccacaggaagtgttcaggacgtttcgtgttaaacatggtgtgcgtctttttgtgtaagtgggtcaagcaatgcatttcacacattttcgtgtaatgcggcttagtagtgagggtgcatctcatcctggacacgctgaggcatgtcggaaaatgtgttttcctattgtatgttggtgcaaatgacaaatggtgaagaggctgggagctgatgaaaatgctgagatggccacagaggacaatatgtagggaaaaaagctttgcggaggtgaaaagctccagcatttttcaaaggaagttctttcatctgtctgagaatgggcatttggggaaactcctgctaacccctttggtatgtcaggattgagaactgctgcctgttctagtacagggcagaatctttgcagaatttttactggaaagatatctcttatctactccagtggctgtagcaaagttatatcagttagtgaataaagtattctctattaaatgtgctggagctgaaggcttcttattaacctgcagcagcccctgcatctctgggtagtggtccttctatcaagcccccttccttccttctctccttttttccccccttccatctcttcctcctttccttcctttcttttttgctcttgccatacagtaatc

SEQ ID NO: 115182 - DNA, 1882 bp, Homo sapiens
cagtgaccccaaataaagtgattcctgggtggtaatatggatgctttatgattgacatacacataaatacatccaatcttgcttatgaaattttgtgatctgcttttgtcattagaggatatagtgaatctaattctgcatcggggatacgggatacagtgtattactgcattgaaggagatttgtctgtaggagcatgagcattctgtagcaataggcatagccgtcttctcggctggatgttagttactaggaagtattcattgtgtgggtcactatattttaacaactcaaaattttttaaaaaaaccatgctctttttgaatagaaagagagaaaatattaagtctttaaaagtcagaggtaaaaccgtggccaatctgaatgttacttctttctggttacttgaacagtgtctctctgaagtcttccttgggtcagacacaaataaatgggaggttgctcttggaaacactccctaggcactggtaaaagttgtcggtagatggcagtactgttctactacaacattttttaatccctgcaaatactgcctaacatttcattcccagtcttaattttgaaaatgcttgattagttacattaagcaatgtttgggtgattttttttcccccttttaaacttaacagaattatagccacagcctgaaagaaagccattactggtagacaacaaattcttagtcgtaatttagtccaacatagagaatgacataccgatttttaattatatttgtaaaatggctatataaatatataaaatggttaacaataatgattataatttctcacttaaactttgcatcagtgttttttcctctaattctaccgagggtaacatctgatcgttacggtgaatcatctgagatgtacatttctatgaacatgtttatttctttttacccctacaggtctacatgtatgccttgcaaatggaatacttttgaactctgctaagatatcttggcatatacaactaacttgtagatgaagaaagctaatatctctacagtttttatttggaaagtcagggaataacgctatccttagggaagggtggtttaccttcttatattagttttttgcaggtcccttaggaacatgcattacagaaaaataggctgctcttctgtttgtctttgtgattcagattataataattaactctctaggctaaatataactaacgatctgtgatcatcatttaaaatggaatctttcacagtaaatttgcaattggtatatttcctgaacttctcttattttaagatatttttagggaagatttcatataggatgggaggtgaaattggtagtgttttctccctttttaaaaaaaaaaaaaaagaaaagcattgtcttactaaaattccattggaaaagataaatatattttgttttacaaaatactttgggaggataaatcttccttttaaatcgaactgaattttaagaaaactgtggcttaactgtttatctcgttttcctatttctttacctaatttctatctagaattgtaaaatgattgattagagacttaatctggcttttgtttttaccttaaactatttaaaaaactaaaatgtaatgttaatgttttttgttctctattgtctttaaaggcattagcaggtagaatagaaagagataaaacatctgggtagtctaagtagatgggttctgtttcagttatcattttatgcttaacttgtacgggtctaaggtatatacattctcttaactactgtataaactagaaatttgcagcataagccacaacctgtgctagctgaagcacttagttacagcatgtaattcccaacagatttttctgttatatttttttactcaccctccatgg

SEQ ID NO: 115183 - DNA, 1050 bp, Homo sapiens
gcaaacaaaacagaggtgggggaggggagtggagataaataaatcacgttcatatgctaggtcaatttttaagccaattttgatctttatggtaaagtattttccacatctgccaaccacaagtgtctacatatggtaacaggtaactttctttagtactatataatctgtgagacataaataactaggcattgtaattgtatggcagttaccctacagttgaaagagttacatgattattagtaacccataaaataaggtggtagtgttttttttaaataatctgttataggaatttcttgtttccatacttttcttaaagactgtaaataatcttgttatgctctgacattcagcaagtcattgcaaagaaatatgtttattccttcaagataccactagattatccatttcaagaaatgaatattaaatatggaaggacacattttgtccttttcattttagttctagattttgccatatggttgcccatggcttttaaagaacagttagtatcaggaatgaactttttagccacaacatttctgtgatttttggaagtgtgatttttggaaattcttaaaaaccacattttgaaatattggtagttactgttgtcattctgtttcttttctttttccccctttctttctccgtctctcttttttgtgaccagtgcctcttctcacagataaaccagtatgatacagactttttgtgtttaaaaacaaaacctagacttacaaaaaaagttcccaaataacttgtatttaattagtatgtaatttatttaattagttccctgtctctttctttgcagtgattgtcttgatttctagttctagttttaaaacaaggaaagttttaggcctttcttgattcaactcatgttgtccatagcacacctcactgtccctaccaaagaaaggcattgaatttgagatttgatgcattttagtcttttttttcttccaccctgatcttctatatatggctgctttgcaaaacagttttgtgcaagcagacatgacttaactccattccctacat

SEQ ID NO: 115184 - DNA, 1071 bp, Homo sapiens
atatttccactccagcttggctcatttttactttccatcctctagtatttaaaatttgcttttagaatttattttgtttatgcttatttggcacaggaagagtatttcccaagacgcttaaatttctcttgccttttcattgttcaaaaatgttccaaacgaaaaactgtgtatgtgtgcgcacacactgtgcatgcacacatgtgcatgagggttttgtgtgtgtgtgtgtgtgtgtgtgtgtgtgtgtgtgtgtgtgtgtgcatgtttcttgccaaataacctaaaaattacttctctggcccccatgacttttttttggtcctgttgtaagcttgacagagattttatttatccttattaaatgtggcttgtttatatctagttatttgtgtgaagtttatgcttaagaagagtgggattcgttttggatatattatctcagagccaactggactcttattagcgcttgtttgaaaatggatgtgtgtgtacatgtacagatgtatgtatgaagtgtgtgtgtgtgtatacacaccccatcttcttgagtggtttctcaaattgtaggatttgaaagaaataaaggaaagaaaggaaaaagaaaaatcccttaagtaagaggacaaaggaatgctctcataactgggctggaattggagtttgtgtttcatttaaaatgacaaatcagcaaatccctcttcaactatgttacatcaaggtgaattttcccttcattctgggctttggacacaatttgcctggacatcttcccaggaaagcccctgtgtaaaacccctattaaagcaaagtcatcataaaatcatttcatttccataatgcttgtcttctgacctgtgtgaaatgtaccacaactcttgaggtacgtattttgagtcctaacatacaagaaagttgttagttgttcttaactagcaagaaaattaaaagtgaacacaaaattctcgtatatgcccaaactgtgatacagattgaagataaaaggtggagattctttccttccatatggtgaagcaatttggggaaagagaaattagactttcggcagaa

SEQ ID NO: 115185 - DNA, 1049 bp, Homo sapiens
gagggaatttaagaattcacctatgtaactattagtgggagaggagtttgaatcctgtttgactccagtgcctttattttcccattagattcacacaggacttgggttgaaatcacctttgtgtttctcagttcccacctgagtgcttgtgtacattaactgcacatatttgagaagtcaatttgtgatactgcctgttcctatggcttcagtctttttgctttattttttttaaaacattggcttttaaaagaccacaaaaagtagtatgtgctgttgataaaaattcaaacaataaaagtttgttataaagtaaaaaaatgaatattctctcccttcccttcccaccactcccactctcaaggggtggtgacaactatcatttttacactgatgatgtccaggttttcagtttcagtccctagatccctcttgagtttcacaatccagtatctgaatgttgagcccagatgctgatttatagttatttatatttttccgtataattttctggactcccatagttgagtcattgaaagtctgttggatagtggatgtgaaatcaattaatcagtcaactgattaatctctaattccgcctattgcacgtgtctgtcctgctggcctcgtatacttggattcttcaagattaaatccttctccttcttccctccatcagttccatttcctcatttcctgtgccttatctcagttgtgatgccatctgccttgtcatccttgtctcatcccccttcttcacattgccatgcagtcagatggtatctcctttcagttgcgtgcagggtcaccacaatgcgttcccactgccgcctttggagttcagcccacatatcctctggcttggacggttaccccggcctccttgtgattgccttcgctcctcctcactccactctgctgagtcttaactttctaaaacctaactttcattgtgtccctgcgttgtatggccacaagcacacaacatcctaatatgatgtaagctctggcatgtctgtttgtggatgatgccctgaatttttattctc

SEQ ID NO: 115186 - DNA, 1050 bp, Homo sapiens
aatcggccagagccagttgagaccatgtcccagagggagcccctatggtgtggagcaatgaccacaattaaaatgtgtttcagtttccaagctcttagcttgagatatgctaacctagactccttcttccgaataacaataatcttaagattataatttaattggaagaagctaggacaacaacaggtgcacatagatacttagcacaataattgctcataatttggcaggaggagcctgggttagtgtatctcaagctaagatcttggtgacttgtctctaaaactgtttgttagtaatgttttccttttttaaactctattttatttcattttataccagatcttcgtaatactccactacagcaaattctgatttgtgtgcttgctttcatatctctcgtgtctgattctgatgcaggtacccgaaggatttctacagtgtgtccttcaccccaccagccaccagggggcaggcacattcagtcaatactttgactattaccatctcaaggtgcatgttgtaactgctagagaagaaaacaaaaattaaaaagaaagacaaactttgagatcttattataacttgatgtcgttagctgacccaacaggcttttgctactgtccaagcattgttttctaggaaggctatagttggatgatctagtgtaaaggaaatgtcaccatggttgaagtcttgccaatagctcagagaatgtttaatgaattgagacgactcagtcaagcagtgagtagtaagaaaatctgtgtgactagtgacaaccaaagtggaaagaggggcccttgtgttcctagagtgtcccagatgccccccagaaacatggattagaataaaccccagaaatctctcacagacaccttaacatgcttctcccgacaggaaacatgttattttcagggatgctatgtttggtgcttttaaagtaatactatgatatccttttaaaaatgctcagcttctttaaaggagattgaggaataaggaaaacagatctcttaagtaaagaattcttagaatccttaacatgag

SEQ ID NO: 115187 - DNA, 1061 bp, Homo sapiens
gtatcattatatagtattaagcatcattaataattcagaagtttggagactttgttaaaatgactgtttatttattgtcagattactgatgggatgtgagtaatttcagaactcatttagtaccatatctaactagtaccaattgagtactttttatctgaaatgcgtgggatcagaagtgttttggcttttggatttttgcagatactttaaccgtttgagcatccccaattcaaaaatctgaaatcccaaaaccttcaatgaacactttctttgagtgtcatgttgacgctcacaaaattttggattttggagcatttcagatttcggagctttgtggatttcggagctttgtggatttcggattagggatcctcaacttgtattttgagaggatttcaaatcatgagaagggtccttattgcgaaggccagtctttcacatgttcacccagttttttgagtgcctggcacaatgctaggcattgaggatttgatggtgaaccagaaacttcctagtctagatggcagggagtgggaatggtgttggtaaactcctaaacgaacacttgcaatacagtatgttaggcaacacaatcttttaggtgttgtgaaaaggacataagtaggtttctgtgcaagcgtggatcaacgatacttgatgtaccttacagtgggacttttgatcctttttaattctgcaagtgtccccactctacctgcatgtatactcagacatgtgcttgtggaaaatattttttaatttgaagtaaattaaaattttgatgatttaatgacaccttttgagccaactgatgacttgaatattacaaagcaaaaaaaaaaaaattattggcgatgtgttttttttttttttatttttgagatggagtctcgctctgtcgcccaggctagagtgcagtggcgcgatctcggctcactgcaagctccgcctcccgggttcatgccattctcctgcctcagcctcccgagtagctgggactacaggtgcccgccaccacacccggctaattttttgtatttttagtagagatggggttt

SEQ ID NO: 115188 - DNA, 1031 bp, Homo sapiens
ctcacccttacatcttggacaaggtggcaacagtcactgcaaaattttgtgtgaaatctctagatcttaaatgtctgtgacaaatgttaagaaattgtgtgtcaagcaaaatactttagaggccaatgggccacatgtttttgatatcaagagattacacacaaaatttgttttctagcttcttttgaaaaatcagaattgggaagatgtattcatgagtgactgctgccccctttggttgggactcgttccttcaggttcattacatggtcatcaataaccatttccttggtccctgcttttgtcttgtctggactctaagcatttgaatttttagtattataagaaaacttaatactttactatcagtcaccacatacatgtgtttctatctgtactacgacttattaaaagccttttatcaatagcctccattttggagggggggatttcaactggtgcctagactagcaaggatttgtttataacacagtctgtgcttatgaggagaatacaaagggcggataatttcagcttgtcagcttgaatatgttatatttatacaaataacaggcttttgagttttcctagattacatctatttacagaaggctgtaatcaaggtttagcagcatattttcaggaattctttggtgcatattttctcaaaagatactaccaggacagtttcatgacactaataatagttttatagaaatgatttgtcatgttgtttttaatggcctgccacctccttttaaaatctttttgaatctgtctattcctaagcaggtaataatattctattattgttgatacttggagatgtaatcttcaaataattaaatgattcaaaaattgttgtagcaatgtttacaggaggatgtttttcatactgggacaggcaatcacatttttatgttggtaagattgtctacatctagggattggtattcagatcttgatttatattctctatattgaaaaggtatgagcaaagagattttttttcctttgtgcattttgcaatt

SEQ ID NO: 115189 - DNA, 1061 bp, Homo sapiens
tagattttctttttcgtaattcctgctaagattcagtggttactaattacaaatccataattactaatttcttgtgattattataaaacattcttaaagatttctttgagagattattttaaagaagtaggataaaggaatagaacattatcatgaagttaaatttataaagatgtcaggagggaagattgaagttaatgcaggcagccccaaacataattatacccagacagaagaatattcctctcccgctgaattgattctggttacataaagaaaatttacttgggatcattattagagtattttcttcattttagaaatagcacacattgaaaattaatattgatattaatattaaaattatacttttaattttaaaattttcaaatttaaaaatgctgaaaacaccagtagtgctattaatttttaataaatgctgatgattaaccttctgatgttttttttttttatggctacctttttctttgtttacgtaatgtgtggaattagggaaatcattaatggtgataatgatggggagggacagtgctggagagaggcagatagtgtccaccttggactcaatttccagagcctggtagaatggcctttctatcaaattgcatttctgatttgaaagcccattactttatatttataacaggaagttatggtattgctgccagtctagatgattctttagcttgacctttattgtgtttgattttgtgatttcacctttttttcccgttttagaaaaacttttgggtgtatacaggagagaattccttcccgtgttttagggagtggtattaaaatacattcattttgttcagtagttctgttccatacttcctacagataaagaccctttctgtgtgattgtgagacttttgaggttgagcgtggtttctctaatggtatttgacatgaaaaacttcataaaattcatgaagctacttaatacacaggtctgtgaattacattagtttgtcagttatttttacacactcatttactaatatgaatagtacaggtagtgggtgtttctcttttgt

SEQ ID NO: 115190 - DNA, 1034 bp, Homo sapiens
ccgtctctggctgggtgcctgggatggtggtgggcatgaggtgctgtgaagtgggatagagaatttgggaggaggaacatgtttgggggaggttagttttggacatgttgagtttgaggcatccatgggatgtccatgtggctttgtacaacacatagtttctgtgagagtctgaagcttgggggataggtcggggctacagagcaagagctttgagagtgtcttctgaaatgtagggagtgggcaagttgtcggagggatcgtgtagatgagaatagcttcatgttagtgaaaagaaaacccagaataagggcgcatagaggagtttgtagacccttatttgtgaagtttaccttaagggaaatattttaatttgacagagaaaaagaacaggaggaagaagggaaggcagttttgtttcaaaaaaaaaaaaagtgagtgaagatctttatagactttctaggacacacctaatatttctgggatattgttatgatttaagggattaaggctcagaaatctatcaatgacacttcccctgggtggatatacaatgaagaactgacaaaagggtgcagtgttgataactctttgaactattttaattaccctgtgaattggatacaatattatcagaaaggggcttaccatagaattatgatggacttcagaagtccacatcctaggccaggcacagtggctcgtgcccgtaatctcagcactttggaaggccgaggtgggtggatcacttgaggtcaggagttcaagaccagcttggccaacatggtgaaccctcggctctactataaatacaaaaattagctgggcatggtggcagatgtctgtaatcccagctacttgggaggctgaggcaggagaatcacgtgaactcaagaggcggaggttgcagtgagccaagatcgcgccagtgcactctagcctggacagcagagcaaaactccatctcaaaaaaaaaagaagtccccatcctgatttcacagagcaagagtgcttaggacccagggagcattttt

SEQ ID NO: 115191 - DNA, 1043 bp, Homo sapiens
tggggggagatacaatttagttcatagcaggttactagaagccctccatttttgatggtgtattaagaatctggtctttaccatcagctttcttccctttattgttcttaatttttttttaatcaaatatgccctcatgtttcagagacccacttccaaagctaggaatttttgtcttcgtgctgtaaaaaagctccatcatctttttctccttcacattcaccagctctccccattcatggaagttcctctgctgttgttaggtttttattatttcattttattttatttatttttttctgtgatttgaggttttcatttttataactgcccaacctgacaagcatttgtccataaattagtatgttatattgagtaaggatgttctatacacatcaaaaatacgttgctaatgtgatatttgtttctctcatagactcacctgttccatttttcagattttgaaggggaatttttagctgaatttaaaaaatatgaaaggactcttaatgttatctcacaatgtgcctttgtttctaaacgtgttcgggttttttttttttttttctcttcctttcctcccattctttgtgttttggagtttgaaaacagggctttgcagaggaaatgggacagtgacatttgttttttgttttgaagttgttgagtttagcagagtatgcgttcatagggtgtgaattgcaggatgtagttctggggtcctccctaccagccgaccccacatcaaggttattctgggaagccttatccaaagccgactataaaatatggggctgaacattgtcaaaaggctaaacaggaaacagacataaataactattcaatcttaattcagtcctagctactttctcacacatattttataatgtgttttaaaaaacaatttccttaaaaaaaaaaaacaaaactttaactccttaatttctaggttacttttaataggaaattattcatcttcatgactatccagtggcatcatccctttggcagagggcaaattacattcaataatatccaagata

SEQ ID NO: 115192 - DNA, 1057 bp, Homo sapiens
tgctcccactcctgccatgtgacaggcctgctccctgctagccttctgccatgattgtaagcttcctgagacctcaccagaaacagatgccagtgccatgcttcctgtacagcctgcagaactgtgagccaattaaacctcttttcttataaattacccaaactcagatatttctttatagcaatgcaaaaatggtctgacacaccctatgaccagtcattgaatatattctccacaggacccttgagatgcagtcccaggcacagccactctaactcggtttttctcctggcaggctgccaattgctgtgtgacagaaactgctatagccctgttggctggctttgatactgattaattacttacaagctctcctggctcctctgtcgtgccttaggaattctgtgtattcctcagacaactagggattgatttccttcttttctcctacagctgttaaagttttttttttttttttttttgctcttaaccacaaccacacttctcctttcttactctcagatatgacctcatgaactccttcacttagaaactagagatgggaattcttgcacttttactctccttcaagtgtttctgtatattgttacctatctctctccttccttattcccaaggttaattggttacctctactcttcccgttcccttctgaacttttttctctgttatcttcacttcctcttatatcttcttctgtctttccttcttcgttgactcaagtatcttctattctgaaaaataccttctctgctctatttccctgccattgcacatttgactcttccttctctttactgatggactttctaaaagagatgtacatagaaagttctacctccactttttttagccaactgcaactgggtcattagttggactctactacctcagctcaactaattttatatgcatccacttcttttcagcccgcatcctgtctgccaagttatgatactactgatcatttttcctttggcttccataatacgctatcctaatttttcttctaatttttgggttgctcttcttctgt

SEQ ID NO: 115193 - DNA, 1088 bp, Homo sapiens
ctttccttaatttaattctgcttgtggaaaaacatactcaacaaacaagagtgggaaaattaaatgaaaatacctagatgtttgtcaaaagcctacagacgtatctctttctttgcactaaagttcaaagcatgcttaagagttgtttggccaccttagaattttgcagtgtgtgttttatcataaaaagtgtgagccagtaattaaagctttacatcattgtttacttatcttcttccttcttacctgaattaggggaggggctttcaagtgaatcactttctaagcctctgtgcaaattagcagtgttgtgtttccttcagcttttccaagccatgcttaataattaggaagataggctgattcaatttaatatagcatctgattgaaagcatttgaagttagattactaaatatagtaaaactatatttagttaaataaagttagcctgtcactgttaggaggtggaccttgctttttataacttctttcagagagtgaattgtgtttcaggtagactaaaatggtgaccctagtgaccttcactgtgcctacttgtaagtctagatctctccagagctgggttgttctgggatcagaagatgtgggatttccagttagtttcacagccaacatggttctccctccaggctgcccccaggacctgtggactctgctccatcttcaatggccctttgtcaccagctcttggtgttttttttggtcccgtccctactacccatgtccctgtacttctccctctctccaccatcatgtctctcatcaagaccaccaaaatcacagaccttcgtctcttagcgaccttcatttctactcctcagaacttactgaaccttgttcttcccacttcagagactgcacaatcaggtattttcttctccaactttaactaaacttgcttctcatcatcatgctgattttgaaaatctgatctctttcctgttctccaattctgtcagcctcacccaaacctgctgcttttatttccctgcttagccagaagccctgtgatatggtttgggtgtttgtccccccaagtctcatgttgaagtgtggttcctcgtgt

SEQ ID NO: 115194 - DNA, 1047 bp, Homo sapiens
caggcgtgatagaaaaacattcagatcacaacgggactggagtgaggatttgaaagcacagcacggagctgtgaaagactggaaaccaatttagagttgctagtgtccaaagcagaaaggagagcacagttgctctaatgcaaaaagcaaccttcactaatatgatttgcaaatgataagttcctattaaactttaggtaaacaattttgtgataacatttatcccctgcccctctcccctgttgattttttctggatgaggaaagcaaggctgtgccagccacgtaactcgtgtaaggacacacaacagtgcttatgtctccatcttcaggtcaaaccactttatgaagggcctactacatgccaggcaccaggctaggtgctagggaattgaaaggacccttttcataaaaccatcatgagggtctttgtgatttagagctcttctactaaaagaaactatgcatttactcctgtcaacttctttatgatttatgtattaagattagtcataaaagaaaatacagactacagactgttgctctggttggtcctcaaattcatttagtggtgacagagcccctagaagttttagcattcttcctgtgacacctcaaaatgttaaaaaataagcttcgaatagctaatgtataattttgtaataagtcagactccttatataatagaggcttgtgtagacaagctatatagcaagtacccaaggttacaaaatgtgagtgcatcatgaaattgacaacaatcttcttaactattcctccgtgttagttgacaaaggatcttcattatctgattttgggtagtagaatgactctgttcagggcacagagaatcagtgatccacggaaacagagtttgaagatccttattttaatctgcaaaagattgtcttaattttgaaagaaaatttatgcagaatagagtccagtttttctggctctatttcatcacccccaagctcctatcttgcaatgctcccatgtcttaagaaacttgttagtgatcttcaaagattgccaaaatttgtgg

SEQ ID NO: 115195 - DNA, 1070 bp, Homo sapiens
gctcatactgttgaagcctattcagagaagcatggagtttactcattatccaggctatattccaagttctgagattgggatacttgggggattggtggtgtcaattaatgatcgagtataggaatgtaagtgctgatatgactttggacacatttgtcacttgtcctaatctgcttctgtaaaacaagagggctggactgtagcgtggaagatgtctgtgattctgtgttcagaagaatgccccttgagtcattgtcagagagtttcatcctgtttagagcactctgccctcttgagataggaaaaatatgcattatataaagaattttttcaaatcagggttgaaaccagtaggacttttatttctttgttaagtggtaaatcagcctaactagaaccctgtggtctcttgggatttatttctacttggagcattgtggtctttgagttgggttaatatgaatggagcttctaggacttgttcaactcttgaattagttcctgaggtaccaaaagtgacagaccagactctgaacagcatagacatatcaaaagaaaacgatttggaattatggaattcattttaatgaatctgtaatgtcaaatagagtggtgacttagtacctatgtaattgttatgataatggttgaaggaatcacactttcatcccatctaccctggttcttccttttctgctagtacagagaagctggtttgcatttaagctcagagtggctctgagtaggagtaggacaaggaaagaaagaagagtgcagagtgcaggatgtgcattccagagtggcaccattaaagatgcgcatgctgtatacctcacgctaggatggccaagggaacattaacgtgctttaataaatgtgctttcctctgagactatgggcttagacaatggtttgcatcactcttgaattctaacacattcagggtttatttgggggaaattatttcaggttgacgaatgaattctagcatttcctgcattcctgtttgtctgtattcacagaatcagttgtaccactaaaagtagtggaaattctaagtgttttgggta

SEQ ID NO: 115196 - DNA, 1023 bp, Homo sapiens
aattaaagtgcctgttcattccactgaatttcattatctggtttcctgtctaaacctttaatacgaaagaaagacaaatggaaattttttgtggggaaaaaataagtgaatttagaaattaaataaaacttttaaaagtttggaacatgaaaattatttattttaatgagatcatatgaggagtacaagaaggggctctcagctctgcttggcaaaaggatcagtatactttgccattattttacttaatagagataggagacaataattattagctacaagaagaagaaataacaaaactagcaacctctagacataaaatatgaagtagaaatatagttattaacaggaatgaaaataggtaactggagtttgatccattttttagggaagaggcagtttttcagtaataggttctttgagagtctcaaaatcacttccataaaggcagacagttttgtggatcacaaaggcacgttctgattcaggccctgctgtttaattgaatgacctggggtaaaatattttataatctgggccttctcttctgaaaaacattgagtttgaatgaaattctcactattctgctcccaattctgcttcttaagagtccagtcttggctataaagcatcattgaaaccagaggtttacatggtggcttggatcttggggatgaaaatgttgttgagagacaggaatatatattttaatctaggattgtgtgtgggagggtgatgttttatatacagaaaggttaggaaaatagacttcttaaatgagagaggttgagataccagatccttccgagaaatggcccttaacttacatgtgagtatttatttcaaatgttcatatttttccattgatttaatgatttttagaaaaggtcttatattgaaaacatacattatcccagataaacttagtctattaactaaataattggatgattaatttaacttagcacattatcctctggaacacattaatgtgaaacttcaatttgatgagaaccaaggtta

SEQ ID NO: 115197 - DNA, 1022 bp, Homo sapiens
aagtggtcagaatatggatgtattttggagactgaatcaatagaattttctcatggagtggatgtgcggaagaatgaagagaggagtcaaggattcatatgggggttttttagggaggagaaaggatatgattttcatcaagtgaaatggaggatgtattgagcagctttcagagggaagacctaaaatcctcaggaggcttgtgcagtaatctaggcaaaagatgattaggtccctaatggtacagggaatgaaaaggtggagacagagtcaagaaactttgtagatattcagcaatcaggtattctgtgatatactgaaggagttggtagaggtaaaaatggagaggttggagtttaacatgacaacaatttggtggtcagaagaaatgagtggatggtaatgcttttaactgagacaggggacacatagaaggagtaatttggggagcaaagaagatgatcttgcaactagatgtgtgagttggaggtgccatgttggaaatacatttttgcagcctaaaagcagtattagaaatgggggttgtatggatggggttgctctctgcttggttcactgctctatccctgttgctcagaatattgcctcactcaaagtaagcattcaatgatcatttctcagatggatggatgcaattttggaagtcatccaaatggagagggttgctgttttacccttttggcctcattggttcattagatggcttgctccagtttcctgtttcctttcttcgtggaaccatagggttatagacaataatgggctgggaagcatacatacatgcatcttccttattattttacactctgtgattaaaatgctccctttccccttcacccttatctttttaaattatgtgattcccttttgtttttctctctgcactgtaggggtagaaaaatctttaaacaaaagttgcttcattgtgtcttacttttatctaatctttttttatttgttaacagtgacagtggttaactgggagattcgaactgccattt

SEQ ID NO: 115198 - DNA, 1034 bp, Homo sapiens
ggaacaaaattatgtttcaaactgtaaggttggacatgctggctcctgcttgtaatctcagaactttgggaagccaaggcaggaggatcgctttaaggccaggagtttgagaccagcctggggaacataacaaaacctagtcttcaaaaaaaaaaaaaaaaaaaaaaaaaaagccaggagtggtggcacacacctataggcctagctattcaggaagctgagacagaaggatctcttgagcccaggagtttgaggctgcaccaagttatgattacaccactgcattccagccggagcaacagagaaaggccctgtgtcttaaaaaaaccaatttaaataaataaataaataaataaataaataaataaataaatgttaagcacagccaatagattaatattacataggcagaggagaatctgcttgaccctggtgatgatttggtctttgctttgtagaacataaacttatttaaacagtgacttaatgtattatataaggtgaatctgaatgagaggttttatgcttattgtatactgtggaggaccagtctgcatcctctctattcttttgggtttagctaatgttctggcacgtagtaagtacttcctggctctctgttgactaagttagcatattagagttctccagagagaataaaaaggatatatatatggtcagtagattccatatccatgaattcaactaaccaccattgaaaatatttgaaaacaaatttgcattcgtacccaacatgtatagatatttttccttgtcattccctaaacagtatttcccaaacaatgtaactatttacatagcatttgtattgtatcagatactctaagttatctagagatgatttaaagtatgtaggaggatgtgcataggttatatgcaaatacgataccattttatatctagatttgagaatctgtggattttgatacctgaaggaggtcctggaaccaattccccttggatactgagggacaactgtacaactgtttagatctataagaggggatttatta

SEQ ID NO: 115199 - DNA, 1009 bp, Homo sapiens
cctgggctcctttttctcagtgactggcaccacagcccgttcagctgccaagccaggaactagactcaatctacagcactcccctgcctcacgatcctagcagtcctcaagtttgatctcttctaccctagttgcctcacctctctgtcattacctggattccaatgccagcattccttgcttagaaagacctaacggcctcctttgaactctagagcctttcatcagccaaagtgcatctattgcactatcttagaattgcctggtcatttttctgtaactcacatctcactgtaagcacagtgaggacgtgacgatgttagtctctctgttcccctcccccagcatctggtggctcttcaccatcatcatggtcatgatcaccactgacatttaccgagcacttattaagtgttgagcagtgtctgtgctaaggcttttatagatgaactcattgaactcggtataatcttttgaagaaggtactgtaatattactatcctcattttactgagaggagaccaggacatggcatggttagatgtcttttccatctggtagagataggattttgaggcagaatttgatacattcttagccaccacacactgccgttatccagacagtaggtattcaatatgaatttattgaatttaatctggaataatttctcaacttttttttgtcttttagtccttgacatttttgaagaggccaggccagttattttgcagaatttctttcagtttagatttgtctaattgtttcttcgtgattaggttaagattaaacattttggacaggaatattccataggtgacactgtatccttctcagtgcatctcagcaggagcacagggtgccagtttatcccatcattggtgttgcttttttaagttcataattaacctaaatttcagaggctggtaatttctggctttaccccaaattcatggactgtaccctatttagagcctactatatctcttatttttcactacacaatcta

SEQ ID NO: 115200 - DNA, 1865 bp, Homo sapiens
acgtggtttcaccatgttagctaggatggtctcaatctcctgacctcgtgatccgcccgcctcggcctcccaaagtgctgggattacaggcatgagccaccatgcccggcctgcagaaattattgaacgcgttttactagcagagaaagcattcatccttcaaaacaatagcagtaaaaatggcattcaatttcatcttgagatgaagagtcatttgctagtgggtagaaatcatccttttatctagttacaagatttgcttgtacctacttatattcaatttctgtgacttctttttcttttttgcggggggagggaggcagggagagctacctttgtgattacagtaaaaaggcaaaacaattgtatgttactattggtattactactgataatattagtaacaatattattaataagattatatattattaaaattgcttattttcatttagctctttaggtctggacaaatcctaccctaattcaattgggttattacaatatacagtgctacatgtaaggacactgtatttcctatggatgctgtaacaaattatcacaaactttgtggcttaaaacaacatagattctcttgtaattctggaggtcagaagcctgaagtgggtttcactggcctaaaatcaaggtgttggcagagctgtgttctttctggacgttctgggtaggaatccattttttgcccctttgtgcttctagcagctatctgtattcctcagctcatggccccttctggcaatggcatacttctagcttttgcttccattatcacatctcctctatgactctgacactcatgtctccctctttataaggacgcttgtgatgaagttgggcctacatgaataatccagaagaatctccccatctcatgatccttaatcatatctgcaaagttccttttgccatgtaagataacatattcacagtttcctgggattaggaaatgaacgtgttgggttgtgatggtaattgactctatgggagacattattctgcctaccataagcaccttagtacgatcttaggccttagtacaatctgtcctcttctagagaaaaaagaaaaccagtgtagcctagtcctaatgctgggtgtagaatgttgtcatcatatataaaaccaaggttaaaaatttgtcagatagatcggaagtcttgcactctgcaaatactggttctagcaacaaattaaagagcagatttaatatatgaccatttggagaagagtggtattaactgtacctgtttattatgccccttggagattccaacataagcatttattgtcaactgtgtgggatgctgagatgtctgcagtcattataaaggaatgcaaaactctaaaacaaagtgagacacaccttaattacataaattctgcataatcacacattttaatgatttgagtggaaatgaattaaggtgttggcttggctgtttttataaagaccaaaataatagtagcttaagcagaataagtttctcatataaaaatccaagctggccaggcatgatggtgtgtgccagtagtctcagctactcaggaggctgagcccaggagttcaagtccagcctgggcaacatagcaagaatctgtctctctttgggaggccgaggtgggcggatcacgaggtcaggagatcgagaccatcctggctaacatggtgaaaccccatctctacaaaaatacaaaaaaaaaaaaaaaattagccaggcgtggtggcgggtgcctgtagtcccagctactcgggaggctgaggcaggagaatagcgtgaaccggggaggcagagcttgcagtaagccgagattgcacccctgcactccagtctgggtgacagagt

SEQ ID NO: 115201 - DNA, 1602 bp, Homo sapiens
ttgggcgctggctcgcagcccagtagaaacacaatttctgcacgaatgccatggtagacctgaagctgtggcagcaagaggccggcagttagttgtgcttctccagaaagggagctctgactggcatatttccatggctgctgcagtaagccagcacaataaggtatttccatctagaacttgggaatattggaactgctgatatcagaaattgtatgtattcctctttgaatacctagcactgagcctgggcctgagacctaacaggtgttcagtctctgtccctgcttatttaatgaagaaaggctggtcatggattcattccaaggcagataaaaatcggccctaaaaggagagagtgtgatgatcttaattgtgtcccacacaaaactcatgtgttgaagccctgactccgaatgtgatgatgtttggggatggggcctttgggagataattaggtttagatgaggtcatgagggtggggccctcctgatgggattagcactcttataagaagagacaccgaagggcttgctttctctctctctctgtctgccatgtgaggacataagaaggtggacatctttaagccaggaagagatccctcaacagaaactgaccatgccggcaccctgatctgggacttccaggctctagacctgtgagaaaataaatttctgttgtttaagccacccagtctaaggtattttgttttggcagattaacacagggaggagaaaaaaaaaattcttgtaaattgcagataacataaaccagaaaaaaaaaaacaaaaacaaactcttattagctcctgttgcaaagaaatgctgagttatgagtaaaacaaaaagtagaagaggaaacctaaaaagattatgggttagcttttgggatgagaaatagtgttagattgttgagctgagttgttttttttggtgcttttaatgttactgccaaatagcagtgagttaaaatacttagaagttaaggagcaaaaagccttatattttacatattaggaatccatatctgaagtgagcaagaccaaattggaacatatataggacagaaagcttcctaggttaagtgtgtgatatacaggtaaatgtatgcctccattaaaaggtttaataaagatcattactcagagacaacaaagggtatccagtgcatgccgtccacctttcccactgaggtttggagtagacagacctttctccagaccctgaaaagcagtgatgcttatttaaagggccttaactcaggaagatgtggcaggaaacttaaggtataggtagaaaaacttagacattatcagtggtggagatatgaaggcttccaaagcccagaacaaattgagacagagggaagcagataaaaaacaaacaaacaaacaaaacaatctttaaaaccaagcatctggtccaaggagataactccacttcctatgagtacagcacaggagatagtgttattctaatgtaatgtagggatgtatcacaaagaagtaatttagtttctgaaacaaaaggagtcctgttatatggatctgttttggatcttaagcaacattcatttggttctgttcaggaggaaggaggg

SEQ ID NO: 115202 - DNA, 1065 bp, Homo sapiens
gaggtcaggagtttgagaccagcctggccaatgtggtgaaaccctgtctctaccaaaaatacaagaattagctgggcgtggtggcgggcgcctgtaatcccagctacttgggaggctgaggcaggagaatcgcttgaacccaggaagtggaggttgcagtgagccgagatcgtaccactgcactccagcttgggtgacaagagcgaaactcggtctcaaaaacaaaaaaaagttatagtaatattctgggttttaacttgaatggtgagcgcacagtgtttttttatgttattctttaaactacatatttactttatatactttttgtatgtaaatatttcacaatacaacaacaacaaaaatgaatattttaagatgtttgaggttttttttttttttccaccagcctgtgtcagttgacccaaatgccttgagctcatttcttaacttgggattttggagatgtatctatgtagatgagcatgaaggacttttctaatcagattaagtgataaaatgtcttgacattttccctttagaggcctagggtggggatttggagactctagatggaaatatagtgatacttacttttaaagaccaaattattttctaagtaaggacttaaaaatatttacatgaagtaatcttgtttactcatctgcttcgtacagaagaacatatgtatgtgtgtacaaaatgcttaaggaatttgtttaaaatgaatgatgtaaaaattctgaataaaagataggagtgcagcttgtaagttccttgagggcagggagtctatcttgtgtttgtctttatagcctttacaataccttgcacaacgtctggtacttggcaaatgctccatagctgtatgcccaattatattaagttatagtgagaataattttctgttttgcctttatttgaatgtaagaaaaagcagattttctttatttcttctatcaccttttgctttagctgtctcagatgagtatttgtccccggttagatgaacaggttacttgaaagctaaacatgttttttagttattttaagtgaagttaattcctg

SEQ ID NO: 115203 - DNA, 2277 bp, Homo sapiens
aacaaacgttgctctgtactggttaggattaggttaggctgtgagagacacacaacaatttttaaacaagttagagggctgggtgtgatggctcatgcctataatcccagcattttgggaggccgagggaggtggattacttgagctcaggagttcgagaccagcctgggaaacatggcaaaaccctgtctctacaaagaaattaaaatatttgctgggcatggtggcatgctcctgtaatcccagctacttgggaggctcaggtgggaggatcacttgagcccaggatattgaggatacagtaattccagattgcaccactgtactccagcctgggcaaccaagtgagaccctgtctcagaaaacaaaaagttacaggttgatttctatttcatgtacaaagtctggaagaggagggaatggcaactctgctgtcatttgcatctttgggttctcttatctgtatggtctacttcatgtgtccactgttctcattgtgccgtcacaacccaagattgtcactggagctacattaagtctccgttacagcctggaaaagaagtaggaaaggcagaagagcaaaaaagggctcttctcagagtcagttccctttaagcacctttcagttacatctcattttggagaacttagtcacaggacaacacttaaccccaagaaaggctggtaaatcttttattccaggtggcataaaataagagttatctttcagttggggaagataacttttccagcttactcagagagttgttcagtcattcactattatgttacaaaggtacaacttggggtaatttccaaaggtagatgggaagaatgatcttggacaaggcaatgagcgttcttagtcttgggctctgaggatgccagggcatggcccctggtttgttttcagtagtgtatttcattcaaaataaacccaataatgttacagtcatgatagtaataacttaataatagatgtgatcatgatccccagtatgaaattatcagccatttgttttgaacaatagcaccgttgatatttgaaagtttagattgagtttaagtacttcactcaacagagtgtcctaagagtttgattttccattgctgtaatttttatttttaatgtccacgcatatagcctttggctttccaatcttttatttaccaaattccttcaatcatacagaattcagtttcttgtggatattgtctaaaggggcaagagcctttggcagaatgggtctgatgcgacttcttggtcttcctcaaggactgcatctctggaagccttttggctaccacagaaagccagggatcctatgtctttgcctccttgccacaatggataaaaccgtgattgctgagatttatgacattataaactttagggagaagctttaacttgtcaacaataaaccataataacagtgttcgactgtataaagttagggttattttgactacatgctaatttaatgtgctaaaaatatttctccagctaaagaaaggaaaagaaaccagtagtcatgtttggtatgcatggttttgtgagtgggcatgtgttttaggaatctgaatttgatttgggagttagaagttgtgaattctaagttgagtactgccattgatattctgagaccaaggatctcagtcttctgtcaaaatttagcccattcataactttcagcatttaactatgagcatttcccttttatagagatttttttctatccattataaggattatagacttttatgatctaataagaattgaactgaaaaagaatgcttaaaaagctacttatagcagccaaatatttattattaaaatgggatattagagcaagatttgaaagaagtaaaattaaaccattacaataagttacactccttaaatgatgctcttgtattagaggacaaagtatctgccttacagtcccaagataaagccacatgccccagactttattatccctgtctttgagctagcctagaaaacagacggaagaaattcagccacttcctcataaaacagatgttggaatacagcagattttctttaaagagggaaacaagagcaaggggaatgaagacagttctttggtacaaacatttcttattctcttattcttattttaatcttatagagaatgtctgaatgcatccagatctcatttgctgtttgtagaattgggatttacacggtaagcaatgtatatttttgtggtaccacatgttgtgaaaaataagtgaagaccctagtgttggaaa

SEQ ID NO: 115204 - DNA, 1190 bp, Homo sapiens
atactgcttgcaggactctgaagaactggcttggctgttttaactttttaattttcatcaagcagaattatagaggagaagataatataactgtcatcttgctttgtatcaggatgagggattgcacaggacatcaaaattagaactgtcaattatgttaagtataaaaaatagctctctaaaagaatattgtgtttattagccctctgatggaactcaaattataccttgataccattttttggactgtatagtaaataacgtttattttctgccatcttgttgaagttttgttttctcctttattttcatgcttacctttgaaatttcttagggaaaacaacaataaactgtaagtaatcacattaatttcaaatttagtattctttttctgtcttaggcattctttttctatagacctctcttaaacagattgtaaccaatctgtcttgtttttgacatcttttttgctgttttattagatgaggcagcaaagaagatgagattcatctttgaaataatattctttagttcttcctcagggaagtctagatgtagatttatgaatattactgtagaggctaccgggtcagagtttatctgagatagaaactcattcttttattggaaatagttaactacttatccttcattccaagttatgccttatgtctcatgggtttacagttaaaatagtttcttgcaaatatagcatctatatagggaaataatataattatttaaaatttattaccagttcatatactgtgatcaaaggaagtttggttatgtttttaaatatatgtatccgactcctagtaattagagggaagaggccattgttgagaatattattgttagaatgaatttacaagctggggcaatagacatgccacctggcctgaggtcggatgttcaaggataaggcagtatttgtaaggattagagattagagagaatgaggtaatatggttagtcagaaaaaaagttacacaaaataaattgagggttttcagggtaataattttagcaatcccaacaacaatacttgtacattttgagaatatgaaaaggagtggaaagtaggtttttagtaactaaagagtaaatatttctccctccttaaaagataaagctcataaaaagagttaattctctcatgataggtgctagagccctttcatatggca

SEQ ID NO: 115205 - DNA, 1035 bp, Homo sapiens
acttattgaagttcagggtggatgagttttctaaagtaacttattgaatggttcaaacccaggtttgtctaacctcaaagcttacctttcttttccctccacagttagaaaaacaagaagaaaagttgagattgtctaattaataggcaaatagaaatttttttgaacctttaagtggttgttagaccacgttctcctgtagtcagccttttcctggcagtacaataatttttgtaagttaatatagaagtactgattcagtaaaaggggttggccatttgaatattttgaggactttaaatatagatttgacagtgtaggtatcatgcccaaagaagtggcttaaaaagataaattcaaggaaagaacccctaaacaatgatttctaaggttttagtagaaggacagtgctgaaaagttgtgttcatttaattatattaaaaacgaatgggacgtagggaatggaagatgaattcatactctggataattgaataaatataattttccttatgattctaattaattttgcttccaagtgcctaatggacaatgcatggcaaagtagatgcctatcattataatagcattaaaaatattaaatattattgaatattaaaatattgagtgatgctggacacggtggctcatgcctgtaatcccagcactttgagaggccaaggagggcggatcatgagatcaggagatcgagaccatcctggccaacatggtgaaaccccgtctctactaaaaataggaaaattagctggacgtggtggcactcacctgtaatcccaagctactcaggaggctgaggcaggagaatcgcttgaacccaggaggtgggcagaggttgcagcgagccgagatcgtgccactgccctccagcctcatgacagagtgagactctacctcaaaaaaaaaaaaaaaaaggttgagtgatagttgatataatcttatataatgtagactaaaacttcttcagtttaaacatgtcgcattgccaatctggacaatattgtgaggcctggctaaa

SEQ ID NO: 115206 - DNA, 2652 bp, Homo sapiens
cagaactttattggcaaaaccaggcagtggactggattttcccacagattggaatttgccagccgctgggttagtagaataggatttacctacctcctcaaagaagagaggcagtattgcatgatacttttcgttggcattggagttttggcttttggacttggggagaacctttaaagaagagcaagacagtttgggaggccgaggcaggcggatcacatgaggtcaggagttcaagaccagcctggccaacatggtgaaactaaaatacaaaaattagctgggtgtgggtggcacgtgcctgtagtcccagctgcttgggaggctgaggcagaattgcttgaacccaggaggcggaggttgcagtgagctgagatcgtgccactgcattccagcctggcgacagagtgagacttcgtctcaaaacaataaaaaaaaaaaggatgatatgatgagtggctttagttgtttgaagggcataaagtcttctatgaatctgagcaggtcatgatcataggaaggccaggtattggttcaggtaaagaagaattctcttaagatttgttcatcttccttgagtaggaaatgacagaacagaagctgggtccctgcctgttagggacatcacagaaaggggttcatgcactgagtgagaggttggaatagatgcaaagttcctttcaactttttccttgcttctaggttgatcctaatgtatcagccaatctctcttcactttactatgagttatttaagaaaacattgtggtataggggaggaactaacatgtttcttttcatttaggcagtggagttttttccaactaattttatgcagaactattaaacaagtgatattttactatatttgactttttacaagcctatatttatgatatttacttacacgtttattattattatatattaatcagtgaggacaatgaagctgttctgatgaacacaaaaactgcctttagacatggttgagaactgaaggcttatcaaatagtttatttggttctgcattttgttctctttttggtgtagcattgaggaaaaacaggattccaacagaatcatagttgcaaatgttacagattggaaagtagctcactgtgcaatgttgagctgatcttcagtgagaaggcagaacataggttttatcatgaaacttgatctttccccccaccccaagttactctggcagcatgagttatgtgtgggtggtgtgtgttaaaattttatatacagtacatttgaacatgttgtttctcatttcagtctctaattaaaattcaatttctacttaaaagtatttcttgaatatccaactgtctctttgcaacaccgtgtgaggttgcagagttggaaaaggactggcttagaattagacctgggcagtagtctaccttctgccacttgctagcctcgggctagtatccttttgtttttttaatatgagaaacaggcctggaaatacccacgttgctctaattgtgagcgctgagtgagacgacagtataaaaatacctagcgcatagtagaaccttagtaaatgcctttttttccttctcttgtgacttgtaagataaggccatccttttaaattgaattgtgcgtggttctactcaatttctataggtatagttactagacattattcactatcttaatgaaacgcttgaataggaactctgccctcagaaatgcaaactgttcatctgaaaggagtgggcttacgagggtctatagctcacctggttcatgggttgtgattctgccttctggtttgagagtgaagggaggactttggagagatccgcttgctgataacaggtggagggcaggagtttcagtggcttgcttatccacacgacatgtcagaaacataggcaatgactatactgcctttagttgttagatttttatatcaacctccacatatctgttccctttagtccttagcactaaaacccattcataaagaagggccagtgtgcacatctttggagaagcaagaacatcaacagcaagggagggaggggagggctcctgccacttggcagccaggctttagggatggggtaaggagaaaatctacaagacttaggaaaaagtggtatcccttgaaaaagaaaagggaaatagggtgagtccctggggacaaaagtaggtagatactaccacctgagttgggcacagggatccctgggacttacagaaaaccccaagtagttccctgagcatatagattggggctatttgtcttcagcaagtatgagacagtggtatagctgctcataggaatctcagaggttggggtatcagatgctgaagagtggctcaaagaaattggctgtgaacccaagccccaggggagcccagttaagattccgtagggtctggcagttgtggctgggagttgggtttctgttaagattactcttaaactattaaatagttttaagcaggaggtgatagcaccagatttacatgttgaaaacttgctctggctgttgaatggaagatggattatacagggatcagatgggaactagtggggcctgttcaggagactcatccacattccagtagtagatgtgggcggcttggctttggattcactaggtgtgagaaaatatcttccctt

SEQ ID NO: 115207 - DNA, 1677 bp, Homo sapiens
tgatagtattaaatacctacctcgcagaattgagttaatgtgtgtataaagcatttaaaagagagcctaattctgtaagtactacaaaagtgtatataaaacaaggacttatggtactgttgtcaccaaaaagattttgctccatttcgattcattttccccctaccagccttccaaaaatctccctgcctctgcctaatacgcatagtgtagggtaactgggttaaagacacttcaactgcttgctggtgttttaagtggcagctatttctgattcacagggtgaaaggtcctggcagggaagagggtggcccacatctctcctcaggccagttatgcttacagctgttacctaagttcggccacacgagccgactcagtagatgagttttctgaggtgctactctggaattctgtgattgtttggagccttcagttcctatttcattggagtcaaacaatttgaaagtcaagtttctgcttttgagaagcagagcatgtgatttattggccagctcttttatcccttcttcctgtatgaatgtttcctgagaggcagggtatggtagaggaaggagcattgggacgatttattgggtaatgttgccgttcttggtcatttcgaatgtttcctgaatgaggctggttctcttttcaagtcactgggctaaagtagaaaacctctttggattattggatttctctctttgtttcattttgtatagaaatgtatattttatattgttcaccagtaatgtttttttcagtgtaacatactttttcctataattttttgggatttctatgtgtgttttaaaggttgggtcatttagatgtgatcacgcgattgctcctaggtttcctttgcatttcctgactctttcagggtccctactgacctggccttgggctgtgggtagcatcactttttgagcctggagtgcagcccctatttattatttctgtggatgtaggctgcaatttttgtgcatcctgagattcctgtgctagtgatgttttagtttcattatgtcattatttggggagaatacctaactatactggggatctttgttaatacccataggtgactattttccatttcatgtcttctgagttcttcctgttttatcataaataattatgtgtacttaatattcacgtgaaatagtttcataaaatggactcagtaaaaatttcgattccatgttgagaaagatcttgcattgctaattctaaaattcttcacatcagattctttgtaagagaacacaagtataatgaaacaagttgcttaaaaagttgaaaagctgtgcaagatgtgatgcatattttaatactttctacaaaggttgtcttgaataaaccatcgtaaaagtgagtgattattaaaccatgaaggagatgaagaatcaagagttatagtaagctcattgatgattcagtcttttcctcatctgtcttaaagcagttcttttctatttccccaaatccagagtgcttaagagttcatctgagggaaagattatttatcccaattgctttatataactgcagtgagtgatattaagacaataagcagtagcaacagtaacaaatacatatgcttctaacactatgagtagtattttcctgtgcattcaaaattaacaaggacttttgttttattaaatgata

SEQ ID NO: 115208 - DNA, 1984 bp, Homo sapiens
gagcagtgctagaaatgaagctgcagagcccagctagggtcatggaaactctgaaagtttgcctgcaatgacatggtcagatctgtctgcagtgcagagaaggattggaaagggagggaagactggagcaagactagttaggaagatgtcctgatccagaaatgagatgatggtgttcacaaccaggaaggggcaggagggatgcataaatgtagatggatttaacaacatttaagaattgccagaattttgtaattggatgtggaagatgacaacagaatagatctcagggataattcttaggtttttggtttgagcattgttttggttatctgagtaatgaaccaccttaaaacaatagtttaacacaataacaatgtattttactcgtgaatcggggtttgactgggttcaactaggcagttattgttcaggatccctcatgaagttgtaatcagatggagggtggggtcacctcaaggcttcatacacatgcctggcatctgagctgggtacattgcaacagctgggtgctggacaagggtggccccctggggcatctctcttcatgtggtctttctatgtgatggcctcaagatagctggacttctcatattgaggccgaaggcttacagagcaaacgtaccaagagaaactggcagaaactgcctggtcttttctacccaatcctcaacagtgattcagtgtcacttttactgtgttcttttcatcaaggcagtaaaaaaggcattgctaggttcaagggcagaagggagatatctcttggtgggaggaaggttgaagaatttttgggcatgttttaaaaccactgtaggtattgaggtgggtaatggggtcatgcactatgatctgtaaccctgaagaaatagcaggtttggtgggaaagggagaagtttgactttagagtgactgagtttgaactgcttgtgcagtaattcaacttgagatttcacataggtaaatggaaactcagaggtgaggtttggagatgtagttaaaactaatacctagggccaggtgcggtggctcacgcctataatcccagcactttgagaggccgaggtgtatgtatcccgagatcaggagatccagaccatctggccaacatgatgaaaccccatctctactaaaatacaaaaaattagccaggcgtagtggtgcacacctatagtcccagctacttgggaagctgaggcaggagaatcacttgaacccaggaggtggagattgcagtgagccgagattgcgccactgcattccagcctggcgacagagcgagactccatctcaaaaaaaaaaaaaaaaaaaaaaaagctaatagctaacatttattgttacatactgtatactatactatattattaatattttgcaggaggcacagtgctcagtattttttatatgctatacatttactattatcgttttagagattagaaaactgaagcttagagaaattaaatgttgtgcctaagacatggtggagccagaatttgaacctaggtctggctaatgtttgagctcacatttgcaaccacttagatggtagctgaagccatagccatgcatgagggttcagttgtgtgggaaaggaaaatacttgaggatgcctacggcctcagccactgctggcgtgtagtatacatgcagcttttatgggatcaccaaaagtaaaggaaccaaagaggaacttggcagccagtcatggtggcttgtgcctgtaatctcagcacttttggaggccaaggcgggaggatcacttggggccaggtgtttgagactagactgggcaacatagtgagacccctgtctctacaaaaaaataagatagccaagcatggtggcatgcaccggtggccccaattacctgggaggctgaggcaggaggatcacctgagcctgggatgttgagtctgcaatgagccgtgattgtgccactgcactccagcctgggtgacagaac

SEQ ID NO: 115209 - DNA, 1939 bp, Homo sapiens
taagcagcctgttgcttatggacttcagctgggcaaaatctcctgatggtattaactttataaaaggatttatttctaaggtagactaaagagaaggaaagcttgttagggaaggtctcataactattgtaggtgacaagaagtgggaatttcctctgatacttcccacaaattaaattattgaggggcttttgttttggatcctgcagccccctgtgttatgttgtggctctcccctgtcatctccccaaatgtcccaatgtcccaggtgtttggatgagtctaagaagcccagttctggttgaccctcattttccgagtgtctgtaaagtaccaagtcacatctacttttagcagggctggcttcccagccatgcaaccgctgggttcagaagagccccatgcctggtttactgctctttggtccccatcctggaaaaaaaaaaaaaaaaaaaaaaaaaaaaatcttaattttagaacaggtgctttgcgttttcattttgcactgggccgcacaatttataaggccagttcagatttctagcgctaaatacatggctggcatctgagtctgtaacctgcatcattgctggttccctgaccgtcttaatcaccattttatcactggaatctagtctagtgtctggtaaatacaggactgtgtaccatttacagtgctgagtgttttccttggatcacctaatttaatcctcccaacagtgctgttaaccacaaagacatagcaacttagaaaagaggaaacttgagactctgaaaggttgagtgttgcccagaattgcataaccagtggagggtcagggtcaggatcagtgtatgagcttgtctgattctaagcccatggccatgagcattcttcggtgctgcttaactattataattaataattgttgagaggatgagtgagagagactgtgtgaaccatagataacaattctggaaattgaggggtcacttgattgtttctgtcacctggttgcctgtgagaggccctctgggaactcagtgacagtgcagctcccactgggaaagttgtgtgggtttgtgtttgaggcgggagtctgctcactgattttgctttcattgattacccactctctccttcagtgtgcataaaggtaggtgttctgccctttggctcatagagccaagcactcctacatgattttgatagtagctcaccatctgaaaagttgcatttgcaagccaatctcatttatcaagttcctctgtacctagatttgctgggaactgttttaacctctggactgctgctttcagagttgaggacttatcccactaattatgtccatgtctctccaagagggattcccttgggttcttttttcaacaggagagctgctgctctggcctctctctctctttctcttggggaagggaatgacaatctggaggcactccaggaccactgattgaggcattggaggtctatacccgttcctaatcagtatagacatggagtcaggagctaaacagaaatataattctttcagagttttatttctaattatgaattattttaagcattcagaaaagtacagaaaataatataacagacttctgtgtacctgccttcctgattgaacattttgccattttgacttcaaaattctggtgatctttaaatgaaactaaagactcctgttccctgcacgcttcctcctccacccttctcagtggtgaccactatcccgaggttagtgagtaacagtctcatgcatgtttttggctttttatcatatatgcatgtgggtgtaaaccatatatagtatcattgtgtgtgctttaagaattttaccaaaattgtaacataatgctctatctttctaaatttgcttttttccctaaaaaaaaatgttgagtgaataagacattagtctgccctcaaggtacttatgct

SEQ ID NO: 115210 - DNA, 1048 bp, Homo sapiens
tattgtgactaactttaaagtgataatgtaggtcactttttagtctaaatgtcgagtggattaggcagtcatattaaatattcctttcttaataatttataagataaaaattatctgagcacaataaacagatctaccatatatggagttcatatagcaaaaatgttttgagcaaatccgtaccattaggtaggaacttttctacaaaggtgttaagtctggttcccaaacttctgtggctccagtctaacagtatgagccctaggagaggacacatagggaccttgattcatgccctccaggggcttgcattctgaaagatgccaaagccacatgcttgttggcatgtgggcagtgctcaggtcgggggtgagaggagataagtatatgagttataatcaggagggcaaaatcagttaacatttattgaacacttactctgtgccagtgttctaagtgctttgcatgtgtaatagcattaaactgaggctcagggaggttgtgtaatttcctcaagttcacacagctagcaagtagttgaactgcgcttgtggccccagggccctccctcttcattgccttccacctacaagtagttcccttgtgctaggcagaggctcaggcagcttggtgttaaggcagttgggatgcactcaaaatttttagtatattgcttcttaagtaaacaggtacagaaaagtggtccttgaccactactatgttaaagaaagcagtggccatgagcaggcaggctgatgcgcccttgtccccaaggactctggcaggtgattgttacagagaaggctggctaggaagagaactatgttgtgtgctgggaactcctgccttacagtctccataccctggtcatagccactgaggtgatcttcagcatctagtgttccaccaggtgaccacatatagattttcaggcaacctccttactcagccccctagtgtcacttttgggggcacattcctacctgccccaagccccagttttgttttgtttcgtttttcttccctcccttcccctcctttcccctcc

SEQ ID NO: 115211 - DNA, 1077 bp, Homo sapiens
caagacaggcggatcacttgaggtcaggagtttgagaccagcctggctgacatggagaaaccccatctccacttaaaatagaaaaattagctgggtgtcgtggcgcatgcctgtaatctcagctacttgggaggctgaggcaggagaatcgcttgaacccaggaggcagaggttgcagtgagatcgcacaactgcactccagcctgggcgacagagtgagactccgtctcaagacaaaaaaaaaaaaaaaaagttaacgtattgtgattatgttgctgatgttacttttatacctcctgtagaatgactgttactgcttagtggtattgaaataccttttaaactagtctcaatttatggaaatactgggagttgtaatcaacaagcaggaagtcacaagactcttttaagaatcttttaaaagctacgaaaataaaacccatttgaataatttatctattcaacaaatatttatggagcccttactttctgcatggccctgaaagtcatgcgggatgaaccctcagctgtaatatcctccttgactgcaggactggcagtcgtgtggctctagaggaacctgtggcaggacaggttaagtaaggcacataggggagggggtagcttctgatgtgcttctttgctttctagtacatttctctcattttgtgtgttttattgtgaactaaaatataaacttagacttgaaaatgtgacaagtaaaaatggttgattagtcttggatgctaattgtcaattaatattcattgcatttgtttatagtagcctccaccctcccatccacggttttacttttcaaggtttcagttaaccatggtccaccgaggtctcaaaataagtgagtaaagtacaataagatattttaagagagagagagaccacattcatataacttttattactgtatattgttatcattgttcacttttattattagttattattaatcacttactatgcctaatttacacattaaactttatcataggtgtgtgtgtataggaaaaaatatagtgtgctctgtgctatgttagttagttctatgatagctcagta

SEQ ID NO: 115212 - DNA, 1034 bp, Homo sapiens
tttccatgcactgacaagaatgatggtgtgtgtcatttctttttaatcagtatttgactttcttgtgttgttcctgttggaaactggaagagagagctgtgtgtgtgtatgtatctattgttcattgttctttgggctggatgtcgtcacttaacctttttatttggaggagagtggaaaggaagaagggagagaaaggtggaggtgctattttgtcttaacaggattaatccttttaataagattgagatattaaaacagatgaagaagctctactgatcttcgggtcgctgttgatttcttaaaacaaatgttctcagaagtgacagtcaaggtgagggacagggatagtactttaatatttaagacagggttttattgatttcagtcgagagaaagaatagaaatttgctaatcctaatcaattagatgtatcacctggtgcggtgcctgacttggtttctggcatgtattaatagttagggcccgatattttatttgttgaatcagatgaatatgaaatggaaaggaaaattctgctttttttcaccagtttttaaactgagacaagataaaatctgtttggattaggtgttttgttcaggggaatgcagaatgtatcctttactcttaacttgaagatgatcaagatataatccttttagccagggtggcaatttaaacataaaaatctctgttttccagttgatgagtgaatcttcctagaagggcacacaacttttcccctttccatgatggggtttaaaggccatgtttacatctgccaagtctctgggtaaacatttagctgctgtcccaacaggcagtaccagcatcttactctttcttctcataggtagaactagtaacacaatgtgcagagctttttggataaggtaggagaaaatagtcaggttaaaatgaaagagaaaaacacatttctcgagttttcctgggaggttggacaagatcaacttctagattcctttcagttcaaaattttctgtcttgactcatgtgatgattgatctgga

SEQ ID NO: 115213 - DNA, 3015 bp, Homo sapiens
tcctactgggggttggcggggacaccaaggctctccagcccgggaacacggagttcggctccgttgtacccaactggaaagctgtggaaacacaaaactcgggcggcgacagcaccagccgattttccgctctcttggctctttcttccgcttgcaccgcccccaccccggctcctccgctcagcacacaggaacccacatcccccaccactcccgcgtttctctcctgccaccagctggggcctgccttttataggcgccgcagccaatgagcacgcttctttccttctgcccgcccgcctggccaatcgccgcgccccttgtgtaatctccggctagtcggctgctttcggctattttcgctgttgctggctttttcaggagctgctcgctcgcagccagagacgctgctttttttttccgggttcggagccgttccggatgctttaggctgccggatgtctgatctccgaataactgaggcgtttctgtacatggattatctggtaggtgcagggcaggggtggcatgtcgcctctcggatctcggcgtgcccgatggccccctgccttgaggagcagcctttttgctttctttctttgggataggatgcctctggggttctttctcccgcagccggctggtaagcctttccctggactcggaggggcagcctccagggcgggtgggtggtggagctgacaggtaaaggtgcggcctgggccagcacggctgcagggcgagggtcgcgctggggctgcttgagagatggggcggccgcggcggcgcgtcccctgcccgcgatcggcttcctggcttccctctgcgctctccgcagaggactttctttccgggggagcaggagttttcctctctccctggagcagaactccaggtgctattaaagagccataaccagaatggctcactaagtgcccagcagccctggtcatttgattgttattaaatctctaaagctatgacctcggtcgtggcggggttttaaaagcacattaccataaagcagacgggtctaaactacctcgcaggctggcacgaacaggactgagtagggacaggtatagccccaccattccggtcttgggtgcgtgccgcggttccactgtgcacggattggaacccggctgtttaggccaggcttgtgctgagaagtttaggtgggaaaagtgtcagcacagtgctgggaccgaacatcattttaaaaatggacttctatgtgtctttgtggaattatgcgagcaccatgttttgttccagaaattatatttccccagagttgcttgtttgcgtttaaggggatcctcatttacagagacttgtgttcgatcctatacgattattgtgtttaccatgttgggcagaaccgctattgccatgcagagttgaagtagacggttagaaacattgaccctcctgtcatcttgttggacacatgcactcggttttcgactgcagattggcctggcagagatttgccagtgccttctaggaattacacttaaggctgtactgagaaagtctgtgcatgctttgatggccaagaaacgccggaccggctttgtgctgttatctgtgtatttgggcttattttagtgtacataaagaaaatgtttctcctaatgcttcagagcttgatggtcttgtgggaaaggatggtgactgcagttaatgcatagccttgtgaatggagctggatctaaaattctgaattcaagttctgttttgttgttcatttgttgatggcagtaacttcctttatctttgtgataaagggatattattcacccagtactgtagctggttacggggattatctgattatgaacattcttcacaatacaaggtgccctgtaagttaagagagctgccagaagattattttctaagttaaataactgatttaatttgtaatttatcttataaaatacaatacatggtttttgtcttgcagtctgcctaaattaaagcgaaagtttgttgggataattaccaagtaggaaagggtgacattgcctgtactactaaaagctaattttgaatacttaaatagttcttaaaaaagaaaatcaggtggttctgacattttattattttctttatttaccggatgtgttttaaatttataaattgcatcacaaagctgtctttgaggtgccaaacctatcaaaatgcttagtgaaaacaaaattgataactctggttaattactcaggctaacctctagataggcatagtctaaaggtgagtggatgaatgtttgtgggcccaaggttaccttaaaagcagattaatttatttgccaatttactaacagctttgtgtcaaaatcaacaggtcacaaatttgacttggcctttttgttttacctgggctcaagtttaccctaaaagcagattaatttctttgccaatttactaacagctttgtgtcaaaatcagcaggcctcaaatttgacttggctttttaaaaagctttacttgccatacatcttagttttacttttatatttaaaaaaaatcattattttgccactttatccatctaaaattcacaagtgcagtgaccaaccccataaaagccagtggctactctttggaggtgagaaaagaaatcttaaaggaaacagtttagtttttgtgagtgtgccaagtgtcccctgtgaaaagatttcagaaaattctttagcattaaactggatggaaacaaacagaaaaaccatctcaaaacaaaaaactagccctcccgaggtagcctttttgtgttcaccttttgcttgtcgactttcagagaaaatgatgtgccacacattatttttctcttcctgtctttcggattgacttgcttgcttatgcatactctgtgtggcgtttattaaaagccctatttctgaggaatagaaatcaatttatttgcatctggtatcttattttatttttaaaaaattcctgagttcttttacttaccttgcagggaaaaaaaatgctcctttcattc

SEQ ID NO: 115214 - DNA, 1018 bp, Homo sapiens
ttctctaagattagaagctatcgtacctttgcatgtttgactccaaaacccaaaatcctaagaggaaaaaatcccaacccactacctatcaataacgaaatgtgttaacatggcctacctgataggtgctgttcggtggaaattctaaggtggaccctttatacaaatcaggctctatcaagtttggtaaataaacaaaccatgttatgcacctctgataaaatcaagtttctaaacctgcaaaataaagtgtgatggaaagaaatattaccctgccccctggtgactctgccagaacacatcctcccttggagactcagcctctaacatgtgatccatcttacttgtacagcacacaaacaaaccagagaatgaaatttcagaaaaatctctttgaaacctcttctccattcacagaaacagtcctgaacctactcctctcgagctccatctgtgttcccagggagccagcctgctgagatgcctctgtcctccaggataacccttatcactgcaaggaggcttctcaaggctctgttagcattttttacttctaacccacagattgcacatcagcaatacaaatgtgcccatagtgagcctacaaatggtgtaaggctctgaagagcacagagtgacactttattggtaataaaatcccaagctaactggagagaaagcatgaaagcttctcaatctgctagagaagggggaaaaacaaatcaaataaggtaaatttttcctgtaccccactccactcacatttttttaaagcttgatttttgcaaagagaaaggctcttaaattctacaattaaaaatcatgaaagagacaaagggaaagagtgagacaaagaaacagagacacagagagacaaagagagaagagatgtccaacagagatgtagttggagaagtcagtgggtctgtaactccgagttctatgacttccttggacccaaatcagaggatgtccatcaaatgcattactgatgcaggatttttctcgaccgctttgt

SEQ ID NO: 115215 - DNA, 1020 bp, Homo sapiens
tattacaggatctctttgtaaagaagttacaaatcatggttgcttttttgataaatgtttctagtaatgagtggtagtatcttcaatttattcaaggagagttttgttgaatgattttctttgacattcattgaatatccactccctgccagatgatactgagagataaactaatgccacacggtcttgaaagaagtcagtaattttttttttaaatggtgttatcaataagtaataaggcccattccaaggccttacacatactagaaggcttctgatacacactaggccttattgtcatcacttccttctcattctttccacatagcttctttcgtggcaattttcccccaggagggatttccctgcagtggacctcctccccagtggtaccttcagccatcagaacacctcgctttagatctgtgggtcccaaatttcatcaaatccaatgaccatttctatggtaggtactttgctatatacacctttgactacctggaaatgaaataattataactactttctttgtatgtatctattagatttccattggtgtattacattaattttttaaaattttgtgcaaggagattttctttataaatttcagtatgtatagtagaataaaacctcactagattaagatacaatgaagttatggcactttaatatgtttgtagactcaccttgaatgctgcagctacaaatgcagattgaaaattgtgtttttctctaattgtaaccagcttggtaaaattcaaacaaaacaatgtatgatagtccctcaatttatatggcagttgcattcctggaaatttcagtgagtattaaagtcatacacaaattctttccttctttttctttctttctttcctttttttctttcgctctttcttttctttctctctctttcttcctcccttccttctcttctgccttcccttcttccttctttcctttccttttcttcttttcctcctccctccctccttcccttcctccatttctccttccttc

SEQ ID NO: 115216 - DNA, 1049 bp, Homo sapiens
gattcaggatgaattctgtgaaggaacaacacctaaacccaagaaggcagctgttgcagcatccagtttagcttcagaacgtcaacaattagtcatgcaaataaatgttctagttttaaaaaatagaaataatcctggctaacatggtgaaaccccgtctctactaaaaaatacaaaaaattagccaggcgtggtggtgggtgcctgtagtcccagctactcaggaggctgaggcaggagaatggcgtgaacctgggaggcagagcttgcagtgagccaagattgtgccactgccctccagcctgggtgaaagagtgagactccgtctcaaaaaataataataataataactaaataaacaaataaaaataataaaaataaaaaaataaataaaaaacaagatgcaaagtggagttaatagaaaacagttctaggagattactgttaagactcagactatgcactgatgttcagtccttagtaattggtggcaacctggtggagagggaagaccacaggctgtggagttggacctgggtttgaagattggctttgcatgcctagcaggatgtaagcttggcccactgacttcacttctgagccttgttctccatgtctgtcaagtgcaggggaagggttagtgaaatctatcttatatttttatggacactaatgagattgggaatgaaaacgagatgcccataagcatcagtgcatcataggtacttggccagtggttctcaaagtgtggttctcagaccagctgtatcaagattgcctgggaatttataaaggaatggagattctccaggcccagcaatcagcatactaaagcttgagaactgtgttagactttctgggatctaacgaagaaggcaggacagattttgttagatgtattacacaaggggcaggcacctgtgcacaaaaagaccccacaaaaacacagaaaaaaaacacagaagaggtgctttttgttttgctctctgtgtgataagctaatctgataagtgagaagtcctgttctttctataactgggtaggtaagt

SEQ ID NO: 115217 - DNA, 1033 bp, Homo sapiens
acgttgtctcaatgagtaaagagatttatttgtgatgatgactgggatgttagggatttcggctaattattgttagttttattggagaaagactttgttaattggtgaatggctatgtgagccttttctttctgtctgattctctcccctctgctgtggtgtttgcaattgaggaacagctactaagaggtggcagctgcagagaaaagtccagagccatacagatgaggctgggaactctgactagcactgagtatttgaaagagagcttggcgaaagtctgttactacatgtagcagatacctgtgactgcatatagggagtgaaggagacagccaaaagtgcacttgaggataacaaatggccagcccctacatgatcactcatgaaaatccaacagaacccagaagtctcacttagctttaaaaaatccattatttttttcagacagaagcacttagggaagcaaaatggcttatttcagcatgagaaagcaatgtaacagtacagctaagctttgagggtctcctgatcaaaaatttgtgagactaatagcttacacaggaaagagatgatagcccttttgaatgccttctgagcgctcttacgagatgcgcaatctaattgtggtgtaaataccagctattgatggtgggttttgttcatcgggtttgtgctaccacagtaccagaggtctgtatctattagtgctagtaatgtatggatgaccagggctggtgcagacatctctgcagcaataataaaaggtaagaagatgcagacaaagctgaatttattgtgtttgagaagatatagaattcaatttccctgataaccaagcttaattgcacagaattatgagagctcattaatgaaacccaatatagacagtttatattagtaatggcattacattgattatctaatttcagagtaaggaattaaagggggccaaattagggattattctgcttttacgtaacacctgtagtcaggaaaaataaatagctcccgttattaaactaaagctttt

SEQ ID NO: 115218 - DNA, 1060 bp, Homo sapiens
gttggatttcagaaatatcaacacacttggcagacattctgagaaaacaatattgttgccccaaagaagtgtttactcataataatgatttgaggtaaattacattttcacctacacaaattatctatgatccatttcttattccttctagcatttttttctcaaattcaaaaaaggaggattggagaaaaaaaataagttttgaatttgttcactgtacctcacagctcacttctggccatatcacagtcttaagcattttcatctgcttttttgtgagtcccctttacttaactcatcacaactggttttaattacttggttaatggaccatattgcatcctagactataaggtaataaatatattttgttcaagacaaaaaaatgaaatgacattcaaatgtatctaaaatggaagtaactagttctagatggcatttgctccagtaggttttgcttttcctgattcactgtttgcacctccacgtccccacccaccccatgtaagagtaggggactatgcctagaagtaccgtgatagtgcagttggcacacacgtttcatgggaacttctggaaataaaatgggtggcaggggtggaatatgagtttaaaatacacactcagaactgattatttcaaaccacctcttaccatctgaaaattggttttgtgtgtgtattttaaacatacattcccccttattttatttctagaagttttcacgaaatgcctgtgccaaccgcctggcattttcctccattttcatggcacttccaggcatagtcctttaatctttttttttttttttttttttagatggagtcttgctctgtcacccaggctggagtgcagtggcatgaccttggctcactgcaaccttcacctcccgggttcaagccattctccaacctcagcctcctgagtagctgggattacaggtgcccaccaccacaccccgctaatttttgtattttaagtagagacgagattttgccatgttagccagactggtctcaaactcctgacctcaagtgacccacccgccttggcctcccaa

SEQ ID NO: 115219 - DNA, 1070 bp, Homo sapiens
atgcttcagtaactggggagcttctcttgtgcctggatactacttttctttattaaaaactgatatgacccagataaagggaattttattctgagtgtttatctctaaacttcttttttattatttgtctcttgcaataatctgagcacttttaagagatgaatgttttatcctagtattcagtgctttttccagacctgacacatagtaggtattcaattaatgtatgctgccaaaatatatttcagtgttagaggccaccaaacagatatcttttcattctctcccctctgccgcctacataaggagccaatgaagcacgttttaaaaaagatagcacatttgtaattgcttcaaagttaaacctatatacttttttggttaattttattagctgtagttgctcttgttttccatactataagaagattatctcaattagtgttaattgtctccttccacgtggtccttcctccatctgacttaggggaattttcttggtgtttttccatctcattcagacataatggtgtggatggtgggtggtttggggttacatattggagctatgtaaggggtacaattccgatgacggttctgtggccctaatcccctgctccccacccccactttttttgaagagggtgtcaaatatggattaattacttatctttgtgaccagaaaaaaaaaaaaaagcctaagttaactgaaggaaaaaaaatggaaatttactaataagtgtcccatggaacttgtggattaaatagcagtcagatatcgtcacatctctctccctccctctctctcccccactctctcctgctcgctctctctctctttctctctttcctcagtgtatgcttcattcttctctttatatagattgttttcctcttctccattcccatgcatgcccaagtatggccactgagttagctgggtcctctgtgaggcagacattgagatggagctgggagcacatgaggtttgttgagatgtaatccctgtgaaagagaagaggaagaggaaggtaactggacagggaaagtcttcacaccatgatgcatac

SEQ ID NO: 115220 - DNA, 1055 bp, Homo sapiens
ggctgtatgatctaggatctgttatagagtgaccaaccatctgcttagccctacactaaaacccctcagtcctgggccaactaggctggttgatcactctacttaacaagttacctggggaaataatatattgacactaacgtagagaggatgagtgactggaatcagtagcatcctactatgttgctgttgctttttagtgaataatcattggaagagaatgcaaatgcaaaaaaaaaaacaaataggggttataaccgattattagcaagattctgatgaactgagggaccacagaaactaagtatgtgagtaaaacagactttgaagatgagtgtgagagactgagttggtcattagagccatcggctgtaaagtttgtgtgcagcctgaaccactgtgtgctgcactcaggagaaaataggatgccttctgcactgaggagtttggcttggataaaaaccattgtactgacaatgtagtctactccagagtaactgacaaaacagggggagacattgaggacataacaacatggctcttccttctcctgagaagcattgtcaaagctgagtagttgcaccagtttgagttacagcattggggaattcccccagaagctgagtgggagctctacccggggctcagtctgtggctgtcacttgtcttcttgcacagagcttacttatgagggaagtaaggggctataatccttggaaaacacaggcttcactacccttttcattcgaccattaaaaggaccattcctctttggatgtggagaaataggaacacttttacactgttggtgggactgtaaaccagttcaaccattgtggaagacactgtggcaattcctcaaggatctagaactagaaataccatttgaccaagcgatcccattactgggtatatacccaaaggattataaatcatgctgctacaaagacacatgcacatgtatgtttattgcagcactattcacaatagcaaagacttggaaccaacccaaatgtccatcaatgatagactgcattaagaaaatgtggcaccta

SEQ ID NO: 115221 - DNA, 1041 bp, Homo sapiens
aagaaatctcagataattcacttcggagtagaaacctccttcagccgcgctcactacggcgcccggcttcgcggcaccggccactagagggcagtggccgccgcaaagccgacgcgggcggtgggctcggcggctcggccatcgcttgctctcgcctggcaaggggctctcggccgtggattagcgcagctggagacgtgggaggccgcgggccccgcccccgaccggcggcggctgcggcggcccagcgcggcagtcggcgctgcgaagtggaggcgctgcgagcggagccgcgcggagggcgcgaccggctggtccgggcagcgtgggtttgccgccttcggggctccagtccgcgcgccagggctcgagcagtaccgcgggcccctcaggtgggcctcggctcgggacgccgggagtcgggaccgccagtcggggcgccgggaccatggcgctgcgcgcccgggcgctgtacgacttcaggtcggagaacccaggagagatctcgctgcgagagcacgaggtgctgagcctgtgcagcgagcaggacatcgagggctggctcgagggggtcaacagccgcggcgaccgcggcctcttcccggcctcctatgtgcaggtgatccgcgcccccgagcctggcccggcgggagacggcggcccgggcgccccggcccgctacgccaatgtgccccccgggggcttcgagcccctgcctgtcgcgccccccgcctccttcaagccgccgcctgacgccttccaggcgctgctgcagccacagcaggcgccgcctccgagcaccttccagccgcccggcgcgggcttcccgtacggcgggggcgccctgcagccgtcgcctcagcagctctacggcggctaccaggccagccaaggcagcgatgatgactgggacgacgagtgggacgacagctccacggtggcggacgagccgggcgctctgggcagcggagcatacccggacctcgacggctcgtcttcggcgggtgtgggcgcagccggccgctaccgcctgtccacgcg

SEQ ID NO: 115222 - DNA, 1033 bp, Homo sapiens
tctaagcgcaggaagggcctgatctggtggatgaaccacatggccagccacccagtgctggcgcagtgcgacgtcttccagcacttcctgacgtgccccagcagcaccgacgagaaagcctggaagcagggcaagaggaaggccgagaaggacgagatggtgggcgccaacttcttcctgacccttagcacgccccccgccgctgcccttgacctgcaggaggtggagagcaagatcgacggcttcaagtgcttcaccaagaagatggacgacagcgcgctgcagctcaaccacacggccaacgagttcgcgcgcaagcaggtgaccggcttcaaaaaggagtatcagaaggtgggccagtccttccgcggcctcagccaggcctttgagctggaccagcaggccttctcggtgggcctgaaccaggctatcgccttcaccggagatgcctatgacgccattggcgagctcttcgcggagcagcccaggcaggacctggatcccgtcatggacctattagcgctgtatcaggggcatctggctaacttcccggacatcatccacgttcagaaaggtaaagcctggcccttagagcaggtgatatggagtgtattgtgcaggctgaaaggggcgactttgacagcagtaccactgtgggtttcagaatcatattctacaggtgaggaagcgagcagagacgtggacgcctgggtcttttccctagagtgtaagttggattgctcgacaggcagcttcctcctcgagtatcttgcattagggaatgagtactctttctcgaaggttcaaagagtacctttgatgacagtgctatcattttagagtttgaatagttgagtaatgagctgctcaaatctgtaatcttgagacgagggtagaattagaaggggacctaaaccatgttaggtatctgtttgaacactgcactgtcacttagtggtgagtttcaaaaagtgaggaaataatggagaagaacggatgtctgtaaatagaaatctgctttcacccttccaca

SEQ ID NO: 115223 - DNA, 1044 bp, Homo sapiens
gttaaattgatttgtcgatttgggctgtgtgaagcagggaggcaggactagataagtaaataggcagtcctgttttctgtactcttaaatatacagactctacttcatcgctctctaaatgttccagatggagccttttttcaataaaagccccaggacctcaggaatggtataccagtagtgggcctgtcagtcttgctgggtagaatttcaccattgtgcttccttttaccactagtagagttggcctgatgtccttcagacattaattaaagatagctggagtcccagcagggcacacaaggtaaggctgggccacacggagacccttccctgtctgctccccattctcctgtagctaaaaatagccctgaaagggtggtgccaggaatacagagaaaagctctaagaagttggggctgtttgcaaattcatccttatttttgaaacctctgggctagaaattgaggctgttcattctttttgttttcactccatctttagttgaacccatttctcctctcccctgcatttacccccagctgttctctaaaaagacctcatgtctctaaaaagagaacaggtctggggcttaccctttgccccagtttgtgttttcttagtgaaaataaggtgaccgttggtgctttcgaaatacacgactcagttccttggttaaaatataaatgtgactgcccaaggacagtcttgggcacgaaactgggtgtgggcaccgctcataccacaccgtcaggggtttctcagacttcttttttgagccacatagccttcagagtcatgccgaccacagtgggaccgaagggaggcagaggacctgcactcccaccctcctcccagtaactcagggagcctatgaggtttccttgttcagcaatgttgtcctgtctggccatcttaggacttctaagcataatgccagaacccaaacaagtgagaagttctgtgattcacttacaaacacttcccttgaactatttaatatgttccttctctttgggctgaataaaaaactattattgtatt

SEQ ID NO: 115224 - DNA, 1059 bp, Homo sapiens
tttaaatatcaagttagatttaatttgccatatatttttgaagctctgtatcattaactaaaggattataaagtggcagagtaatgctgagctctgtttgacaagattatatccggaaggcagacgtgtatcatgtctcatatttatacaacacagactagaatctggccgctctgccggtgtctgcaggagggctgggtaggcctctggtcttaagtgagttatttgactagctacagagacaggtcagccagcctcggcagttccttgtgccaggattctgagagcctggtggatgggccagtctgccccaggagttgcaccaaggggtgggactgagctgggtctgctgaggaagctgtgccagtgaaggggcagcatgccaagccaagaagccgtgggtgcagagcctcatcgcagtgggagctggcctgtcgggaccagcatgggctctggagggccagtgtgtgggcatggaggagttttggacaagctattttaacctgcgtaacgctcacttatctttggccaagtgggggcacttcctcacgaggtcagcatgagaattaaatgttatagttcatagtagctagtcactaaatgtttatttttgaaaaatagatgggtgaatttaaaaggagatgacaaccaggcatggtggcacatggctttaataccagctacttgagaggctgagggaggagaatcacttgagcccaagagttcaaatccagccagagcaacacagtgagaccttgtctctttaaaaaaaaaaaaaaaattaagggcgctctcctttgaaggacaattccagtaatcttatcatccctcctggcaacctattgccaccagaattgtaggcaaaagtacaaaagctcaaggagtcttcagtctagcaattaaatatctgctttaatcagttcgccctgtattgcacaccggaagtaatggcaactgggataaatgtagatgttgtttggagtcaatcgtttgttgttgttcacattgaagagtgtatgtaaactgtctcctcctggctcccctctaacccaaatcacg

SEQ ID NO: 115225 - DNA, 1710 bp, Homo sapiens
gctatattttggaggtagaatcaacaggttttcctgagagatgggattgtgaaggatgtgacatgcaagagaaaggggagtcatcaagggtgactgtaattttggcctgtttggcctggcctacaataagaattgtcagaacaggggtggggagcagcaatcaggaattgagttttctccttttaggtagatcaggctcatgcattctgctccatgtctccccaccccaacacaagcactttctagcttcaggtctagtccccttccttggagtatcccccttggattgtagtccttttgtgaataattgtctgtgcggtgctcagttattagtgtgtgggttatgtttttatgttcctgtgttgtatagctgttaactactgttttatacatgcatagcaagtacttaatgaatgcttgctgaattaatgaagtaggcactcagtagctacttggttgatcttgaaatagatttataagatgtttttgtttttccatttatatgatgatggataacagtctaaagtgtacaggaaataaagatagaatctagatgtattttatggatgaagtcattaacatgtgagtgatttaaaagtcttagagttttgtgtttatgaaatgactttacataattcattggggaggggaggggaagtttgaaaatgcttaaagtgccagagaattaatattgtatacctcatgatttcactttatattgattcttggtgtttaaacttacgcatgcatacacgcacatacacacacacacacacacacacacacattttcctcattagtaagttttagttataacatgtttactggggtctcgtttgcttaattcagagcacaagatccagagaatacattcaccttgttgcttgacttggatacacacggagcactgagctcatgtgtagagcagtaggtacttgccctcatggaaggcccactcagttccttgagagaggtagaatgtgtgcacagaggactgaaataaaaggtagatttaacttagtactgcgaataagacagtgcatgggagtccaggtgatagagaggaattgtcagtttgtgttagaggcttgagtgggcagcatttgaattccccctttgaaacatggtcacagtgtgacttttggaggagtgtaggtggaaagcgcactcctgatcttgaaatgctttaggataggtttgataagcatacagtaattgataagcaaggtacccggtgctcaggtcagtgaagggaactgaagtgaggagctgtcactgtaccgtatgacacacagtcgtggacatgcaccatgatgtgaagtaggacagaaggaggagtaattatgggcagtggataggaaggttcagaggtggcttctgccagtctcagtctaagaagagttttgaaaacaagtggaagtttgccaagccggcagagtcggggaagggcagtctgggccgaaccatatgggatccgtcttggctgcctctcagaaccagccgctgaggggatacagcagaaaatggggccccaccctggatgtgaatcggaatgtctgtgctgcctagacattggtgttctttgaaaagctcctcacatgcttttgatgtgctgctgggtttacagctgctgttggaggtgatagcggaaacacggaagatcaaatggggtgccgacatggccaggcctgcacttaagatggacaggtc

SEQ ID NO: 115226 - DNA, 1009 bp, Homo sapiens
caagacatttttaactaaatgctgatagatgttagtgtggataatctgtaaattttcacgttttatgatttgtatttcacatatattttaaaacttgatacaattttagatgctttgttctgtctttagttggttatttatgatttcatacaaggatgtccggatgtggtcagagtaaagactcacagccaccggacacctgggccctgccagtgcgaggcagcgggaaaaccacaggagtgaggcgtgtccttacatttaaaacagctgagttaggaattatctccacagcctcgtgatcgtgaagggatgtgaagcagcactcaggataacgaagagtgcttgtgctgctcaccagtcggtaccaccgtggcatacatggcaattgggacaatggagtttacaatttcagacaaaaactggaaaattacttgaaaacgagaaatgcattatttgcagatattctgctaactccagcatgaaccacagtgcactcagatagggtcccataagtgccctggctctgcgtgtgtgctctatcttgccttgccttggcttctctcgtaaagagcaggggccactttactctcttcctggccccatctagagggacttctgtttagatttattttagcagcttctatttagatttattttggcttgggtctccctttatctttctagaaaaaaagaaaataaggttttacctttcattaaaggtactttcccaagttcactctttggtacagatatgcttgttgtatgtcacgtgtcgaaagtgttggcagcttgcaaacatatctattgttgctttttttttttctttttttttttttgtagagaccagtatgcgtgcacatgcctcaggtaattaaagaactgggcactgcagacctgaggcccctatttgtgttctctgaatttgaaccattatatgggttttacttttacaaagttagttttttaaaagtttcattgtatggtcagcattatcaaggatagtatgtct

SEQ ID NO: 115227 - DNA, 1054 bp, Homo sapiens
cccccattctttcatttccgtcttctgttttgaaagcagagtggtggcaatatgatgtttatgaggggagggggctggcaagggggcatgttcctcctaaattagccacttaaaaagcagagctttcaatgctattgcctgttttcatattgattccatcatgaaaaatgtgtagtccttgtgttatttagattctgggcaacatttttagttttcatttacactcctcgggtttggttaaaaaacaatgcagtacagccatgagaatgctttaaaaatgctgtcatactttgttacagctctgcagctggttgtattgtacctctgcagttgtttcttaggcagctacaaattacttaatttctaaagctatcctagaagtagcaagtctatgatgatctaactctgctccagtagtttccgcttccaacatgctagagctgaaaattttgctctctgcctttcttgtgatatttaaaattttgaatatgaagataattgtgaagcctgaaaatatgtacacataattcccagtttgagcagtgtcagatcaactgtaagaacccaatcatttgtaacaaaacccagattctacttctaataataatactatttcactcacatctagccaacacttgtaatattgtttctattggaaaaatatgtttccactttcttttctagtgaactcagagcttaggagctcagtgggcagaggcgggtagagggaagcttcctgggaaccccagaaagtggttctgcgtgttagtccccaagtgttaaacactcatgctctctgtctgtggatcacttgagctgtttaaaagatgtcatatttttttttctgtttacttctagtcagaactagtcaattgacttccataattagcttaccgttttcatagggaggaaagcactgatacctttactgtttgttaaaaggtgtacagaaaaaactaattggaaagttgtgagatgaattttttaaaaaacaaattactttcttgggaaaagatgtatatattttaaaactttgcaaagtattttataagag

SEQ ID NO: 115228 - DNA, 1050 bp, Homo sapiens
gtttgggcaactatttataatgcccaagattctgtttaatatgtagttatgttcttgggatatgtggatatataggtttttaattaattgttatttttaactacaggagctcttaccaaagtcaaggagagtaggcgacacgtggaggaagggaagatggaggtgcagaaggctgacggcattcaggatcgctgtaacactatttcttttgccactttggctgaaattcaccacttccatcaaattcgagtgagagactttaaatcacagatgcagcatttcttacaacaacaaataatatttttccaaaaagttacccagaagttggaagaagctcttcacaaatatgatagtgtttaatgactggacgttggattatggactttttcagttcaaggataatttctacagcagaataaaaactgctgtcaaagagctattgccagctatcagtggtggtacaaggacggttttgtgttcatctgaaacccagctgaatttataattatgtaggaaataaacagttaatatggttatataatagaaacagtaccacacattgtaactaaattatactatgtatgcctacactaccattgtaacttttggaataatgattatactatttgccttattgctttttgaagtatgggtattttagtgcatactttgtagacctcaaaacccatgaagggtctcaaagaagctggctggatacaagcctgctgtggatgcctttttactctcatagattgggattacctaaattcaacctattctctgtttacaaactccaactagagcagctatgcgaccttgtgcctttagactcttggtttttcatttctccccgtcccttccccacctttttaaagtaagccacagcttttctgattgaaagagtgaaaggccagtgcatataatgacaaactgatgataaccttatattggcagtagggggtggggggggcggtggggtgggacgatcagctgtcatcaatttgcacagcaagtattatctcctgataagatgctggtgaatgcagggga

SEQ ID NO: 115229 - DNA, 1132 bp, Homo sapiens
tgatctaaggagggaccagaaataatttttgctattccaaatactgaaggaaaaagataattgatttatactatgttttaaaaaaaaaaaaggtattgatgagccccccccccccaggacatttaaccttaaaatttattttaaatgtattcttttattattataagggaaatacagatggctgataaataccaaaaagattcaaaagcagcttaatttaaaaagcacaaagagattctggcttacagtgccccaatctcaatgtttttatagttgctgagctaactaatgtgattattgagtttacagatttaaaaattgtcactgttagagtatctactgtttttatgaagtcaaacttatgctgcctcagaaatccctgggtactgaaatggtaacatggaagtgaagaggtcactttgaaatattggtgagtcacaaagattaaagaaaaggatcagtttgcagatactcagaaaaggttattgaaataattactgaacagcacattttctctctaaaaagtagtttcatatgggttgtatttttaagatcagattatcattttgatatttggtcaaaattttgtaccttaggttacttagagccagatttaacatcatgaacattatgtggctttgtctttactacagatatgtggaactgtaaccaaatatgttgtctctaaaacttgttgattgcaaaatacagttctataaacaaaacccatatgtatatataaatgttaattttgcggaagtctggaaattataactatagcatttaagtttgagtctgtattggacaaataagcaccatgcttttcaaatgatttaaaaattacttttatttgcctctttattttgatggtggttggatttttttttttttaatagtaaaatcactaaacttgtgcaatggtagcatggaaattatctgaggtatattgtatgattgtactttagccagggtggacatagcttaaattataaaaactaaagatgaaagtacaaggaagtataagttatacttatgtaagtataaattcatgctgcctacttctaagagaaatttcattcttcataaccacataacattataatgccactgattcatacgggatttacattaa

SEQ ID NO: 115230 - DNA, 1052 bp, Homo sapiens
gaacttaagaatgacatttaaaagtttttacacaaactttacatacttgacagactaaaacatttttcaagtccttaattatgagaacagcagcaaaatttaagacaattaaaaatcggcatttaagaatctgctgtattattgtgaataaatgcaaaacaactgtatcagtgaagcctgggaaaatctcaattactataatattcgtgcactggctttacatttcacttttgaatgcgttccctcatcctgggtgcaaactgggtaccttcagatacaacagcttggacggggaacaagattacgacacatggctgtagaaccagtctcgctgcgttacagttacagcatataaacaactctgtctaataaaaacagtaaaaccaggctcaagtgcacaccctgtgttacaaacacatcacatatcaggattataaatcatagaaataaagacaaataatggcatgaagggcatgatagtttatttttaaaaattgtaccacactgatcatgatgaccagcatacacatgataatggcttttctcttgggtttaacattgcagtagttttgcatactgcaatgtttcaataggaccaagaacgttagagaataaagatcttagatgaaaatgaacactaataattctagtgtcctcccccatagaattaatgtaaatcccgtatgaatcagtggcattataatgttatgtggttatgaagaatgaaatttctcttagaagtaggcagcatgaatttatacttacataagtataacttatacttccttgtactttcatctttagtttttataatttaagctatgtccaccctggctaaagtacaatcatacaatatacctcagataatttccatgctaccattgcacaagtttagtgattttactattaaaaaaaaaaaaatccaaccaccatcaaaataaagaggcaaataaaagtaatttttaaatcatttgaaaagcatggtgcttatttgtccaatacagactcaaacttaaatgctatagttataatttccagacttccgcaaaatt

SEQ ID NO: 115231 - DNA, 1039 bp, Homo sapiens
agtgaagtctaatttcttttgaccaagatcacacaaactaaatgatggagctgagattcaaattgggatctggctcaagcctattatttttaaactagattacactgaatgtgatttctctgcttttcagaaatccctaacatcttcccaagtctccactcctggaatgatagagattccatcattctttgggcactgggcacaaaagtacaaagggaacttcccagaatctgctgtttgcacccatttctgctgggaaaggtgagagtctgtgctgctatgtctggtctctcaacagaaggtctgactgcagtcttacgtagactgggaagcatgccagatgttaccttccagtattgttatgaagagtgagagaaagggtccaaaactgactgtttccccttctctccaactttcacctccatgcagtgccaatagaagcacattccagttgccataacaatggccttggcagaaccacaagtcaaaaatttgaactccagttggtcagagtcagggttactcatgagtaccacttggccacaggtgggactcaggtgagagcaacagaatttgctgagtaataagctctggagagtttgaagagtggtggggtagacttctaggcagcgtatagagggatgctgctgtgctagggctccatgggcaggaaaccagaaaaacccagcagtggaagccaggcctctgaggtgggggaagttaatctgggattggctcatggctatagcctttccagggatcacaagtcctccctacttggccctgatcccaggatgtctcaatcctaacatccctgtgtcagagcttctcaaactgcctgcctgtcttaaaggccatttcagcttcattgagtgacttgtaccagaagcatgccaaaggcaagaccaattgtccatgtgaagccacctgccaagggagcttaaaaacaaggtgtgtggtattttgttgctgtgtgtcccatcagcctaccctggaattgatctctaagtctgaagtggccagatgcatcagaccttat

SEQ ID NO: 115232 - DNA, 2766 bp, Homo sapiens
agttctctctcaggaaaagcctatgatttcctcaagacttgtggcacagacagaaactttagggaaactgacccagaccagatggcagaaagcagatccctggggacagcacagtggtgaagagcccagtgtggatggcagagtttctgccatcaaggtcatttggccaccagccaccactaatagtcagcttttgggcacccacacagcccagagagagcagttaccctctgatggtcatcatacccttggctgccgtggtcttcgtgctgaaagtggctgcagtggccatgtgtgtctggttgttgagccagaaggtagaaaaggcaaaaccccttatcaagccccagaccaatccggaacacacaaccccaagtcataggccacaaaggagcataaagttcccactgtcacagtgacaccccttctgcaaagctccagcagccccccagtctgtcttttcagggccctgcagtgtgaacaaatgtcttctccagtggccgagccagtggacaaatgtgctgcttgggagacatggatgaacctggtcaaactctgccgacaaaccaacccaacactgaagcacaaccagtaccgggtgtagattgagggctcgcatttcttactgaccacctaccatgtgtcaggcactgggataggcattgggatataaagcaaataaatgctggttggatcaactgagaaaagtcaggccctgctagtgattcaatgttcaatcctagctccatggttagatgttgcggggtggttgattgtgacttgtacaacactcatgggctttctgcaatgggctctgtgtgtcatcttctggacctgactttctcagtatacatcagttggtcaatatttaaaccctttactaaggtagtacagaacatgttagccccactgagaatgctagtattaacctggggcatagagttaaaggaggaaagctttgaatattttacactgagaattccctctgagtgagtcagcaggaagtacaagaactatttcagcatgtagaagaggtaatttatcacatcaatgagtatgtttacgtaatgtttttctgtaatgtcttttcctcattggagtctctaggtttgatttcctagtgcaggaaatgcctcagtgctctaggtagtgttgggacagtctggccccttttgaaattatctactgaatacattgtgtttcatcaggaggctttgtctattttgatttataaaatcaagcctagaagaaactatcatcagagtgaacaggcaacctacaacatgggagaaaattttcgcaacctactcatctgacaaagggctaatatccagaatctacaatgaactcaaacaaatttacaagaaaaaaacaaacaaccccatcaaaaagtgggcgaaggatatgaacagacacttctcaaaagaagacatttatgcagccaaaaaacacatgacaaaatgctcatcatcactggccatcagagaaatgcaaatcaaaaccactatgagatatcatctcacaccagttagaatggcaatcattaaaaagtcaggaaacaacaggtgctggagaggatgtggagaaataggaacacttttacactgttggtgggactgtaaactagttcaaccattgtggaagtcagtgtggcgattcctcagggatctagaactagaaataccatttgacccagccatcccattactgggtatatacccaaatgactataaatcatgctgctataaagacacatgcacacgtatgtttattgcggcattattcacaatagcaaagacttggaaccaacccaaatgtccaacaatgatagactggatgaagaaaatgtggcacatatacaccatggaatactgtgcagccataaaaaatgatgagttcatgtcgtttgtagggacatggatgaaattggaaatcatcattctcagtaaactatcgcaagaacaaaaaaccaaacaccgcatattctcactcataggtgggaattgaacaatgagatcacatggacacaggaaggggaatatcacactctggggactgtggtggggaggggggaggggggagggatagcattgggagatatacctaatgctagatgatgagttagtgggtgcagcgcaccagcatggcacatgtatacatatgtaactaacctgcacaatgtgcacatgtaccctaaaacttaaagtataattaaaaaaaaaaaatcaagcctagaatagaaatattatttgaagccctacgggacagaaaagtttgttgaatgtttttacgatgcctcaatttggcttaactttacaatgaattaaaataatggtccaggcccagtggctcatgcctgtaatctcagcactttgggaggccaaggcgggcagatcgcttgagcccaggagtttgagaccagcctggacaacatagtgaaactctatctctacaaaataagcaagcaaacaaacaaacaaaaaaattaaccaggcatggcggcatgtgcctatagtccccagctgctctggaggctgaggtgggtggatcgcctgagcctgggaagtttgggctgaagtgagctgtgatatacgagattctgtctcacaaagaaaataaataaataatgtaataatgacaaatttgtatttgcattgtctaattgagcctactattggccaagtgaagcttcagtttctgtaattttaaaatgaagatattagtacttgtattaggaatgctttgggctgcaaacctgcaagacat

SEQ ID NO: 115233 - DNA, 1057 bp, Homo sapiens
aaaatggaagatctggacagtcctccagatgaaatcagatatatgatcatccgtaatcctaataatggctttttggcaatggcttaccttctggacacagctgttcaccattttacacaagctgacattgataactctcaggtgtggttcatacaggatggaagcccttcttctggaatgttctactttagtgtgacagatggtgcacaccacaccctctataaactcttccacctggatgtcattcccatctccatcagcattgtgaaccttactgacctacttctcccacaaggccagacaaccatccccatcaccaatgctcacctgtcagccatgaccaatgggaggaacccccaaatcacttacatgataacatggcccctccaacatgggcacctgctgattgaaaaccaggtggtcaccaactttggacaggaagatttggattcaggaagactcttttatcacatgacaaatctcactgccacacaggaccagctacagttctcactgtttacatcagaaagcaacctgacaggacaaacactgaacatcagagtgcagcctttactgcgggttatgccaaacctgaaaattgccgacagagtggctcatcagctgagaagaagggacctagatgctaccgtgttgcaggaagtcagggaccccgaacagagggaccggctgaagccatggcagaagaacataaattgtgaagatttcatggacatttattagttccccaaattaatacttttataatttcttacacctgtctttactgcaatctctgaacataaattgtgaagatttcatggacacttatcacttccccaatcaatacccttgcaatttcctatgcctgtctttactttaatctcctaatcccatcatcttcttaagctgaggaggatgtatgtcacctcaggacccagtgatgattgcgttaactgcacagattgtttgtagagcatgtgtgtttgaacaacatgaaatctgggcaccttgaaaaaagaacaggataacagcaatgttcagggaacaagggagataa

SEQ ID NO: 115234 - DNA, 1020 bp, Homo sapiens
taacctactaagttgggagagtgttttaggcagttgatggttgagtgagctttcacacctttaactgaaagcgctaaatgttcccagccctctaccgcccttcactgggggaggcaaaaccaccatatcgtttgcaaataaaactcacgcttggccaagcacggcagctcaggcttgtaattccaatactttgggaggctgagacaggaggattgcttgaagccaggcgtttgagaccagcctagccaacgcagtaagacctctctccacttccgccccccagtctccatgaaacattttttaaaaacccaattagctgggtgtggtggggcatgtctgtagtcccagctactcgggaggcagaggcgggaggattgtttgagcccgggtgttctaggttacagtaagctatgatcatgccactgtgctccagcccgggcgatatatgggtggatacagcttctgaaagaaacctccactctctattatacttaagatcatactttggcaaaataattgtgaggaaaatacttgttatggcatagtccaaaaatactttcttatcccagaataaatttactatttttctaaaccataccatgtcagcctacccaagataagcaagcaacatctttgtccttcaccataaattatatctgcctaaatgggaaaagctaaaccacaaaaacttttgctcaaaatcttgtgtcctgaagaattaagcatgtgagtacacagagaaggtaaatcatcggattttaaaattaaataaaaacttttaacaaatttagaaaaattattgttcatttcaaagaatgtataaacaaaataaaaattaaattctataaggcactgatttcttccaagtacagcatgaagctaattgaatgattttaattccagtgcttgttgaaataatttagactcattaaaaagcaaagtgttccagtttgagatttatggtgcctggcccttttgcttttccataaagccagtaattgcatttcagccattgtactg

SEQ ID NO: 115235 - DNA, 1039 bp, Homo sapiens
aagttgatgttgctgtaacatttttattgtattttataaaattatttgtccatggtgaattaggtaacactgatcctttaccacagagcatttgaacgttcccaagcctctctggctctaacttgagtgtccccaagtctctctggcctttggttactaatgaggtcacagcacacaaagccatgtgtcactggttcttccccccatggcattcacatgtgcccttccctccccacaatgtccatgcatttgtcagggtccccaggagatgtctcacgtttgttcaagagccaccgtctgcccctagatatcagcagatgggcactccattgagcacctacagctgccatcaggccaggacccctctacccatcctccaaggggagagtgctatctcctgtgttctcggcactacacagtttgctttccctttcatgtactgggagctgagcctggggccacatagccaggcattgccttctttctctagggatcagacacctaggcctgggctgggggtaataagcctgtttcatctggggccctagtagcaaattatgtccacagatagatgcctcagggatcactagaatcttatagcccagtttcaagttagagctagccagtgccccctattacaaccaagttataaccaagtgttttccagagagttttcagggatctatacagattattttgttaactggcagcttttctgtgctttatactcatatacatgttttaatcttcacttaggttctgtgaagcccctttcatctcatgacctgaaagctgtgaccaatgatgtggacagtgcgggaaacagaactataacttttccagtggtaagttcccctagactcaggaggttggtgagactgaactctgacagcagcacagaggaagtttctgtttttacccaatatctggtgagtcctgacgtctgtgctgctgagccgggctgagcatctctgcgaggcgggcctctcatttgtctgcatcctgttaaaccaagcaggtgtgaccctttgcccaggca

SEQ ID NO: 115236 - DNA, 2210 bp, Homo sapiens
aactctcattttacttactcaaattgtcaaatttaagtaagtaatgtgctcaaatataagcttctctgagagccttttcctgaacaccactaaaatagcatcccttctctgccactttccatccctttcccagaatacctgaccttatagtatagattgaattggatatttgtttgttgtctgtctttccctatagattataagggcagaatctttgttttgttcattgttgtatccttagcacctagcagtgcttaataaaacatagtaggtgcttaataaaaatttgttgaaagaatgaaataatattgaacacctattatgtatccagttatatgttccagatgttaggaatacattagtaaacaaaacaaagagatatttgttcaatgaatgaatgtgtgaatgaatgaattaattaatataactttaattttaagagatcctgactttgaaaggccttgtcttcttcctcctgttcatcaataaatcaataggccaaatgactgctgtaaatctgctgaaggtgacccagccactctgcaagggtttgttctcccctgtcagaggagaagcaggccattccagtctgcagcaggaatgggagggagcatgagctaggagggctggatgagaaagttaaaaaagctctgttttcagttatttcaaattatcttctttgaaaatacagcaaagaaaataaaggtaaaatatcctctaaatccaaatgaagtaatttcctgactaccttcacagttaatgcaaaggatccccaaagaatcggaaaataatttactatgcgaatgctctcacctagtagttccaaacctgtagcctggattcgtggaggttagcttcattgccacaaggtcctaaatctacctacatatgtaccaaagcatagtttctagactgaatggtattttccacatacatgtttctgtttttcaaatgtgtgaagatgtgctgattaaatacaatacagttcatctgaagaggcactgaattgataggaagtttctgccaattatgtattgttagtattatataagtattgttaggtgagggcctagaaagtttttcatttttatgaaaggattatcatattttcaaaatggagatgactgctctagagacttgcacaaaagaagttttggttttctaaaactgtgaaatccacaatagaaaggaatcattgactcactaccacctgtcaggcaccacaggagatgcagttctgccatccatgtcttttcatcatctgaagtcctctgggccataggaaggaatgactccattttcgagataaactgaggcaggcggatcatgaggtcaggagatcgagaccatcctggccaacatggtaaaaccccatctgtactaaaatacaaaaaaaaaaaaaaaaaaaaattagccaggcgtggtggcggtcgcctatagtcccagctactcaggaggctgaggcaggggaatcgcttgaacccgggaggcaaaggttgcagtgagccgagattgcgccactgcactctagcctagtgagagagcaagactctgtctcaaaaaaaaaaaaaaaaaaaaaagaaaagctgaggctcagaaagattaagtttgtcagaccttaaagctgggctttctccactagctgccacccattgaagggcaaagtaggtagaagaactgaagttactattttcaatgaagggttgaaacaaaaattagcttgctggattgatttatttgtccactaccaggtcaatatttgcttttggtgagtagagaaaataatttctcctagaaaagtagcaaagagagttaaaggcaagctaaacgtgagagccaatccattacattttctaaatggatatggaggcaactaataaccctcaaagtggctgcagcccagctgcagatgaggctgttgctgaaaccagctggttctcccctggtgcatctgtccatcatcagccacaaacaaagacttgggcttaagtagtctctcttagcctttcatatttgcaaagtgctccaccattaattgaattcattattccacataacaacctaagtaggttgataaaaccaagatgtgggaggctaagtgatttacataaggtcacccttctggaaggtctatcaggaaaaatctgagattgtacagtagaaaatgcacaggtcaaccctgctgtttgtgtttccctctttatctttat

SEQ ID NO: 115237 - DNA, 1055 bp, Homo sapiens
tatactttctgagtttcctgtctcaagttctgtttagttattagatgatgccatccatcatctaattggagtaagttatttcacaaactgctctttctactgagggaaatggttctctttaactggagagatcatctattaagtcatttaggactgaatttttaaacaagttatgaaaaagcgtagaagatgataaagttcttatgcatgggtatgtgcacatggtgtttctgtgggtaagaaaaatacatataaatacaaatacagatataaatgtgaaatttgagttagtgacaaaactacttgtctttagtgttagtgaagtatcctgtggctgcatgattagagaaactcaaaacagccaaattccatcaaatgtgattcagtgtccatataaacattttaaacccatgttcaaaactgaactcctgatcttactccccaaatctactctacattcagctttccttatctcaactgatggtaaccctgtcctcgtttctgaggcccaaaccatagagtcattctcaccgcctttccttctttcacacctcgccaaattgaaatagccagaagctcggctggttttgtcttcaacagacacccagaatttggccacttcccaccacctctgcaacttctggggccactctcttctgtcatccttctctggaattattgtagtcacctcctaactggtctctctgcctctaccttgtacctcccagagtctattcctgatacagaagccaaaggattctgtgaaaacatgagtctgaccaggtcactcctcacctaaaactctgcaatgatccatcattgcactcaaggaagaaccagagtttttacagtagcgttcaagaccccgaacaatatgacaaccttcattatgtttcaactcatctccttttactcttcatcttgcttattctgctccttccaactgaccgatttcctagtctcccaacagatgaggcctgcctttgggctgtttcctctgcctgtatggtcctcccctagatatttacatattcactggctccctcttcacctcc

SEQ ID NO: 115238 - DNA, 1876 bp, Homo sapiens
ccgccaaagtgggagcccaggcagaggaggcgccaagagcgagcgagggctgtgaggactgccagcacgctgtcacctctcaatgggaccttggagggtgtctagtccacctcccaacagatgctagaagcccttccacagtattcctatagaaaggttatctagccagtgcttaaacatcttcagtgatagggaacttactacttgctgagatgagcccttccaatgtaaatacgctccaatttttagatagttatttaggctgagctgaaatctgccatttaaaaactttttctcctaggcgctggctctagtaccccagatttattctgtaccagaggtacctctggtacagaataaaacatatgcctcctagattcattcatagtatgattctcctagaatcatactattctggtacagaataaatcatacccatcctttcatgaaagctttttaagtatttgaaagaaaagatgatcagatttccttgaattttatctttcttaggttaaacatccctagctttccagcttttgcttctatgccatgggtttcctgcacgatcctggttgcccagttctagatgagtgccacattgtcactggccctgtcagcaatatcggggtaatgcccaggtatttaacacaagtatgctttaatcattggtggatttttttattcattcattttctcattcaaccaacagatgcttacatggtacgttttccatatcataccctatgatgaacataagctctcgaaagttaaaatagtccaggccctgcaatcagggagctgggtacaattgccaatttggcatccaatcagcataaaataaccaaggacaactccgggctgctgtcacgtttctttactttgggttagaatggtcttattgttagactttactttcttatcatgaatgaaagaatgatttccactactttctttttaaatgttgaaaagtaacttgcaggtccccatcatttcctttataagaccctaggaacatacactctccaggttggaaaccattaacaaccacctaccattttagagtgtctttgtctagtcagctaggaacacatgtttgatgcttcatttgcttctaagaatttcaactcatccattgatttgaatcaatttactaaacatcttgttcgagttactgtgtgcagttaccatggtcagtaaaacatatttctcgccctcaagaaatactgctgagcaatcagaggcaccaggtttaatataaggtgcactcttcttgcctctcacgtggcattttcacagtggtatggtgggaataaagattctaactgaaaagcatgaggaaaccttcacagaggaaataatgtttcagctagactttgaggagagagtgaaagagcagggagataacagaggaggaaacagagaaaagcagggcaagcaaagggaacagcatggccaagggcattctagagggatggggagttgtccaggaggtggaggagtggcagagtgtacttggagctaatctgtggaggagtcctcccctttgaccacaggagatgtaacctgaattacacgtcaagggggctagacttaaccaggggatttggggagccctggggagaatcagagaatgctgagggttggaaaagaccttagacatcagtgcttctcagcgggggtcccagggaaggtgacactttagtgacctcatgcaggtggggtcccagggaaggtgatgctttagtgacctcatgcaggtgtctttcagtcatggcttctccctcaaaggctggacaaaccatctaagaccatttcaaacctgctctgctgtgagttgaattgaatacctctctaaaaatagtttgtaaattgtagc

SEQ ID NO: 115239 - DNA, 2615 bp, Homo sapiens
caacagagggtgtggaagtagctgagagggaactacattttaagttattgatcccatctaagaaaggaaaattggtacttggcaataaagttctaaaaacaaactcaattttcagccaaaaaaatattacagactctaagataagttatgaacctcaggagaggccaagggaagactcacaggatacttttaggtttttggttgttgcaaaatacatagactcaaaagattatactttcagaatcaactttaaagcagataagacatactttattttaactaacagaggattatttgtaaaagaaggagaaggaaaattaattacaaaatcagaactatttgttcaaattttggacaatcagatcttccaatataaaatctccaagggccctcaacatgggaagctgaaactgcttaacttgtctgattctctggaaagtaatgacaatatcactatgttcacaaatcaagagagagtgagtgaacaggtgatctatgttcatgatgactctgagactgagtctgatgagttcttttttgtggccttcaccaaaggaccaggggggagcagtcagggatcttgactcacagcattcatctatggaaataaaagtcacactttccgttgggttaaagaatgatgagaaaccagtacgcatgatagataaggtctttcatgttgtgcggaatggccagcgcttattgaccctggcagatctctgttaccataaccctgacttagattttgataatgggcagttgctgtacacccagcggggcatcccaaatggggatttagtgtgagccagagaccccactcagaaactctaccagttcaggcaagaagacctgcaggaagggcacgtgcttttcaggcatcagggtgcagacttggatcgcttcgtgctgtttgtgacagatggtgtccactacacatcatctcttctcaaggccagtgtgtcagacccttatgtccagatagccaacaacacggggctgctcatacagagaggaaaggatggcagcctcacagtggccaacctaagtgtcaccacaaaccaaaatgtcagaacagaccacaagattgaattccacattgtgcagggcctaaagcatggcaggatcctggtcaatcattctgtttcccactcattttctcaggatgacttgttgatgtgtgatttataggcacgatggcagtgatgactttgatgtattcaacctgagagtgaaagttaaagccacatacttagaggtgagagtgggtgtctatgttcaagtgtgcttggaaggtcacccacatcacacgcaggttctgcacatcgagactctagtagttgaagaaagaaaaccagtaaaactgaatacaggaaggctccaggtaggtaattatcctatccacagcactaagaattctcattcttacaggtgctaataatctgtttgcttctgaaagctatttttgtgttgatttctcccctggtatcaggagtgaatttttaaaaatatagatgccattgagaagaaaacttggaaagtttcatgattttgatgctaccaattttcctacagttggaaatggaatgtaagcaatgctcaggcttattttaaagttgggctcacatgtgcatacatgtgcatcatatatatgtttagtacagtaaaaacttggactaagggagagaggtatatattatggtaaattaagagatcttttattcattatccatagcaacactgccaatatttcatttgatctgagttatatttatgatgtgctgaatgaagcacagtataaaaacttggagtaatttaacaaatgtaagaaacattcctaagataccagcaaatactatattatatagtttgtttaggtctgaatgtggccttgtttagtatcctgaaagtgatggttaaaactagcctagaccagtggaatgtcagaggtgagaccaaaaatcacctggttttctgggcctcgtactggaaacttccagcaggcacagccatgctgatcagagtttggaaggggtgttcttttttagggtaatgctgtgtagggtgtgggatgtgtaagctgcgatttataacaactggccacaaatgcaggctattctgaatctaccctcgggactgcaaacaagtttgcttttttgctagatgcagccaataaaattaagtaaaaatgaattcaaatcagaatgggttaaatacttttgaataagactttgaatagtgagtttggaataagaaccagcttttttgttctttttcaagagcttatatttaagtttcaccacaagggggcatatgcagtccaatgactatacatcagttataatcagatttgagatggagttcccggaataaaaaaatacgtattgaaagtgctgagcgagttcaaatgggggatgataactttcctctcaaggtcttacaagtttactgacccaactgctgcgtcttctaccatcttgtattccttctccttacactaccattttatttctttcacctcaaccttggagtcctgggtttttttgctgctgtgaatgacacttggttaatacattagtagctacttaggtgttgctgaccattacttttttttgtga

SEQ ID NO: 115240 - DNA, 1670 bp, Homo sapiens
ctgagctatctcttcaattaaaatttcataccagcaaaccacagggattacttttgcttgcagctgggacaaatgactattgtataatagaacttaaatcaggaaccttatgtgtatgattttaaatcttgaaaatacatataagcatataattactggagagaaaagcagttgagagagaaagagaacaaaacagctacatgtattgattgctgttatttcattagaataaaatgatgtgccatttgtataggttgggatctccttcggttttactagcatggcttaaatattccaactttaaaatttcctgagtttagtatgtaatctataagcatgggaagagttttcatgtgcaaatttctctcttctttttcttttgtgaaaggtccgattttctcaataaaacattatgaaatgaaaagtgagatgagattgattaattatgattctttttcaggtgagagtaaatttgggtacaagtgaacaaatgctcctttctgagcagagacttcatatggatgacctggtttggcatttggtggaactgtgctatgttaagcataatatttcctttgttattgacaaacgttatgagacaactggccaaatggcagctggtgggatgcataatttgaattttcaacatggaatctatgtaggaggccgcagggcactcaatgtaccttatctgtacggaaagctccccaatttttgaggatgtatgaaggatgtggtatttaaccagagggagatccttacgtcccttagatcttaccctggttttaagaaggtttatgaggtgtcactaggatgcaatgacgagttttttttgcaggggaggatgaagccatcaatttctttagctccagattctctgtcagttttccagaatggaaagtgcaagggtaaacactattggaatttactttgcaaactgtaactcagcaagccttgctttcatttcagttgggtaaggaaggagattttgttgctttgtaaatagatgaaagtctattgaaggcttatgtaggaaggcataaaagtaaaactcagctttcttcttttagttttgtcagtgacaacaagtggcatgttattcaattcaaattcacaggggagtatctggacctaacagtagatgaaaaaaaggtaaggaagtcactgcctttgcaaagcaaacatttgtatctgaaggagccctttttgtgggaggtcttgataaccaaatgtgggaagaagtaaagaggttagaacttgcctctgtgcctgggaaatttgctcgaggaacctctttcaaagggtgcttaagaagcttggaagccaattcagaaaagagagcgttaagggatgcccttgttttcaaagatattcctgttgttgtaaaactgagagtgttgataacacaaatccttccataacagcgatagaaaatctgcatcagtcagaagttttcctttccactgccgtccctgaggtcatcaagccttttcttcaagatgagagtagcgatttcttggttttgaataacttgcaggtccaagaaggtggaccttactgaaacaaaggcacatgaaactggatgtgaaatttaaggatttgggtatccatcattctcaaatactatttaaaatagagggaaggcctattcatgggttccttcaattaaa

SEQ ID NO: 115241 - DNA, 1026 bp, Homo sapiens
ataaaccaaaaatatttcatgaagcatcttctgcttcagagtccatatccagccacccagctatgaatgtatttagaaagatatttggtggaggtggaatttctaccagaggtcaagaggatttgtagggatagcctcaagaatgccagatgagtgtgtcagaaagcctgctcctacctctcgccagctgcgtgactttaggcaagtcacttaagtaccttatttcagtttcctcacctgtaaattgaacaggggttgaatggaataaaaagccctttgcaactctaaaagtcaattaacacacttactaaggtgttttaagtgaccaggaaggaaatcagaactaacctggattgttagcgaagaaaacagaagccaccaacaagcctatctgtcctttgcaattttgctccaagagcctattagcaatttgaattctgagcctctaagaaaacttatgctcaggtggcccctccaagtgttggtgccagagcactcttgccttgtatcctcacctacgccttccatgaactcatagcagtgctgtggcactgcaggggtgttttatgcattcacgttaggagcatgagcagaactgcatatgccagcaccacatgggcagcagagactccccactgccagatggatgataatggagctgcactgggaacaaccaggactgtcccagtcaacatgatacagatgaacatcctgccttaagtcactagctctctccaaagccagataaagtgggtttcttcacttacatctctctaatcttggctgccttattcaacctacagactctatgtcagtgctggattttctccccttgccctttaggtaagcagagtaggcaggaggagatttgaaagcgtgtcatacatattgccttgaaagaaaggacattcaggtgtcccttcggggttctgtaacaattaggctatgtgtgctgagagagggagcggagtcatttgctgatgtgctgctacctgtaactcaaatgcctcataggaataccagcgg

SEQ ID NO: 115242 - DNA, 1037 bp, Homo sapiens
acccgggctccggttgcccaggtaacgcaggacgcaggcgcgaaaggcgggtgcctggcgcgcgctgcagctccccctccccccggcgggccgcggaggcgacgcgctgcctgcgccctgaggcgagtggttctccagccggaaaatcgcggctccggtgccgctctgggctcagccagtgagaggccgggggtgtggtagagagaaggagccggccgggtacttaggaccgcgccagcctctgagcccggcctccttcgcactttcgagtgcgcgtttgctgcccgccgcagcccgggcgttgaaggtagtaaagcggccacccggccgcatcatggtgaccccctgtcccaccagcccctcgagccccgccgcccgagcggggaggcgggacaacgaccagaaccttcgcgccccggtgaagaagagcaggcgtccgcgcctccggaggaagcagccgctgcatcccctgaacccgtgcccgctcccgggagactccggcatttgcgacctgttcgagtcccccagctccggctcagacggcgcagagagcccctctgcggcgcggggtggtagccccctgcccggcccggcccagcccgtggcgcagctagatctacagaccttccgcgactacggccagagctgctacgccttccgcaaggcgcaggagagccacttccacccgcgggaggcgctggcacggcagccacaagtgaggtgctggtagagccagctccacgccgccgctcttcctctcctcccaggctctctcctctcctgccggctcggccctccgagcgcccgggcccgcgacagcccaggtcccgccccgagtcgaagcacaaggggccgtggaggggcgtcaccggcctcattttacagatggagaaaagtggggcgtagacggcttgagggacttgccccgtcccaagctggctactggggcacggtagagaggaattcgtttccgggttgagtctggactcctaccgaactcgggcaagttatttaacacccctgagcttctttcttca

SEQ ID NO: 115243 - DNA, 2781 bp, Homo sapiens
gagactccgtctcaaaaaaaagaaaaggaaaaaaaaaaaaagttgaaaggagagaatctacatttctcaactctgaaatgtggttatttaattacgaaaaatttcaaacacacatcaaattatatggacataatgaactttcacccatttcccactttcataattaccaacctgtggtcaatctacttgtactccttttattctactatctgccccctagattttgaagcatatccaaggtatcagatttttttaaaacattatcacacctaaaaatactcaattccttaataccatcaaagatacagacagtgtttaagtatcctcagttacctcattactggctttttttttttttttacagctagttcaaaggatgatccaaacaaggcccacactttaaatttggttcatatgttttttaataaagtctcttaacctatagttaccactttctcagttttttcctatttgccatttattttttgaagaaaccagatacattgtcctgtagagtttcctgcattctggatatggctgattgtatccttgcggtattatttaacatattcttctgtgtcctgtatttcttataaaggggtggtatattgagagtttaatccaattcaggttcatctttgttttttttttttcttttttctttttttcagagtcatctccctttttgtaacattaagatatatcaatggggtcagctaggttcatccattacaaaattccccactggcttttcatgtaatgctgttagcagccattgataacactcagacctattgtttcattagagtctggatatggttgattgtatccttgtggtattatttaacatattcttctatgtcctgtatttcttataaatgggtgttatattgagagagtaatccaattcagcttcatctttgtttttttttttttcttttttctttttttcagagtcatctccctttttgtaacattaagatatatcaatggggccagctagattcatccattacaaaatttcccactggcttttcatgcaatgcttttagcagccattgataacactcggacctattgtttcattagggttgcaaatgatggtattataattctacttgttagctagaattatttcatgaagaattactttttccttatcaatatttgaataccctgaggtacagtctatacaagaaaattaggataaatgcttgtttccttctacctagcagttttcataatgagttgattcctaagcatctccacaagtaatcagtgaatcttgtttttttaaaaaattgttatgaacttaatgatttaaatatatttgatgtgttttagttctctacagatgttaattttttaatactcaaattgtcccctctttgggaagtgagagcccctttgggttggctgctgagtccttttcatataatcttagcaatctttgatggcttccttgcttttcgtacggaagacttctctagtgtattttatgctccaggcttggaatcagtcatgtttccaaagagctctgattccttttcaggaaattctattatatgtccctaaatattggccagctatttagctacagcctgggatggctagttatgaaaaggcattcaaagcatcatacttagtggctggttgtgatcaactttatcagtctgttcttaggaacggaaaccagatggtttagcccattactcaggttgccattcaggagtagatttatttctgggaagagagagagtagaagtgtagttaaaatgtaaagacaggtgaatgtgaaaagcagggctcccccacaaatactgtctttttgtttttttattgatacttatttaaaaggaagtgatgtttaatacgatatgctataaaagttttttttttaaatagatggggtctcactgtgttggccaggctggttttgaattcctggtctcaagcgatcctcccatctcagtctcccaaagtgctaggattacaggtgtgagccacctcacttggcccagatatgctataaaagtattcagaaaataatgtatctctcacataattcccctttatatactcatattttaaaaagtaaaaaggtttttttcccatatttgacacactgcttttttgtgattaaaaaaaactgctaggatgacagcagagacttctctaagtggaatgaactttgtccttctcgaagcacatgaagggctaaattgaagaaatagccccctctggccaactgactgggaacatgtagaaatcccagtcagctggcccagagggggctatttcttcaatttagccccttttcctttatcttcaaattgctttccaccccttcttctgtgagccttttcttcacctccctgagactacaaagttttagatgtcttcaccaaccctgtggtgttatggcagctgtctgtttggtcttttctctcctagaatcaaagtcccttaagccccaaacttaaaacataaaggatatcctaaaggtaaacatcaccttttaattgcttgtatcctgtgtactttgaaaaatgcccacccttcctgtgctagttttgctgatcagcacatattaaacatagaaaaacattttaggcaacaattttagattaaatgaagttgccattaataaattctttcaaagttctttaagaaattaagatgagatttccagaaacaaataaagaaggtacttgcaatctaggatcaagatttctgtcaattctttctcaatgctgaccatcctcattgagtaaaaatctc

SEQ ID NO: 115244 - DNA, 1054 bp, Homo sapiens
aatttttgtgactgaaattgaaattcagtttttaaatttcatcagctcaaactaaagaaatttaaataatgatacattcatgaaagtagtctaaatgttttaagctttttgtttattttcagattgttttagcaaccaatattgcagagacgggtatcactattcctgatgttgtatttgtaattgatactggaagaacaaaagaaaataagtaagtttaaatttcccaaatcaaaacatttttaacctggaaagaggttggggctcttgaattcttgggagaaatcctaaaattatttagggaaaatcctaaatgtcctagttctgtccaaagcaaaagccttagagaaactataggaaactttaaaatatctgagagtaaatgtcagaatttcatttcatgggttttcccataagtaataccagtatactgctacttttagaaaagtgctgagaaaaattttcagaacataaatttttatagatattttatttgtaaaataaattgtttaacaaaaagcattctttgtgattatttaaaaaagaaacatggcttttggagtaagagctgaatttaaatctcttgagcaagtaatgtaacatataacctctctaatcagtttcttcatttgtaaatgggtaaaatgaaaatttcttttattttatttttgagacggagtcttgctgtgatacccaggctagagtgcagtggcacagtctcactgcagcctccacctccctggttcaagcagttcccctgcctcagccttctgagtagctgggattacaggcacatgccaccacactcggctaatgtttttgtatttttagtagagacagggtttcactatgttggccaggctggtctcgaactcctgacctcaggcaatctgcctgcctcggccttccaaagtgctgggattacaggcgtgagccacctcgcccagccaaaatgaaaatttcataactgaaagtgcctagttcagtaactggaacctaataggtaactgtaactgaattttcaacaaaaagattactactgtataaataatgt

SEQ ID NO: 115245 - DNA, 1107 bp, Homo sapiens
gaatttgcatcatacacatacatatattaaagtaataataatttgagtcaaattatattttaagatgaatatagctatccttttaagtgctaatctattgaatttccatattgaatagttagtgaaaataacatacctctgtttttcctttagtcagttcatcagttacttcctcccacttaccgagatgtttggctggagtggagtgatgcagaaaagaaaagggaagaattaaataaaatggaaaccaataaaccacgtgatctttttattgccaaacttctgaataaactgaaacagcagcaacagcagcaacaacagcattctgaaaataagagagaaaactctgaagatcccgaggaatcttgggaaaatttagtttcggatgaggatttttctgcactgtccttggaatcagcaaatgtggaagatttggaacctgttagaaacctctttagaaagttgcaaagcacacctaagtatcagaaacttctaaaggaaagacaacagctacctgtatttaaacatcgggactcaattgttgaaactcttaaaaggcatcgggtagtggttgtggcaggtgaaacagggagtggtaaaagtactcaggtaccacattttctattggaagatttgcttctaaatgagtgggaagcaagtaaatgtaacattgtctgtacccaaccccgaagaatctcagcagttagtttagccaacagagtatgtgatgaattgggctgtgaaaatggacctggaggaagggtaagctgtcattcaactccacctcagtgaatgatggtgacattactcacctttgcttttgtgatccaaatggaatgtgtaccatatgtgagttttcactgctattggttgatcagtagcacatttcaggcacttttcacattttctttgatagatgtgatagtatgccactgtcctatgagaaggattatcagtagagttctgtcattaaaattctcatataaaagaaaaaatatattaactataataattgaatattcaaatatgttacacactaaattgaacagccaaagaatgtggacaaactcaaattctactaaaatatatctcaagtttttgcaaacc

SEQ ID NO: 115246 - DNA, 1035 bp, Homo sapiens
tgtggaaggcagtatttaattatggttcaattttctctttattgactgtttcttctgattaatcctttctcattattcctaatttggcttcctttcaaccctaaacatagtttgatctttcgttcctcttaggccagaagtctgaaagagagagtatgatgatccgacttttggagctatgctaatttagctatgctaaaaacagttgttagtgtggttgaattaaggagaatttttgttttgagacagcatcttgttatgttgcccaggctggagtgtggtggcagagtcatagctcactgaagcctcaagtgatcctcctgcctcagcctcccgaatagctgggactacaggcatgtgccaccacatccagctaattttttttaaaaaagttgtatagagacagggtctcactatatttcccaggctgaaaattttttaagtttgttttcctttaatgttatattgtctcgctcaacttaaaaaaattatgtagacattgcttccatttttcaattttaggttatattaacaatacacttccagtttcaggaaagattaaaataaagtgctactgaaggaagctctttaagagaacataatgctcttttttaaaattttggattgtcagtgtttcctttttacagtaaatgtgtttctttcttcgtaggaaattagaaccattgaaaattttagacactgattaagtggaactctggacagtagttcttttcctatttctgccagtaaaagttcttaatgtctttatttcccttattttgcaaaataaggcactatgaactatttgcttgataaaaatggctatcaatgtcagagagagaattgtggattctttatagcacagaattgagataacttagattctatccagtatagttaatttaaaatactttaacctgtaacattatacaactgccagaatctcaaaagaactgctttgtggttcattaacattttatatagtgccactgcaggaataagtaatagacatttgttcagtagttcaacatattc

SEQ ID NO: 115247 - DNA, 1615 bp, Homo sapiens
tagtagcattcgaggtggtttggaatattgagtgatgtttagagcaatttggaaagggtagggaggccattatggtagctattgcacttgctcaggtgtgagataataaaggttcatatcggtaattggaaaggaagagagacatttgtaaagcaagaatcagtagaaattggtgatttacggaatataaaggctaaggaagatttcttcagagaagatacacaaatcaccagtaagtgtatgaagaaatgctcaacattactaatcattagggaaatgcaaatcaaaaccacaatggcataccatttcacacccgttaggatgtcagctgtcaaaaaaaactggaaataataaatgttgacagggatgtagagaaattggaaccctgtgtactgttggtgggaatgtaaaatggtgcagccactgtggaaaacagtttggtagttcctcaaaaaattaaaaattgaattaccatatgatccagtaattccatttctgggtatatactcaaaagaattgaaagcagagtcttggaggagatatttgtacactgtgttcatagcagcattattcacaatagctaaaacgtggaagcaatccagtacctaccaataagatgaatgaataggtaaaatgtggcatgcacatcaaactgaatagtattcagccttaaaaaagaaggaagttctggtacatgctacaacacggatggacctcgaccgacattatgctaagtgaaatatgccaatcacaaaaagacagataccatatgatttcacttatatgaggttcctaagtcaaattcatagagacaaagtagaatggtggttgccaggggctagtgggggatgggagaatgggtagttatgcttaatgggaatagagtttcatgtttgccagataaaaagcgttctggaaatggatggtggtgctggttgtacaacattatgaatgtatttaataccactgaactgtacacttaaaaatggttaagatgacaaattttatgggggaaaaatgtgccaaagatggcaagaggtgcataagtggagggatggtggtatcattgccaagtacaggaaagatggaaaggataagtattatttgggtgaatttgaggtggtagctaaccctcctgtctgttacactgtattgatatttgtctttacacaaaatggtaccaaaattcggctagatatgcttgcttaattgtctctttttccttcttttaacagttgtgtttccttctgcagtccatagttttatgcttctaatctgctgtcacttattaacctaagggggagaaaaacagtaatttgagtttaactttaaactcttcctagtttttgctcaggagtcaagtcatgtccttgagggttatgacatccgttttcctcaaaagccatttttttcctgtcttccataagataagagatatgtgaagttaactttcagatgagtattattattactgcatgaataatcctttaaatacacatacttatgaaacaatttttttttgagacagagtcttgctttgtcacccaggctggagtgcagtggtacgatctcagctcactgcagcctctgcctcccaggttccagtgattctcct

SEQ ID NO: 115248 - DNA, 1056 bp, Homo sapiens
agaagatccttcgcggcccaggccccgacggtaccactgcacagccgagagctcttcacattccccggctccggggctgccaccctgcgcttcgatccgggcttctcgggccggggcgaccgctgcctcgcaattggtcgaattcagcaggctccgcctccttgagtcgccagctgcctgccacacgccaggcgccacgcgccgccctcgctctttatccactgagcagcttatccactttaggtcggaaaggaaaggaaagaaaagcaggaaaaaaaaaaaaagtcaggggaacatttttgtcggctgcgcgactcgactacttttgtctcctgcgggccactgttgagccttcacgagacgtcactgtcttcggtcgcggggcatcgtgggtaggagggagatttgctctcactgctcccaaaaatggcggacgcattcggagatgagctgttcagcgtgttcgagggcgactcgaccactgcggcgggaaccaaaaaagacaaggaaaaggacaaggggaaatggaaggggcctccagggtctgcagacaaggcagggtaaggaagaagttccagttgttgcttttattttttttctcggtggggaggaagaaaacactactctcttaggaagagcacgagaaagtgaagtgtacattgagtggcgttggaagtgaaggggttccagaaaaaagttggagagggtggaagaatgttggttcgtggaaggggggtcttggcgtttcctggtgtctgcaggcagcgtgatcttctgcttcaattcccttacgtcgatgttactgattctgtccccatcttcgcggttgtctcctgcatcagcacaacacctggcacatagtcgttaataaacaaaacgaatgattagttgagtaaaaggtgaaaaggtttagaaaaaatgatatgaattgatttggaggggaaagggcagataataacatgagaagggagagacatttaatctccaagatgtagtagttttctcttccgtaaaatggagataatagtgcctaccactggtggatatgaggattca

SEQ ID NO: 115249 - DNA, 1056 bp, Homo sapiens
gagccaccgtgcccggctccaaacgtcatttattgtcactacttttgaccagcaaatctaatcacaaaaaattttcttccaaatagtagtatcatgcctttagagaaagcattaaatgtttgttaaaggtaactcatgttaatgtctaatgatgttttaatttacagttttaaagaaaatatatttaatagttatgttaatgtgaattttaagataattttaaaccgtcaaagaaaaatgaaatacaaatgcagtaaagtattcagttttactagttataaagttaaggtattccgggcttcagccagttgttgtttgtaacattcatctatttaaaacatgactttctgttaatggtatagagcagtattttatgatgttgcccttaaagtaaaagtggatactgcagaattcattccaaactatttacttttcaggaaacgttttgatggtaaattacaatcagaatcaactaataatggaaaaaataagagagatgtagatttcgaaggtacagatgaacccatttttggaaagaagcccaggatagaagagtcaataactgaagacttaaggtaatatttccaaagtcctaaatgttagtaactcataattcaggtggttacatgaggttttaaaaattgtctccatgttgctacttagatatatgcccgtattagagaaatgaagatattctttctatttttacacaggcatgtaaatgtagaacacttacctaagtttggggagttggaaagcaatatggaaaatactcatcttttaatactttagaatccagttttgagaaaaaagtcttaaaacctgattaaaaaaaatacgttttctttatttgtaatgcctcaggaggaggataactggaagagtggaataaaaggaaaaaataaagctaactcagtggaaggaataagtgggaaggaacattagagcgaattagattttcattgttgcatgtggagtagagtggctgtgcatctcaagactcctgctatgggtatctgtggctggaatcgctggtatttatctgattttggaagc

SEQ ID NO: 115250 - DNA, 1047 bp, Homo sapiens
atggctgcatagtattccatggtgtatatgtgccacattttctttatccagtctatcactgatggacatttgggttggttccaagtctttgctattgtgaatagtgctgcaatgaatatacgtatgcatgtgtctttgtagtagaaagatttataatcctttgggtatatacccagtaatgggatcctgggtcaaatggtatttctagttgtagatccttgaggaatcgccacactgcacaaagactttattaatttccttttcccttaactatttctagagtctctttttttctaattgccattccctgtcagcatatgagcattcaaaagtttctctttctgttctatgttgttttctacccactgtgttgttattcttctgttttgtagtagtttcgactttaaaaagtacacagtttcctcagggagataaacatcagctttcaattattacccttagacaaatgcgagtagatgtaatttctgagtgttgaaactagctttttgccttgttcttaaagacagttatttgatttacagtgtctgagacagctaaagttcatcactctagttcatcagttttattttccaaaccatcattcattatggaatgctaaatacatcagttctcaaatagttggtgaggtttttttttcttttttactttgttgtcaggttgcacttcctgcagaagaggattatttaccacttaaaccacgagttggaaaagctgctaaggtctgtactttgggtaatacagtttatatagtttcgtgagactctctttttcttaaaattcttatttcaaatgagatttttatatttcccacaacatgtatatgtatgtatcaagaacaagccaactaaagacaaatataatgagaactgaatcagttaacaactatgctggaaaccagccattacatgatgagattttaaaatattaaaattatgattctcaaccttttaaaagaatgtaatgaaagttatcaacctttctccagaaaaaaatacatgtgtactagtttttgcctatagttttagg

SEQ ID NO: 115251 - DNA, 1846 bp, Homo sapiens
tttgagacacagtctcactctgtcacccaggctggagtacaatgacgtgatgttggctcactgcagcctccacctcctggattcaagcagttctccttcttcagcctgccaagtagctgggattacaaatgtacaccaccatacctgactaatttttgtatttttagtagagacagggtttccccattttggccaaggctggtctcgaactcttggcgtcatgtgatccacccacctcagcctccctaaatgctaggattataggtgtgagccactgcgcccggcctaatctgtagactttccatttgattatgttgttaatagttttggttcctttttgagacagtcagtttcttgtgactgcttcttttttcctacatatggtcatactttcctgtttgtttttatatcttgcaatttttttcttgaaaagtttagataatgtatgtagcatttctgtattttctttttgtgtatgtttcttgtaattcatatttgatgtttggacaacttctgattttttaaaaattgcttatttcactggctgggatgaatgttatttttatttccccaaatacattataataagcctattctgggcaggagctgaatcttaaataaggaggatctactacaatgttaagtttaatgctatctgtctatatttaaagaaaaacaaaactgctctattgtgttctgttaatagctatgaaagaaattttccataatcagaacctaccataattttcagaggactgacttgttaactgttacatgtgggaaaagaatacatatagattaacttatttgtgaaacttgaggaggaaacacttcattttccaggggctataagcacttgatcatctgtatatgtgtgaactcacagacagaggctctgaattttggaagcccgtcttagaaccaaaggtgttttccttgcaagaaataggtaactgttagtaatctattgctattagtgactaagttgcattaactctgagtgaccggagttaaaatgattttagatcactctatttcatatttattataattattagtataatagatatggtgttactgttcttcagagtccattcaagataaataattagggaaaatttggacacaatttaaatattaacagaatttttaaagtcataatttaaaggaaaagttgtatgattatttgttttcacatttgtaggtatgccattgcattggccttaagggaaaagcagcgtgtaatatttaccagcccaattaaggctctgagtaaccaaaaataccgtgaaatgtatgaagaatttcaagatgttggtttgatgactggtgatgttactattaatcctacggcatcttgtcttgttatgaccacagaggtaattcatgtagtgcctcatctgacttttcgtttttaattaaattaatgtgactattcagttagaacctgggaagttttattggttgctctacttaggtaaagtatagtactttattttctgattagacttaggcaaaatggataacatttatcttaaagtgttctgataatattacatttctaaattaccatactttattatttgtctcagatacatttttttcttcaggtatttttaaagtttatttctgtcagtgacatgaaaatattttactggttttatgtacatagttttaagcatttgaatatatagtaatagtgactcttcatttcatgtgactttgccgtcttctatatctgagtgttgatacaagtagatgagtaactgatttttatttatttatttattttttgagatggagtctcgttctgtctcgcaggctggagtgcagtggtgcaacctct

SEQ ID NO: 115252 - DNA, 1177 bp, Homo sapiens
tgccaggaagtatccatgttgcaagaaaacgaggcagaaaaaatgggcaaacagtcagggatgatccagtgttttgaatagaggataatttaagttgtacttatattttagaaagtatgaatcttgggacggtgctgtgtatagaaggaagttgcatcatgttctagacatatggagagtaggggtgataattctctctgtggattgtatctgattagtaactgtttagaagccatttactttgctttttatgagaaaaggaatatacaatataatatacaacaatgtaatattgaatattacttttgttaatatttgttaaatagtaagttctgtaaccccttaaaattattttaatatttccatttaataaagaatatccaaaattccttgttggaaaaaacaacttttctctaactattagctgttatgtcagaatccaactaaatacattttttacttttttctttagattttgagaagtatgctttacagaggttccgaagttatgagagaagttgcttgggttatatttgatgaaattcattatatgagagattcaggtatattcagtgttgaaatgtatatcatgtatttcccttcagaatgacattaggaattttgagcaagttattgttaaactttgcttctagtttttgtgtggctagggttctaataaactgttgtttctttatttttatttacctatttatttttgaaacagagtttcactctgttgcctaggttgaagtgcatgatcctaggtaggatcctaggtaggatcatggttcgctgcagccttgatctccatctcagtcccccaagtagctggaactacagacgtgtaccaccatgtctggctaatttttatttattttattagtagagatggcgtctcacaacgttgagcaggcaggtcttgaactcctggactcaagtgatcctcccaccttggcctcccaaagtgctgggattacaggcgtgaaccgcacccagccttgcttctttaaatagtggacaacatgatattatttttccattaagatttcattcaagtacagctctttaatagtaacttttgctgggtgagaaatgcaaattcaaataaagcaaaagaaattaaaagatggcgtgcttctaatagctcaccagtagaactaatgttacagaatttcta

SEQ ID NO: 115253 - DNA, 1233 bp, Homo sapiens
taactataaagcttcagagaatataattttagatattatcacagagtgacactgtagtccaactatagtccaaagtatatatttatttttttcagaacgtggtgtagtatgggaagaaactattattttgcttcctgataacgtccactatgtctttctttcggctactattccaaatgcccgacagtttgctgaatggatttgccatttacataaacaggtattttttcctccttttttgatgtcttcaatattcaaaatgttacagattagtcttgctttactctccctttgcttttctcctgatgttgtccagaataataaaaaaaacattttaatggtaaactgcttctcaaatcaagcagcttatcaaaatcaactgactgactttttagaaatgttgatttctgagccccatctcaaacccactatatctaaatctcaggtaatagtgccttgggaactccaattttaaaaattccccaagttgatctgatgatctgccaggtttagaaactactgcatttactcaaatagttatccatgagtacacagaatttcccctaatgccttggtgccaggaaaagctgggcatctctggagcatttgatttgatttttctcatgtaaacacagactttttactgactttctgttattgcctttctagtctgactttagcgtctgtatatgcttgtaataggcatttgtttatgtatactgaatttattcttgcttttatttttctgcccttaattttcctttacactgatgttctcatgaacttatctgtttataagctccctgatcgtgtttttatggcattctcccatattgcttctgtaggatagaaaaatccaatggatcttggggagaagctagatcaagtgctgctttatactaaggttttgaaaagcctgggtggggcagaaaagttccattttacttcatggatcctttgtatcaccgtatacctcctctatagaaaaataagcatctttccgtaattacagcattccagggctaggtaatgggtagttgatgctcaggtcatgtatttagccctggttagggaattggtaagttgggaagatggtagtataatttcatagacctaatttttctacgtttttctcttgcctgggttttagtgaattttttgaagtgttttctttttgaaatgttgaattcattacttgattttcttaagatcttttaggttggactaagatac

SEQ ID NO: 115254 - DNA, 1357 bp, Homo sapiens
aattttaatactgcaatgcaagtgcttcgagatgcaggtgatttggccaaaggagaccagaaagggcggaaaggaggaacaaaaggtaatttggaactttgctttgagagaattttacatgtaaattgtatattcagattactctgatattttttgtcttagtttttttttctcaagctatgtaaaggtctagacgatatgtgataaaattggataaatatttatcttttttgtatgacattaagtataatttacatactataaaattcactcatctaagtatacaattcagtagtctttagtatatttacagaattgtgcagccatcaccactgtctagttccaaaatattttcatgaacccaaaaagaaaccctgtacacattaacagttattctcccttttcccccaacctttcccttctcatcccgcagacttagttaatcattagcctgttttcgatctctgtggctttcccttgtctgtgcatttcatgtttggagcaactggcttctttcacttaatgtaatgttttcaaggttcgttacttttaattttttttttttttttttttgagacagtgtctcgctctgtcacccaggctggagtacactggtgctgtcttggctcattgcaactttctgcctcctgggttcaagtgattctcctgcctcagcctcccaagtagctgggattataggcacctgccaccatgcctggataatttttgtatttttagtagagacggggtttcactgtgttggctaggcagatctcaaactcctgacctgaagtgatatgcccatcgtggcctcccaagtgatgggattacaggtgtgagccactgtgcccggctattttgttcattttatgctatatgtactcattccttttcatggttaaataacattccattgtatggatataccacattttgtttctccattcatcattggatggacttttgggtttttctggtttttgactgttaggaatgctgttgtaaacattgatgcatgtactatttaatacaagtttttgtgtgaataggtgttttcctctggatatgtacctaggagtggaattgctgcaccatgtggaaagtctatgtttcaccttttgagaaactgccaaagtattttccaaagtggctataccattttacatttccttccaggaatgtgtgagggttccattttctctatatcctttgtatcaccgtactcctcctccatagaaacagaggcatctttctgtaattacagcatccctgggctaggtaatgggtaaatgaaacagattatgtattttgccctgatttcccatttggaaagatggtggtataatttgatggatct

SEQ ID NO: 115255 - DNA, 1478 bp, Homo sapiens
catactctcctttacagatgaatgccttgatttgtaagggattttccataagactgtgataacatgtttcttgctatttgaaaagggtatttaatgtataaacttttttgtagtttttcttcctggctgaattattagtatctaagggctgagccatgtttttatacatctttgttatagcgcacttctagtagtaagtatttaatggcgtttgatagattgttgaaagaattcttcaataattggtttatttttagattaagtacatattcatgttaaatatgtgttacagtgatttattttttgggggtttgagttgccagtatcttttaagtttattttctacaggcaaaaactctgcccctataatgtgtaattgttttttgaggagatgaagtgatgctggaaaatttaagacagcaaagcatttgtaaagtatacttactatatgcctttcctatgagcttggccagaattatattgaatttaataatccgtgagaatataggtttgagttttgcttttattctggaaagattttattaagtttctttaaagagaaagcattctttactgtttttcttaatttagtttaacattttaaaaatccttttctcacatcattataaaatcagtgttattccaaaatcacaggtagaacatgtacttcctcttttgaagaggggaattggtattcaccatggtggtttacttcctattttgaaagaaactatagaaattctcttttctgaaggattgataaaggtatggttttatttttattttttatgcccccatatcatgttgtatgaagagtttgaaaatgagagaacattgtttataggcaatatgtgtgtttttaacaaggcttaatgaaatgacttaaataatgaacttaatttttatatatgatgttatacttaaataaatcttgaagtgtaggtaaaaaaaaaacatttgtttcctttcttcaagaatgtagtggtggcagggtacagtggctcacacctgtaatcccagcactttggtaggctgaggtaggtggattacctgaggtcgggagttcgagaccagcctgaccaacatggagaaaccccatctctgctaaaaatacaaaattagccagtcgtggtggcaagcacctgcagtcccagctactagggaagctgaggcaggagaatcacttgaacccaggaggtggaggttgcagtgagcggagatcacaccattgtactccagcctggacaacaagagcaaaactctcaaaaacaagaacaaaaccaaagaatgtagtggtaacactattggataccacagaatgttgcagaaggtgtatttaattactaaacccggggttgtaaacttctttctgcatacagaataaaaggattagtttagagaagacaaggaaattgctggttagacttaggaaagagagtttttttaatattctaatttaaaccaaagagcatctgatt

SEQ ID NO: 115256 - DNA, 1380 bp, Homo sapiens
tcgggagatcaagattttgctgttttccagaatatccagctcaaaggtattttttactgccagtgaattagccaatatttcccagaagctgtcatatatttgtaagcataattaacagtaattggcttatgtggaaagccaaaatttttaaaagcctaaattttaggctttaaatttagattaaaagcataaattttcgatccaaaatgataataagtctaaaatttagttttgttatgtcagtgtgatgtcggtttgaaacattattctcacatgttttgcatttttgtgctttgactttaactcttctcaaacttcatgttgtttttaatcatgtttcctttcttagggtttataacttgttataaattttataaaaagagaaattttaagaatatgttttttaccagtttttttcctaaactctgaattttaactatgttcattcagatttcttctggtgaatacattcagatgtctggtcgtgctggaaggagaggaatggatgatagaggaattgtaattcttatggtagatgaaaagatgagcccaacaattggaaaacaattacttaaggtaactacattaagattgtgtacctttaccaagaattccagaaatatacttcaggagccatttcagaattggttgtgtcagtcagacacctaagtgaaatgagttaatatactgaaactatctgggcttgggaagatggaagggtgtgattactcaaaatactaacatcttgtatcctacttcacctaataggtggagagcaactcatgtaatggatagggtgtgaagatctccagagagggcagaaatgtttactttgtcctccaaatttaagaaatctctttatttgacccatccactgcacaagttgttctttacctggtagaacaggaagttctgttctactgataatcaagtgttttgggcaggcaatgagcttcctctacctttgcaagcgcagatagcttaataggttaattcagcaatctgcgtttacactttaccctattgattataaatatcccaatcaaaaaggacacattttaagctttattgcagattagacttttattttgcttgcttagtatttgtgcttcggatggtctaggattttgttttgaagagcttctcaaggaagattggcctggttgccttttttcttcttatccatatagagaaaagtgttaataagataggaaactttaattaaaaacacaaaattaattgccagcttattagctacttaaaagtagctacttcaaaacatgttaagacacacttaggtcagtatctatgaaacagattgtgtgtctaactttttagacttgggaactttgtggagaatttgagatatagtcataatga

SEQ ID NO: 115257 - DNA, 1286 bp, Homo sapiens
attttcacttttttaataggaactgtcctgggtggagtccacatagtcaagtctttgctgtataactttccttttgtatattttatgcaaaacagattatttaaatattttatttaaaaatgcggcattctgtactgaaaaaatatcttctgttattgcttcaaagatgctactcaaacatacattatcatagtgcagaagttgtgagatcttagtagttgttagatcttcagaattatagttttattacagaatattaaagactaaaagacaataaaaattggaaccacattatagaaatgctagcataataagcaataaaataatctattctcaatctattatgttagagtgatttgaagatgcaaattaattttctgacactgaaaattttagtttcttaacattattagaaacattctgtgacacacttgacagtgcttgtactattaaattagaatttataaatataaagttatttctgtgttttctcatccaatggaacatgttgaatccagagagacagttttcatttcataaaataagtatgtattacacagtttgtgtcagtcataatgctaaatgctgagaaaatagttcctatacagatggaacttaaaatttatgggccagtttcttaagaatgaatgaacatcttctgttttgttttttagcctaactctggtgaactggatcctttgtatgtagtagaagtacttctgcgctgtagcaaagagagcttgaaaaattcagctacagaagctgcaaaaccagctaaacctgatgagaaaggagagatgcaggtttgtacataactttctgtcttctgatttcagatattctgtaacttatttgtcatcaccaaagttctccaatgtgatggtaatgaacatactatcatgatttctaaattagaagttttcaaggtattttaaggtatattagtaaagctatctaacgtatcagtaggataattaatgagatttgtttttatttttcttttatcaaattacaacaagataaatcgtgacaaagtgaaagaaaaagtattcagtcattgaaattttacatgaagctggattttgccagggccataaagatttttcattatccttgcttgtgactgagtgattttacagtttgaatccattcatgctgtttatttcccattcccatggaaatagaggcagtcctgatttaggatttttagactttacagtagtgcaaaagtaatacattaatgagatatttaacatttattacaaaatagggtttgtgttagatga

SEQ ID NO: 115258 - DNA, 1016 bp, Homo sapiens
tctttgaaatacttcttcatttctgcccatccagaacttacatgaatctttcttgacttcctaaacctgttaacaagagtctttcattcttagtactatagtacctttatgtattaatatttttgaactgccaaatatctgagaccataaaaatgagtaaagtgtgcattctgtattgaggggagctcttatttttatgtaccatttatttacctgttatttagaagtttgaactggtttttattttttaaatacagtctctaataagaaaagcttcagtgtgggagaatgcttcacggtgattattatgtacttcttatacctgttacataccataaatgcaacttcctctttagggatccaagtttaggaaatagtagaatatgaacatgtgcaaatttaactgtaatactgtataactttttggtcataggttgtcccagttttggtgcatctcctgtctgctatcagcagtgttaggctttacattcctaaagaccttcggccggtggacaatagacagagtgttttaaaatcaatacaggtatgtgttaatttcataagttaagtataaattttatgtaaatacaggtagtgtttataaagaggcaactgaaatgcttttaaatatattgctttctttcagaatacctataaatactaccaatagtgacaattatttttcataaaaataaaggcagcagaccttcatgtggatttgtactctctttgaatctaccaacaaagtgagttagtaaaggaggactcacaaggaaaaccattctgctttattcattatgagtgaaagctatagactgtattacaagttttatgtataaaatcatgtactgacaggacatttaaccattttttaatatagttaataaatacatgaaattgttttattttcaatagggaaaattgagattttgtagtaaatttaatttcctagtagaaaaaaggtgcagtggttcatgcctgtaatcccagctctctgggatgccacagcacaaagg

SEQ ID NO: 115259 - DNA, 1010 bp, Homo sapiens
accgcgcctggccctcaggactttttaaaaagtctatactttacaagtcagtagtgccctccctaggcatcaacaccaaggaaataatctgaaaacagtttaaacatagatgctcaatacaagattacttttgatggcaagaagttacaacaatgtaaatatacaataatgaatttagcaataagttgtgccacgttcaggactatgatcaaattgtgacttgtagatttattaacaaatcataatacatctgtaaatcatagtatagcgttgaaaaagagttttcaaaaataaatgcaatggaaaaatgccctataatttaaattggcaaaagacaaaattatatatgtagtatactttttatgtccatgtgcatagaaaaaaagggaaacactgatttggtttggtcttactaattttgactataagatgaaaatgaattttacatatttttttcaggaagttcagaaacgttttcctgacggcatccccttattagaccctattgatgatatgggcattcaagatcaagggctgaaaaaagtcattcagaaagtagaagcttttgagcatcgaatgtattctcatccacttcacaatgatccaaatttggaaactgtgtatacgctttgtgaaaaaaaagcacaggtatggcagaaatttggtttttatagtagaattctatatgtttcactgaataaatatgtgtttgtcattttcttatcctgttggtttaattggctaaaacaggaaaatgtgagctatcttttaaataaactgtcagctctgaacctgtcagctctcatcagcaagacaagataaagttcattttgctatagtttgatatttcacataggatgttctgttttttcttcttttttaaatttgagatataatttacacagcatagcattcacccttttaaaatgtccaactcactggtttttagtgtattcacagatacttgcaaccatcaccactatgtaacttcagaacattcttctcaccct

SEQ ID NO: 115260 - DNA, 1004 bp, Homo sapiens
atttaaattttttagtagccacattttaaaaaagaaagaaaaaaccagtggcattaacttcagtaatatttttatttaacccattatatctaaaatatttcacgtatttttatattcaaaatacaaacattactcaagaaaaaatgtcttaaatattggactctcttctaccttctaagctttataagcctcacagttattagcacgatgctttgctctgctcacataggcatcctcagtcacttcagtcaaagaaaccctaaaaaacaatggtttgttccttttactctggtaggcctgataagtcatgctaggtagcatagcattcattgtctagcttggaaagcattgcttcctatgacatggcattgtgactacacatctgttcatagaaatataaataatcactaagagcttgcatctagggtctgataccctgggtttgaaccccatctttatcactcagtagccctgttcacagcaatataaataattgaaaagagcttggattctagggtctgctagcctggctttgaactccatctttatcactcagtagctctgtattcttgaccaatttacttagtaatctctccgtgcctcagttttctcatctgtaaaatgcagatttaatattagttccctaccttttaggattgctataagaatgaaataatgtaaagcactagaaatagaggacattggtagtctctgaataaatatcagttgctgatcaccttcataatttttcctccttagtagaagtttaataaacagtctaaaaaattccattatcttcggatttcaacttatcaaaacttttctgtcggtgtttttctgaaccaccacttcaggataccattgttttttgttcttgtactactgtatgcttgtcatagtcagaaaatatgtaatatttactgattaactaaattttaaaacttatctactctaaaggatgacatcaaggtgatacattttcattttaaggtttcatttatgtt

SEQ ID NO: 115261 - DNA, 2482 bp, Homo sapiens
agctgattttttgtatgtgtgtttttagtacagacggagtttcaccatgttggccaggaacctcgtgatccacccacctcagcctcccaaagtgctgggattacaggtgtgagccattgcgcccggcctctgttctctgtctcaagctttttacactttctaacatctgcttgctctgcctcaaatttttcaaatggacattttgtattttccatgtacttaatattttaggtagtatttaataactttacagatacatcattactcttgtgtaatgttccgggaatgtatctaagaagctccagtttccccagtctccccagcactgaagctttaacccagaagtatactgtaagatgttctttaaaaatattttttgtttgatttcatgaataaatctccttgtacattgttcactttattattgaactttctttatactttcatgtgctttagattgcaatagatattaaatctgcaaagcgagaactgaagaaagcaagaacagtcctacaaatggatgaactcaaatgtcgcaaacgtgttttaagaaggttgggatttgctacttcttctgatgtaatagagatgaaaggacgagtggcttgtgagataagcaggtaaaatctggttattgttctagaaagttcattttttttttcatttttaattttaatttttgtttattttttttgagatggagtctcactgttgcccaggctggagtgcactggcgcaatctcagctcactgcaactccgcctcgcagttttaagtgattttaaaaataaccattatctttaggaaaaaagagctttcttaaaaatataaagtttgtacaatatcttccacactaaatacagttttgaaccatgaaattgagaaattagaaaaatcttagatctcagtaattaacacaagcgctcctagcatttgtatgtatttcctttgactttttttaatgccttgtgggatttttacataatcttagcttatatataattttgtatactttttaaaaattattaacattttcccaccttgaaacttagcctagtaaccattatcttgttacgtgcatagcaaattgtaatgagattttgggctaataataggattttacaacagaacttattataagccacagattaaaactggttatattattttctgtttcagtaatcttttgtcacaaatgacctcaaaactaaattatttacaacatcaacagtgactttatcctcttattgtttttatgggtcagaaattcaggaagagctcatttggatggttctggctctgtcccccaggattgccgtcagacaggtggttaagctgaaacagtaggagtccggagcggctggggaatgttaggacctctctctctctgttagagcttctccatgtggtctctccatgtgggctggtttgggcttcttcacagtatggcagcagcctcaggatgcttacatggtagctgaaggctccagtgtgagtcttctagctggctaaggttgccttttctgacctagctttaccttttgtaacctagctttgttatcatacaccatcatttccaccacattctcttgattacaggtgagtcataaaccctcctggattcaagtgggggataattagattccaactcttgatggggaagtggctattgttcagtatggctttctgtgataattggattgttctgtgtctacactgttcagtatagtagccactatttagcatttgatgtgtgcttagacaaaggaactgaattttataatttatatcattttaattgaaattgaaatttccacgtatgcacatggcagtctttatagatcagtgcaattctagaagaatgtggtataggagatgctgttgtggccatctttagaaaatacaatttatgatactgttctaaaaaatgtgttcgttatttcccaccacgaggaatgtctcctgccttaggagccagcttgcctctgtcctccttaactggaaagtcataaactggtagctcaagcaatatccagtctgaagatatatcttgttttgtccatatagtgatgatcataattctcagtgaatatataaaagacacttttgaaacagttttttatgtactcagcatggccaggatggacaggactagagaattacaggccttgtaaatgatttcagactttcttggtaaaaatgtaattatatcgttcatctgtccagatgttacagactcagatgtcttcatagaaccaggagactgtggtgaacaggacaactcttagccaccaaaagggggcagtgactacccagccctagttagttgttatcacaggataatgtgctattggattttaattaataacatatccaggattaaatctaaactgcagtactggtctactgatttatatgctaatgttattgggattatttccttctaataattacctgttttacaattaatatagaaattaatt

SEQ ID NO: 115262 - DNA, 1041 bp, Homo sapiens
aatgtgtatccctcattatttttggcctcaattactgcagttgccctcctgattattcgttgcctcccttcttgagttttcaaaacccaaagcacaaatctggtatgtcgttcctctttccttcttgagatgggattttgctctgttgcccaggctggggtgcagtggtgcaatctcggctcaccgcagcctcaacttgccaggctcaagtgatcttcctgcctcagtctcccaagaacctgggactgtaagtgtgtgccatcaagcctggctaatttcttttttaagtttctgtagagatagggtcttgctatgttgcccaggctggtcttgaactcctgtaattaagcagtccgcccaccttaccacccaaattgctgggattacaggtgtgagccacttcacccagcacccagcccctttgtgccattctatttggtaaaagtccctcagtgattccttattgcttttagaatagattccataatttagtatattgttactctccctctccagcagtctgttgccacaccccacacatgcttttccttttgcttcatatgacctttcacccccaccccatatcctgcgattcttgcatatttttgcaaagaacttcgaaacttgctctgaacttcttcaatctggttttaggctcctcacctttttttcctcataacacttgtataaatcaattattagagcactctgttaaaccactgttctgtgattatcaccttacttgtctgcccccaatgttagactgtagcttcttgaaatagtctttcctcgtttgtattgttgcactctttgcttgacttaactcttaagcttaacactagagacccaaatttagtttttgacttttatttataaatattttaactgttagtaaagattataatagttcatggctttattcttttttaaagactttgcaaaaaataaaggcaaagtttacttttttaataatacagtacagttattgtatgggtcaattgaaccctgattatagaagtctagaaacatcatctttgtagt

SEQ ID NO: 115263 - DNA, 1001 bp, Homo sapiens
gatataataacttctattttaaaatgtatttataaaactgtctctacattttaaaaataatatttaaaaggttatgtaaatctttataatataaagatcaagtgcatacaaaaatttattaagcacccaatgtgggcagtgtacaggtctaagcaccagagatgcagcagaaatgtttgctttcctgatacttacatgttagtggatgaagataaagaaatacagtacacatacattctgtcaaataggggtgaaggtttttggagaaaagtgagaagaatcaaagatcactggggagatggtgttactattttaaataagatgattagaaaaggcctcactaatgaagtgaaacttatattgaggcctataggagagatgagggaacaaactgtacatacctggtgggagaacattgttaaaatcacaattaacctcctcacatcaggactggtgccttccacctatagtgaatagcagagaggaatgtgatgagtagctgttgaccatgaatagacataatatcaaagacatttcgcagtcttgggttctttattaaactgagatgttaaggtcattctggctattttgcttttttgccattcatcaataatttttggttttagcagcaataatatggaatctggttcttgatttattatacatatatacatgttgcaaatcaaaatcaagtcctttataagtactggtgcttaaaataaaggcagatatgtcgcaactagcctacaattgctttaaaaaaaaaaaattagcgatcgggcacagtggctcatgcctgtaatcccagcactttaggaggctgaggcgggcagatcatgaggtcaggagtcgacaccagtctgaccaacatggtgaaaccccgtctctactaaaaatacaaaaattagctgggcgtggtggcactcctgtaatcccagctactcaggaggctgaggcaggggaatcgcttgaacccgggaggtggaggttgcagtgagccg

SEQ ID NO: 115264 - DNA, 1029 bp, Homo sapiens
atgagatggtatggatggtgtccagatgcctcactaggccacactcagggtccttgaatagctgcagtttgccaggcttttctgcattgtcgtggtggtccttcccttgttgctgctgcctgagagatactgcctggttcttacagacacagattatgtcatctttgcagccttcacccaaagttgctccctccttctagggcattttgttttcctacttaataccaagtgtcagcatgttagtaataaacaggtgtctctaccattagtcaaaggtgggagttaagcctttcatctttgtagctttctccagtacctaaccatgatttacttcatgggaagtccctcaaagtactattaattatcgtgtgttctcctgccttgcctcttaacaaaaattctgctgttcctgattatttccattttaccagtgttttgttccttttctatccaggcagcataattcgttgtatgaggcgcctggaagaattgcttcgacaaatgtgtcaagcagcaaaagccattggaaacactgagctggaaaataaatttgcagaaggtcagtatcaaatggataagctgtttctaatttagacaaatttggtgaagcaaatcttgagccctggaccacaacctaggaggacgttttgagatgttcttcactgcattgtcatggagagctatctactagtgtttctataaaatttagtgtgttgggggaaaagttgagattttatatatacatgcatttacgtatattaattgtacgctaactacatgccaggcattgttttaagcactaggggatatagtgaacaaaaagacacccctgccttcatggagtttacattctagtgtggggagatagacaataagtcaacaattaaatttatcagatggtgataagtctgtaagataaaaacaaagcagaaaagacaatagaattggcagatggatatgatggtctagggcctccacagggaaggtggcagttaaggcctttggtgtatgcttgatgtacgtgaacac

SEQ ID NO: 115265 - DNA, 1102 bp, Homo sapiens
gtggtcttgaaagtttaaaccttactttcttttctcttaggaatcaccaaaatcaagagagatattgtgtttgctgccagcctctacttgtagagtcagctaaaggaatgtgagattttaaattattgaccacctgtttgattacagttgactacaaatgcctgcaagtgtggatttggttctcccatacattttaatatgtattatatttaaatcaaacatcattcatagaaagcatattacatacatgtttatacataagcattacatttttttaataaaaatgtatacaggtggggcactgttttggtggaaggcttggagtttttttaatgagtttagagctattagataaccactgagttaaaggtaactatgtacacacaaagtgtgcatccaagaggcatagcagcagcagaagtctttaaaggcttgtacaccaggaagaaagatgcatcctcttgccttgtggcaatcattttcctttagaaaacaggccagcttcacctgggcaccctgctgcctttcaaggctggtgattgctcggatagtgattcccagttgttggtgtttcatgcagagttgtatgagagtcctcctcttttctttctttaaaagaagttctttctttgaagaaatccgatacatatacagcctacagtgcaaaatatttaatggtataatttagatcaagttaaaaactacatacaaagttgtgatcaacagcatcctaagataaatataaacaaaaggatatactttgaggtgtacagattaagcatataaaaaattagagactaactgggattttttaaagattattccaaattaagagttgctttgttatgccttcagcaaatagcttcattttgccaatactgaataaaagagttatttctacatgtgaattagttttttcaagtcataatcccctaaaaaaactatttctagccagagcctttcacaataaaaatactaagattttacaaaactactaagttttagaaagagcaacctagtttttaacctggtgtgtatcctgaagtgacttttaataacattgagattcttgcccactgcatagtcttctcctcagctgggg

SEQ ID NO: 115266 - DNA, 1073 bp, Homo sapiens
tccttaaagaaatggggcgttgctctgttgcccagactggagtgcagtggtggtgtagtcatactcactgcagcctcaaactcctgggctcaagcaatctttccatgtcagtttcccaagtagctgggactataggtacatgtcactgagcccagctaattggtttttttttttttttatagagatgggggtctcactgtgttgcccaggctggtctcaaactcctcgtctcaagtaacccgcctgcattggcctcccaaagtgctgggattacagacatgcgccaccatgcctgacccagtatcgtggttagttctgagtcttgggataaagtgctagcattctgggcacaggttgccattgctctgggcctatctagggactatttcattaattaaccaaagagagctcttctaccctcaaattgtttaacaaggcaactgagactaaataatctgtatttgcaagtaatataggttgtagtttagttatgatccagccaagaagtgtattctttcaacagtacttgtatcccctttaagttaagttctatgagttttctgtacactaatcggacctaagaaattcccctttctcatgtcagtctgcctttgactttgggtgcatctctgaaggttttatgtagaaatgattctttttagggagtctgctctcattaaaaaaaaaaaaaaaaagaaaactacctaatttctatccaataacaatataatttataacattccctttaaaattctgttcaataatatatgactcgtagactaaattaaatgcagtccttagaaaacaatatacatagctctccccatggacactgcctatttaaaatagatgacacaaatccattcccagctctctgggcactgccatgggtgttcagtcaccaaaagctggcaaagacccagggcttatctaattttatcaagtacttagtataaaccatctagttctaaaagagcacaccagctgtttaactgagtctgactcatcagcaagtttaagaaccactggctttctgcagaatccttatttttgtttgttgttcaagctgtgaa

SEQ ID NO: 115267 - DNA, 1359 bp, Homo sapiens
tagatacaggaatttcataacaggcggtgatataaacaatctggggttacagcctcaatagaagggtctcaggaaaagtattttaacactcctcactgtattgaaagaaaatacagactcataccatggctgttctcctgaataatcaaataaatttggaatctctggcattcagccaagttcacggggagtcactaagcatataaactggctatgtgcaaagcagccctgccctgagctcccgcaggcctgggaggttttcactgatgctgacactctcttggcacagttaagtgtgcagggctgcactggctgccagagaagaacaatggtcagggtgttttaagagccatttttaactagaagttaatttctgggtgtcaggaattgacagagaagttttggctatcaaagactgtcctaggagaggatttaaatgactacgtctctacccaaatctgagactgactcatgaagccaaggtgcccagagaaacaagatgagtcattgctcaaggaattcgggggtggggcttagaggttaaatgttgtacataggccaggcgcggtggctcacgcctgtaatcccaacacactgggagcccgaggcaggcggatcacgaggtcaggagattgggaccatcctggctaacacggtaaaaccctgtctctactaaagatacaaaaaattagccgggcgtggtggcgggcgcctgtagtcccagctactctggaggctgaggcaggagaatggcgtgaacccgggaggtggagcttgcagtgagccgagatcgcgccactgcactccagcctgggtgagagagcaagactccgtctaaaaaaaaaaaaaaaagttgtacataaatgtaaaaagcaaggatctgtgtattcagggctgaaataaaagctggggcctacatccacatcaagcaaatatttccactacctagagtcagtaaaatgcagtgcatggttgctctggcctgctttcttctccagaaaggtcttggtctacaacaaatctatttatctaggcttctttttttgccattataactttacatctgttaaatcaaactaaaatctgtcctgaaaaccccctgctcacatacttgagttcttctgtacaaagaacaacctaatttggtaagtaagcaaactgggagcctgactcaggaatgtgcttctgtaacagcagctgagtctcagccagtccctgcagccatatttcaaccactcacagccattcaaaccacgctcaaataaagctccaaggccgagctgtaaccaatccggcagtttctgcacctcgcttccattttctgtactcactttcctttttctgtccataaattctccc

SEQ ID NO: 115268 - DNA, 1078 bp, Homo sapiens
tactaaaaaacaaacaaacaaaaaacaaaaaaaaacccccaaaaaaaccaacaaaccagcttggcatggtggtgcgtgcctgtggtcccagctgctcaagaagctgaagcgggaggatagcttgagcccaggagatcaaggctgcacttagctatgatcgcaccatcgcactctagcctgggtaacagaatgagaccctgtctcaaaaaaaaaaaaaaaagaaactttaagttcagattcctttttatagcagctttcagcctgctatagacaatacagaaatgagtggataaagttttatttagatactctgatagcttagccagtgacaatgacctatccaaatatggaatgctaaaatgttttctttttggaagcaaagcccatgaaaaattggtttggaagtagcgttaaaaacctggtgattaaatgacaacaagaacgtgagaagagatttttccaaaatccatttagtgtgtttggacagaaacaaaggaaagataactctttgttaaattggttaatagaggatttgaacactttgtttgctgtagacaaaacatctttatcttaaaactgtaatctttctaacttccgttgcatgcattgctgcatttccttttttacatgtgctctcatttattttcatggcaaatgcatttttagacagagtctgtgggataattattgccattaattagttttgatatttcttttttaatgatattttcatttattcccttttgctagctggattgccttttgcaattcttacttcaaggcatacccccttccaacgaggagtattctgtaatgatgagtccatcaagtacccttacaaagaagacaccataccttatgcgttattaggtggaataatcattccattcagtattatcgttgtaagttaaatccacttttccaagtttataacttttgggcacttggcttaattttctgttactcttttaatgcttaaatgtgtaatcctccaaaaacaatgtatgctttttaaacctttaattgatgctttatttgatcaagagaatctcagctattttaagtggagtcaaaaaat

SEQ ID NO: 115269 - DNA, 1413 bp, Homo sapiens
tcagcctttcaacgtgttgggtttataggtgtgacccaccgtactcagcctactttgagttcttatcgtgaacacaacatgtattatactgagtgaggtttttaaaggacaggttccccttctcccaatcatattctaacctgttaacctagccagatcacttgtctccatgggaggccgtatattccctaactctggaagagatagcttgtgttggaatcctggttccaccacttcctagtttcagcaatgttcctcatttctctaagcttcaacaacgttatatgaaaaaagcaggtagtgataatacctacttcacagaggtgaggtaaggattgagttaatctatgtggcctaattcccagcatgtgcaagcatgcaatacatgttggctacaaaatgcgtgtaccttgaaaacttcttgctcattccctttgtgctcttgttgatgcaattctcatgcttccctgcctccctctaccactaaatggtctccctgtgctcctccctattgcttgtgttttacctgtcatttcaccttcaactcagttgcctcttctttaatagtcttttctaactcctccagtctgtattgacctctgaattcctataggtccttctatgccattttagtaattatattcctatttttatggcatatttctgccttttatggtatttcttcttaactttacatgcaataaaagagttgtggaattaccatctcaatcaagatacagaacagtttcatcattttccccaaaaaatctaccttgggatttgtttttaaacaatttactgggtatacattatttttctacatatacaatttaggttcttgaatttagtattggttttatacaaatttgtcttccctaagtatggcttagtattgcgcatatagtgagtgagtttgtataaaacaaagcctaaaagcatggtaaatttgaatatcttaagaagccactaatttaaattatttaactttggtctttcagggtcattttatttaggtgcaaaatttcaactgaaattattttggtataacttgttaaaagtggttttggagccttgccagggctaataaaaccgggtgtttgtttgtctttggaaaacaaaaggctttttctttctatttttattactgaatatatacttgtggttttatcattttctttctctctctttttctttcttttctttcttttttttttttttttcctgagattgagtcttgctctgttggccaggctggagtgcagtggcacaatcttgactcactgcaacctctgtcccctgggttcaagcgattctcctgcttcagtctgcccagtagctgggactacaggtgtataccaccatgcctggctaatttttgtgttgttagtagagacggggtttcatcatattggc

SEQ ID NO: 115270 - DNA, 1025 bp, Homo sapiens
ttttggaatagtgatacctgtttactctggagggatggacattcctctgtgtgtgtgtgtgtgtaatacatatgaacaataggggacataattttgacatatttaacttgaagaaaggcatgcttagacaatgacaacccgatattgaacaatgctcaatactaagtttctttatgaagataccattgttgtattagtggagacggtataatatattctcagtaaagacctcagtctttactcagttctcatgctccttgatgtcttagcatttgatatattagatttgccatgtactagatactctgagctttggtttttgtatcacaacattgtcctacttctctattgttcattcattcttttgtttaaagaatggccagactatgctgctgaacaagacagacacagcccttgccccttggagcctgtgagcatcctttcttcctctcctatagcctcttttcatgttttctctgtggatattagtccttagctaattgctttgtttcttttagtcttgatttgccttctgtaagaactgttttattctcctagcttaagttgcaaattctaatgccaacaacttacacatctttctctacttctgatctttaccctgaattttattcacttagccatttaatacattttttttttttttttttggagacagagttttgctcttgttgcccaggctggagtgcaatggcgccatctcagctcaccacaacctctgcctcccgggttcaagcgattctactgcctcagcctcctgagtagctgggattttgggtgcccgccaccatgcccggctatttttttttttttttgtattttttttagtagagacagggtttcgccatgttggccaggctggtctcgaactcctgacctcgtgatctgccagcctttgcctcccaaagtgctaggattgcaggcgtgagccactgcgcctggccaataaatttttgttcagatctgtgtgcctggtacaaaggatacaaaaatggtaaaggtagcct

SEQ ID NO: 115271 - DNA, 1260 bp, Homo sapiens
tgtgtttttttgtttatttgtttgtttgttttttttgagacggagtcttgcttttgttgtccaggctggagtgcaatggcatgatctcagctcactgcaacctctgcctcctgggttcaagtgattgttctgtcaaagcctcctgagtagctgggattacaggcatccgcctctgtgcccagctaatttttgtatttttagtagagatggggttttgccatgttggccaggctggtctcaaactcctgacgttgtgatccgcccgcctcggcctcccaacgtgctggggttacaggggtgagccaccatgcctggcctgctttgtgttttaacagagtaagaaaatagacttttcctttgctctagtttcaatcttcttaatataggtaggactttttcagataaatttatgattaattacaaggaaaaggatagtatggatgatttcaggtaagttataggcataatttcaagaaacaaaaaatgtttttattgtgatagagcatctcaaacacctttagaatctacctctttttcctgttccccccgttatttctttgtttcaggcccttaacatctctcatatacactggtatttcttgcctctggccttgccgtctattctgtcttcacactgcttttttctttacacagctcttttcacagccccctcagttagagtacagattggattgtgtgtctccctgctacccacagaataaaacttcaaatgtgatgattttggtcttttgttttattataaaatattcaaacatggaagtatatacagtagaaaataagttttctccctgatttgatttgtattagtaccatctctgctatttagcccccactgttaaatttgactggcttaaaaaaaataccatctctgaagataactacttagaagttggtcatatgtttttccagacttcccaatgtttatttatatataaacataaataattttaggccaggcgtggtggctcacgcctgtaatcccaagactttgggaggctgaggcagggggttcatgaggtcaggagatcaagaccatcctggctaacacggtgaaaccccgtctctactaaaaatacaaaaaattagctgggcgtggtggcgggcgcctgtagtcccagctactcgggaggctgaggtaggagaatggtgtgaacccgggaagtggagcttgtagtgagccgagattgcgccactgcactccagcctgggtgacagagcgagactctgtctcaaaaaaaa

SEQ ID NO: 115272 - DNA, 1082 bp, Homo sapiens
ccatgagggagtggaaggaattaatgttgttcttggccagttggcactgttttcttgtgcctttctgggaagggaacaacaggtgagaaggtttgctttttgtttttgttagtgtataaataaataggttaacttgttttttatttgtgtggaaatgtgagagtccatagtgaagtaacttgccctaatagctcgtgattttttaaaagctcattaaatatatacacaaatttattttaagtgtcttaatgaactaagctactccaaggttgaggatattgtaggcaattactgacgtaaaactacaaatgtaaaaaccatctttggtaagtgtcacttatatcctatatcccaactgctttttctcccttttatcctaattttaaaataaaaaagaaaagataacgaagaactttttataataaaaccatgtcagccacagagagatggtgactgtaagctaagtgaccagaatgtaggtgcctctaaaagttgagggtgcactgttctttgaattcttgcctgttaacacttttcataacatctctgtgaatcacactcaaatatactgtacagtgctatcactgatacctctcacctgccaccaggctctgccccttccctaccaataccttgcacaaattcattgtcctgaagcacagctttcttgctcaagaaccagtgttgatttttcatttcttattgaaacatacacaaattgtttacctgaaattgaaaaccttcatgctgtagttttgctttgcccattcacatttatttctctttgttactcattcccctctacgttactttagtgaaatcatcctgttttttagttgtctaacagcagattgagttcagttaccaatttttaaattcagttctaattccatttcacattgtagttgttttgactagtttttttctactctattaaaagctctagttgttctctgctctcctcacttatctgactctgaaatcttctaaatggtacccactttatttagaacgttttagggtcaaataagtacaggttggaatcctgagtgcaccacttaactattgaggctgacagccag

SEQ ID NO: 115273 - DNA, 1052 bp, Homo sapiens
ggcggagcttgcagtgagcagagatcgcgccactgcactccagcctgggcgacacagctagactccatctcaaaaaaaaaaaaaaaaaaaaaaaaaaaaaaactcaacacgtgttaaatcgctaaagtctgaagagcccagaaaagaaaataaatatcattagtaatattctcaccatcatccaaagattaccccttttaacattttggttgcttatctttccagtgctttttaatgtccatatacccacatttttttaaacccatgctttaaaagaaaaaaaaacttgtgatattactgcatgtatacatatattttgtaattttcaatataattgtctgaaattttaatggttatatggtatttcactgtatgtatttggtagaagtcactttgcccccatttttggatatttaggttatttgcaattgtgctattatgctgtgtacaacgtccttgtggaaactttggcaaaccttgggttgtccatctcaaactctctcattgtactctgtccttttcagcctgcttctctctcttttccagtaactcctttaacaacaagatcagatcaggtggacagattattcttcaaacaatttactattaggcaatgaatatgctggtttctgtgaattctgggattaaagagatacatagacacattttatttgcagagataaagaattacaataataaactaagtgttgtgataggtttatatatgtataaggtccatgggggctcggaaagagagcaggggttgtgagggcagtaggcagggaagaaagatcagggagtaagcatttattaatcctcttaatgtgccaggcactaagttaggcacattactaggctcttagtttgcagcagttctgggaggtatgtacacagtattattcttacttaccagatgaggaaactgagctcagacaggtaagtaatttgcccaagctcccacaagtagtaactgggagaaagccagaagtaaacccagccagatatacttgactacccaactctgtccagtactccaccctggcacaccaaag

SEQ ID NO: 115274 - DNA, 1439 bp, Homo sapiens
tctgcctgccttggcctaccaaagtgctgggattataggcatgagccatgtgcctggccatttaaaattttttgtttgtatttttgattttcgaattttttttctacacatattttgaacactgagataactaattgtataccaaaatgactgaaatgaagtcagtctgatttccgtaagtttgattgctaaagcagtctccttaaaggtgttaaaatgtgctctcaatccccaccctacacaacatctgtctcccaggctgaagtgcagtggcacaaacatggctcactgtagccttgacctcctatgtttaagcattcctcacacttcagcctcctgagtagctggaaccacagatgtgcactgccatgcttggctaatttttaaaatttttgtcgagtcctggtctcactgtgttgtccaggctgggctcaggagatcctctcacctctgcctcccaaagtgctaggattacaggcattagccaccactcctagcctatgtatgaacctttacggaagttgattaccctagaatttttataagagcattagaatttgccagctttcttcaagagttaatataggccgggcgcagtggctcatgcctgtaatcccagcactttgggaggccaaggcgggcggatcacctggggttaggagttcgagaccagcctggacaacatggtgaaaccctgtctctactaaaaaaagaaaaaaaatacaaaaattagccaggtgtggtggtacctgcctgtagtcccagataccctggaagctgaggcaggagaatcgcttgaaccctggaggcagaggttgcagttagctgagatcatgccactgtacctccagcatgggtgacaaagcaagactctgtcttaaaaaaaaaggagtcattatagtagtaatactatagtaaacacatacttgatattctttggaatatgggccttactatgaaataggagaaattatttctttcccagttactaataagggagacttcattggttaagggaattttgtgggtagaattgctaagactagaaatctcattgttggttcaaagagagaaataagttaaccacgtgttctcacctgaatataggatgctttgctttacaagcttaaataatacccggacaaaactctacaggtcacaagttctttaaagacttaataaactctgtagaaactatacttcaaaggggaaccttctccttgattcactatcctgccttgtcttctgaaatttattggtttttgacaagcgtttgaagaaagaccactaaaatacagtgttgttaatatttggtgaaatgttcttgtacatacatctgttatagattttccaagttaaaaattacttttccattagaggagctccccataccttgtttctttccccaaaggggtgtgtgtgtgtgtgtgtgtagttta

SEQ ID NO: 115275 - DNA, 1024 bp, Homo sapiens
cctttagaaaataacaagcacaggctagcaggatcatctctgaggaggataggaggaggacctgttagggatatcagctgaaacatgaatagtctgggatcatagttttttgtgtttcctatgatgtgccagatgaaggaagaagaatcttgccagaaggagaaatgtcatttttagaacaatggtataggaatcgttgaccacccttacagaaccctcattgctgagaatttgatatattgttttctaactatcaccaagtatagcggaaagagtctgggattggagcctggtaatactgctttgctattttcttgtgttaggtcgcacagttgattatttagtcctaaagagcttcaatttcttcatttgtataatggagcgaatactgtctacgtcacggatttgttaggattaaatgacaatctgtgtatataaagtagcaggtatttagtaggcactcaataagctgatgtctacctgttttcttgcttctcatggtaacagttgtttattgtgtagtttcagcattataagtttgctcttagcctcaaaggaatcatttgtgggaatccttccttcttcatcttatcttttgtgtaaaataacttgagtgatacaagcatacatttctggggaaatggaaatattatttgctactgcaataataaccaataaataagtattttgccagtcgtttttggcatgtatgccttatatttgtgtgcctttaaaaaaaaagcgtgtgtgttttaaacaaagcttactaatttagatatgccaatttggtaacttcctgccagagtaagagtttttatgttttccttctgagacacaccttagtataactttattttagtttctgggccattgccatttggcataacttcaaactagatgtgatggacccacataaatacttttaagatttaaaattttttttatggtggggggatatgaactttcaaaaccagctgaggtgtcaggtctggattttatttggttgtttaattttttttttttt

SEQ ID NO: 115276 - DNA, 1081 bp, Homo sapiens
gagtgacctttggtaatgcattctagcagatatagttagaatctcgtgatttagtcctcagttgtcactgcttggaaatgtttcctgagtctttttcagggtggggtgtccaggaaaatgacatataggaaacgtgtagcagatgagcccttcagttaattggcagcttgtcacggcagattctgccttgccttttggttcatttgcatcagtagtaggagagatgggtttgctgcttggtgctggagaggtaaatgagtagagaagaaagctattatctattgaatgcctagtatatgcgtttggtaaatgtttcacatgaactcatgtaatcatcacaaaactctgaggtacatagtattagcctcattttatgccctacctaccactggagataccaaaaataggtatgcatttttcgatcaagggaaaaatataacccatggatttttactagcttattacttatggtagaagacagactcataggaaaaatgataaaactgtataatgttattgagtgcctgttagcactgagattactaagaatgagtgagacaaggtctccatcctcaaaaggtacacagagctttggaaggtgagataggcaggtattttaatcaagttttttgttttttgttttttgtttttttttgagacagagtctcgctctgttgcccaggctgagtgcagtagcatgatcacagctcactgcagccttgacctcccagactcaagtgattttcccacctcagcctccacgagtggcaaggactgcaggtgtgcaccaccatgcctggccaattttttttttttttttgagacagagtcttgctctgtcacccaggctggtgtgcagtggcgcaatctcggctcactgcagctctgccacctggattccagcgatcttcctgcctcagcctcccgagtagctgggattacaggtatgtgccaccacgcctggctaatttttgtatttttagtagagacagagtttcaccatgttggccagactggtctcgaactcctgacctcaagtgatttgcccacctcagcctcccagaatgctgagattacaggc

SEQ ID NO: 115277 - DNA, 1190 bp, Homo sapiens
cttcccttttctcgtaacatttatttgttcattcactcatattcagtacacatttgttaactgtatcataggtgctgggcagtgtgttagacactgaagataaaaataagtaaacaaataggacacggtgcctatcctgaccacttgctgtttcttctatttaactttttttttttttttttttttttgagatggaatctcgctctgtcgcccaggctggagtacagtggcccgatcttggctcactgcaagctccgcctcccaggttcacgccattctcctgcctcagcctcccaagtagctgggactacatatgtgcgccaccacgcccagctaattttttgtatttttagtagagacagggtttcaccgtgttagccaggatggtctcgatctcctgacctcgtgatccgcccacctcggcctcccaaagtgctgggattacaggcgtgagccaccgtgcctggcctcttctatttaacttctattaggaaacttattttgcttctgatgaaagtttacttgtttttctgtttgttgtcgttgttgttgtttttctctattctagtcacagagagagggaaggaatctcaaaaaacgaacaaaaatttgtcaaactggcatattcttgggtcagtctagaatcctattgcaaggctttttctttctttaaatgggtagtttggaacaaaagcagaggcttggaggaaattgctgctatttggctctagttggttttattcagctgagttttagcttaaatttaccttacttggaataaaatatagaaatgttcagaaaacgttccccttatagattttatgaaatgtaaattcttcctttatattctctttgaattacatcctttggaaactcaagaatgtgctatggatctttgttaatctctttctcatttagtcatttttggctgagctctaccaaactttccaatgtgttactcagtttggggaattattctgattcttttggttaagaaatttaaggttaaaattgtcaatgtttgcctatttttttttttaaaaaaagaagttggcagcaaaagtcactaaactcccagattttgagtgaactgattaacatgtaatttcagtttttatggaaagaaatttggaatgttgtctacttcctcctaatttaggtgccttaattcaacatttgaaatggaaaca

SEQ ID NO: 115278 - DNA, 1399 bp, Homo sapiens
ttctcagatataatgtgtgaccgtgatacagtgagaaagattctaccaaccactgtttcactactttttagtcaaaattgggtatgttcttagtattcattagtgagaatcataaagtattttgtagaaggcccaaatcacagaataaaggactaagagtggattcactgacattccatactaatatacattgtttatgctttctttaaaataactaaaagaacataaaagagaatctcagtagtttgctgctaatatatacatatattgtataaaaaggtatattttggttttgttctacactgaacattttttaaacttggtttaataaaaatgttaattttggaaaaggcgcgatgttttagcccagtgtattaaaccatatcctgaatacaacttattagtgtttaattgctaagggtcatttcagattttagccactatggcattaggctgccgattaatggacactgagtccattaatttattcaatgcatattgatggaaggctagcttcgtggccagtaccatgttaggtactagggatacaaagatgaataagataatccctgccctgaagggctcagagtctaatgatgaagaaataaacaagtggttataatacatcatgataagtacgataatggaggtttggaatatgttccctttgagcaaagacgagagccttgtcttagatctgctccattgtagataaatgatttgtctgtttactcttagagacgcagaaaggtcagaagttacctggaattactcgtagctgctgctgcttttttttttcttttccaacttgatatagggcagtaggaacccaagtaagtaccaatgtttatgacttatttgcgggcagtcccacaatatctagaagatttagctggaactgacaaaactttgattccttatacctgtgttttgctgtttttgacaatcatttagaatatctttctgtgctgtgtgtgttccatttgcccttccagatcttttctccactctgctctgtgcttctgggaaatgaattacatggggtacatcaactgagcccttcctttttggtttcagattagctttgcccagtgggagggacatcagaaaggatctccctaaaagctagttccctcttgctggatttagtgttgccaaagctgttctgtgagtagttcacaacttgtattcaataatggccctctctgccagccatctatagttacacatctttctgggttctaataacccttccctagcccctttagacctggagatgataatggcttcctgacgttgctaacctggagttataccaccatcttttgctgttttccctaaaccctgcctgtaccttttgaaatggttccttcattaagttttcttgaatacttcattt

SEQ ID NO: 115279 - DNA, 1040 bp, Homo sapiens
atttattcataaaaggggactatattaaagggaaatactttatttatattaagtatattttgcaaatgcaatgcagctactaactatagaagtaaaagacttttctgtccagtgctttggaggagataaagatgtataagacatcattcatatctgaaatgaacttttaatctagtaaaggaactgtgtatataattaactatgatgcaaagcaatttatactgaggactattagagaaacagatccctttcagttgggagccttgaggagggttgataaaagaagccgagaggtcaagcagcaacgacccattttcaggttcctcctcataactgtccaaaatttaatatttggtaccttcaccagcaaatgcaatcatataggttaaatgtattcgcttttagtttggtaaatttcctctaagataagttttctgcgacttgtttaatgcttctgtatgctatttattctctttgcattttgaacacattgcattattctgttaatcttggacagcaaagcacaatggattaatagggcaaataattagtaacacattgggtggtacaaacagaaaaatgcataagtttttctcaccaaagatttgacttatttaaatatcagtattcaaagtgtcaaatgtttgaactcattgataagagcagaaaatattgatgttgtatgttttctttacaaagcactgacctaattgctttttagaatctggtggtggtggtttttgttttttctaaactcaatttcatccccattagaatatccaaaaccaaatccaaatctagttgacacctaaacagtagaatgttacattagtttgtgacccaaagtgaaattaatcccctagatgcacacaaactggcctggctggccggttttacagtccactgctgccttcacttcagattatgtaaacacgtgttgtgaaacagctctgacgggaaccttataacctaaacattgttctctgaaatgtaatttgttgtcttttatataaaagaagaaattaaatcaaagataattt

SEQ ID NO: 115280 - DNA, 1017 bp, Homo sapiens
cctctgacagtacagagttaaaaccctgtgagaaaaactccttaaatctgagaaaaagattaaggaatctggatccttggaatcgacgctcttcccttatttcttctgaactaaaagctaaactagtatccacattcacgttttccaagtaatacagcctctgtgtccaggtcaggatacaacatggtgattttttttttctgaaaaaattagatttctctaattttaagctaaagtttaaaaatctattgtatgttcacctctcagatagtgtatggatttgtgttatttccttcctttgaaaaagaaaaatggtttttgcaaacctagtaaggagcccagattcaagatcagccttaatttctttcagcaaagctttctgtcctattcataaagccatagacctatattaatgatgaactgtatttcctaaagctcgtttgttttaataaaaagtctcattatgaaaatctcaagcccacacaaaagtaacatggagtaatacggtgaacctcacaatgcctatcccctagattaataattataaaacttggctgtatttgcttcacctatctttttttttcttttccactgaaatattgtcaatctcagatgttatttcatcactacaaaccttaatttacagctattagtaatagccttttgaacatagttacattgatggaaatagtctcaaaagtttttgttcacataaattgctggtagtaggagttcggttaattggaaaattctgcagtaggtgtcagatcactgtgttaatttctcttagaaaaggagtataatgaatggagaaagtgcttctctgtgcttgagagcccctgaatctttatgacttcagaatcttattcagttaagagacataggattcaaaagccagacagcactgggagcgatctaggcttaatcccagtttatccccagtcaccttccttctctgtaaaaacttcagaaacagggctgggcactgtggctcatgcctgtcatcccagttctttg

SEQ ID NO: 115281 - DNA, 1671 bp, Homo sapiens
agatgagcaggaaatcatattttatattaacttagcaagtaaagtaagttttaaacccagatgttttatgtcaacaacaaatgaatcaaaaataatttttgttgagctatcagactgaggaggatttaaattgtactatgtttaccttaattgtaaaaagcaaagtgcaagatgaatattaaccccaaaagcttttattttgcagatattcaggagcagcatgtggactggcctttgtattcatatacccatctctcatctatataatttccctccaccaagaagagcgtctgacatggcctaaattaatcttccacgttttcatcatcattttgggcgtggctaacctgattgttcagttttttatgtgaaatacctcaactgtttttttcaagagctctcatgatattttgagccttgacaacagttctatataaattcacttgtaaatgctgctgttgtgtaattctaaatattttctaagataatttgaaagcaagggaaatagtggccccttaatgagtatttttttattggggtggggaaaggggcaaaaagaatgatcttagtgtctttacctttctcatattaactcacctctttattctgtggtcttttctgaatagaaatgtatgccctaggaagaaatcatgctgggttttgcttttagagataaaaggtggtggatttattttgcctgcagtaaagattctcagggtgtcagagcagcatattgtcaaatcctgcttctgttttatgtttcagtgtattcactttcattttcttacttactagaccatttctgcagtttgcccaaacctctactgtttgggacagtaagccaaatacctcatttttaaaaagaagttttcatggcatcagtgttaataaagtacatttttaactgagtcttaatctctatttgaagaaaaagtagagacaaaagtaatgtcaatgtaatccccaggatcatgaaatgtatacaaaataaataaagtaggagagtttgttgctgtctaactcctcttttatttctaatccagtaccagtgacttagatcgaaattacagttccccaagccagactttgcataagaacaagaatgattgtccccatagacccagggggtgcttttgctttttggatccctgagatcccagcgtaggctgtcatgatggacccagtggggaaagcatggcagagaggagcctgagaggcccataggggagacggcgaacagagaaggggccagggaggaagaggcctcagcccagcatattttgtgtcctctgggggtggactggtttctgcaccacaaaaaaggattgattttgtttgaggtatgaccttcagaaagagacctccatctgcttacttctgtaactggcagtactgttacaggaaaggggtcctgatccagaccgtgagagaaggttcttggatcttgcgcaagaaagaattccaggcaggtccacagagtaaagtgaaagcaagtttattaggaaagtaaaggaataaaagaatggctactccatagacaaagcagccccgagggctgctggctgcccatttttatggttatttcttggtgatatgctaatcaaggggtggattattcatgcctgcccctttcagaccatataggctaacgtcctgacattgccatggcat

SEQ ID NO: 115282 - DNA, 1366 bp, Homo sapiens
tcagggtaattgggatatccatcacctcaaacatttatctttttgttgggaacgtacaatgtggttttaatttgcatttctgtaatgatcagtggagttagcaacttttcatatgtttgttggccatttggatttcatcttttctgaagtgcttcttctgtttttctatttaactgtctgtttttttcatactgatttataggagttctttacacattccaaatatgaatcctttctcaaatacatgtaatgcaattatcttcttcctgcttacatcctttcttgatatgccttttcaaaggaataaagtaagcagtttgaaaatgatgagaagtttggagcttctttaaaaccattttgtgaaggagtctgttatttaatgtattatgtaataatcatggtgtaaatgtctatgttctttaaaaaagtgtattttccacacaaaaacttgtacatgcatgtttatagcagcattattcataatagccaaaaatagaaacagcccaatgtctatcaataacaaatggataaataaaatgtggtatatctttcttttttcttttgagacagagtctcactgtgtcacccaggctcgagtgcagtggcacagtctcaactcactgcaccttccccctcccaggttcaagtgattctcctgcctcagcctcctgagtagctgggattacaggcacgcaccaccatgcccggctaattttgtatttttagtagagacagggtttcaccatgttggccaggctggtctcaaactcctgacctcaggtgatccacctgcctcagcctcccaaagtgctgggattacaggtgtgagccaccacacccggccaaaatgtggtatatctgtacaatgggatattatttggcaatagaaaaggaatgaagtgctgtggttatggttgtacaactctgtgaatatgctattcagttaaaaactagttgtacacttcaagtaggtgaaacatgaattttatttcaatagtgctattaaaaagaatctcaggttttcaagaaattttctcaaaaagatagcttttgttagttaatgggaaaaagctgactatttacccactgtaatatgacaagttagaaacctaacagtggtcttacttgccttaattagaaaagatagaaaaggattagctaacaaattgctttacagggtatcttaactaagtaacagaattgattactctgagagacaggaaattcagctaaattgaaaagaacgtgttgaaaactaatagatcttattttatttagatttgtttattttattttagagctagtgcttgattcttgttttctcttcttttcctaaaataatatagcagagtcagtggacttttta

SEQ ID NO: 115283 - DNA, 1037 bp, Homo sapiens
tttgtatttttagtagagacgggatttcactgtggtctcgatctcctgacttcgtgatccatccgcctcggcctcccaaagtgctgggattacaggcgtgagccactgtgcctggcaatttttgtattttttgtagagatggtgtttcgccatgttggccaggctggtctcgaacttctgacctcaagttgatccacctgcctcagcctcccgaagtgctgggattacaggcatgagccaccgtgcccagccgaaacagttattcttgatagtgatattgtcctcatgttctttatctagatgtgaattctcatattctaatgtccccaacttttcaggcttatgactgctttctgccatgtactagctgccatattttgcttcaaaggtggcagaacttcagtttttctgtattcatcaaacataattatttcaaagtagttcaaagcatgggatcatagaggaaaaaagactgtaaaattatcctttgatgacaattaaaatactctttcataggttatacttatctatattctttcttgaacattgaaatgtaaaacaaaaagtttatattactaatataataatcctatcatggaaaagcaaatggttttagttttttgttttcttatgtaaatttctatcctaaatgataggaatctctaaatacatgctttttaaagttaatcatattgtattttagttgtcttctactttatcacctattttttagtacatgttatgtttctacgatcaccatttgtgtctcttaatgattgtatacagttgcacacggcagctctattgtatttgcataatcattgccctaggtcttatgttaaagtcattgctagtttttgctattctaaagaatactcttctaaaaatattttatatatactttctgtattcttttaaattactttctttttggtgcagtggtgggatcatggttcactgcagcctcaacctcctggtctcaagggatcctcccacctcagcctcctgagtagctggtactacaggtgcacgctgtc

SEQ ID NO: 115284 - DNA, 1002 bp, Homo sapiens
aaaacaccagtttagtaaccatgtgagtgaaactgctttttggagcatgacttaaactgtatatggatgaaaattactggttttttaaatttttgtctcaattaaaatgtttgaagagtgaaactccatttttttactgctattactctgtgttttcagttttatgatttggaataccatgatgggaacatctatactaagcattccttggggcataaaacaggtaatactaatttttcagcacactttttgcctaaatgtttttctctttatattgtaagttttataacagaggttttaataaatctacataaaattcattaaagaaaatagatggttatatttagtttttcatgagttgtcaagtttttatcatgattgtttagggtaaaataattgcatatgaatttatgcttacatgatgatatatgctgttttatacttttatttttaaacaggctggatttactactggaatgtgtgtcatcatactgatgggccttttaacactttattgctgctacagagtagtgaaatcacggactatgatgtgtaagaatttgacacagtgacaatagattatgggtattaataagcatttccctttgaggcagatcactagtgtgtatatgctacatgtgtgtcagctgtctactttgtacctaaagatttacttctgtaattcatcgctttcagctaaattgatttgctaataatatttagtggctgcttttgaaattcagagaagctgggagttatttgcagagtgcattcactttggtgctagtttcttcataagaatcatttaaaaactcatatttataaaataatgtctttgccaaaactaaattgagaattctgtgcttcctgtcagttaatggtgacttgttttgacctattcataccaaaagatctaaatgttagaatctgctaaaagtagaaattataactagaaaaatatgaaaatgtaagcaactccctagtaatgaatatttgaagttg

SEQ ID NO: 115285 - DNA, 1381 bp, Homo sapiens
ggcatggtggtgcacacctgtagtcccagctactctggaggctgaggccagaaaattgcttgaactcaggaggtggaggttgcagtgagccgagatcgcaccactgcactccagcctaggcgatagagtgagactctgtctcaaaaaaaaaaaaaaaaaaaagattagattaacagtatctccagaaatggttaccatatgttactacattttaagttcctttcagaaccataagtatagaggagttagtggaaccaatgataaatctggattttttttcttctttctttggatctgtgcctgaaatggcaaattatgtgcaatttggggcacagtgtcacttatgatttcaaggagcctaagaatcagcagagggatacagtcttttgataaaactctgcctggtcttttcattttggatagtatattactggaaacttcagaagaaaatgagggagtttcagaaaggaactgaagaggttgatgactgaaaaggatgattgaacaccaaaatctgcagttgattaggatgcagacgtggaaaggaagcatgtatataaataaaagggtatgttactaaaatccgcaaaaagtagaatgaggcaaaatatctccattgtcatgatgttccattttatactgagttggataagtctcataagggatctgatagttgaggtcactaatccttaatacatgaaccaaggaataagaattctgtttatcataggaaataacttgggcccataaggaaggagtagagactcttcaggagagggacattttagtccataatttctctgatttagtgccaaaagcttttttgagagactattcaaagctgtcttaagtttcattgttggaaattgatagctgctgtatttctttttaataactgttttaagttctttctgttttgtcttctcggttgctaaattcctgaagattacaaaaaaagtgtgcttaaagtaaaagtgttatgagacaaaagctttattctgtggataggataatacttcttttgtaacattttctgtttgcaccaaaagtgagaagtcaatgccttgcctttgtgcatcccattactaatggaggataagaagttattttcttcaaaggctgacttccagaatttttggctgaacactttttgtcaagtgtatattccctttgtaggcctttctgtatagagcccacaaacatcgtgaatgtgaatcatgtcattcagagggttagtgaccatgcctctgccatgaacaagagaattcattactacagccggctcaccactcctgcagacaaggcactggtaagagacaaaacattactaatagtctaaaattcagttgaaatgaacagtgaacaatataagccagggcac

SEQ ID NO: 115286 - DNA, 1681 bp, Homo sapiens
gtggtcccagatacttgggaggctgagactgaggcaggaaagttgcttgagcccagatggctgaggctgcagtaagccatgttaatgccactgcactctggcctaggcaatagagtaaaatcctgtctcaaaaagaaagtaagaaagaaagaataataaagccaacacccatccaagcaacataaggtcaaaacacagcagtaacctaaaagttctccatgtgtccttcaccaaacacatcctccatcctccctagggatgaccactatcttgactttgtataataatttccctacgctttataatagttttattgtctgtatatccctaaatactgaattcagttgtacctggttttgtaccttatttggggtacagaccttcttaagagtgatggcattgttattaaatttcagagaagcataactggtcagtaggagggtggagacagatgtataagccaaaaatttttaaggaatttaaggagtggaacctagaaaaggtgttaggtagaaataaggtttctctgtttatacatgtattaaatgaaaatatgaggtttgactcatattttaaaatattttgtacattttgcttaatattaaaagcattttttctgtggcatgaccataaatatttataaggtaagacaaatatgacttatttatttttagtgtggcacagctgaactacatttcaaatgagaagtaacattgatagggagcagtaatgtgaaactatgttcaaaaaaagaaagcccaagtttcaaaagtcttattctgaatattgttctctgtatagtattgtttaattttaaaagtgttttcagatccaactaaagttcaatttaaaaatatagttatattttttcttctcaaatgaagctttaagcatatgtttctaataattcagttaaatatgctgagttgtatattttttgaagagaatctgttttgaaaagattccaaaatatttgtttgaacaggcactcagcatctcgatgaaaactgttggaaaagaaaaactttcagagtcattctgccctcagagtagtcaagccaactaaactggtacagttaacacttctgtaagaaaccaggagccaagaaatttagcacttcctgactgcttttcagcaagcaggcctcaaaccaacttagtggttggaaccaataatattgaatttttaaagtaaaaggctagcagtagaacatctacatctctttctatcagtatgatatttatcagtctcttttggtaatccatgactagcttcaatctttgccttatgttggtattaaagctatcattctttcttgaattttgtagggcatcatttttgcaaagcaaaaagagaatgcactatagagtgtgaccccaggtataattaaaccatctgccagacataaatatttttatgttgctttttagtaccactgagtgtcatagtggagatgcaaattatattggacatcataatgctttgggataattggtagttacagcagactaccaaatttacaagtagggattgctttttcagcttctgatccattcatttttattatatccctttgaaatatattgacaccacttaattcacttaacaataatatgcttattgtcttagttccttttattctgctgtaacagaatacctgagactgggtaattttaaaag

SEQ ID NO: 115287 - DNA, 1010 bp, Homo sapiens
tacacacacacacacacacacacacacacacacacacaataaagaaaaaaaaagtattgatttagagggacccctcagaaggtggcaagtttctctgttgggggaaggagaagagttgatagacagaacaattcttgggcaggcatgttggctcacacctgtaattccagcattttgggagacagaggcaggaggatcagttgagatcagcctgggcaacataacagccccatctctaccaaaaaaaaaaaaatttttttttttaattagctgggcacggtggtgcacacctggagtcctagcttcttgggaggctgaggcaagaggatcacttgagcctcttgttgctgctgcgagctatcagcgcaccacggtactctagcctgggcgacacaatggaaccctatctcaaaacaaacaaacaaaaaaagacctacaattcagtagcttctgtacagagtgaaggagctgcctagctggtctgaaagttccattggaggagtactaaacactttaggaaggtcctgaagtctttctggactgattacttgagaggtgtcattttgaaagacacactgggtggaagtttacaaagggtaaagaagcattgcatacagtcatattgaatactttacgttagaatcataactgtttaatgtttatgtttttattttttaatgtttatgttttatatattaatgttttatttgatactttataatgtttgtaaatttccacatttgaagtatgttgagtatttaatttcactgatttctaaacattgttacacttctgcacacttttcaattaaaatattagtattaatacttgcattacatggagtaaatacctagacactggtagtgcaatttgctttagaattataattattactttgatttttctgtcatgtttaatgtcaggttcaaagaccatttaaattcttcatttggaagtttttaaatcttagaaaattttgaatccatgtgtgtgaaattgcagatgggagt

SEQ ID NO: 115288 - DNA, 1024 bp, Homo sapiens
ggtgatctgtttaaggagtagatgtgtttcgtttgcatcacatctatgtacagtattaaaaataaaatgtatctctctctctctatatatatatagatatatacactgaaacctttactgtctttcattgtctttctagtttttaaggataggaaattttagttaaaatgctagcctggcatttttcttattccccacttttatttcccccatggggaattgggttatgaaactggaaattttattaattttccagaaattgttctggtgggtttgtgtaaggaggagagtaataactggcatggcattgcagttactctttatttataattaagacatgctctttatttcaaaatattaagttaataatactcttaacttattgcacttaagtagattgagacaatttgcgatttattttgacatcctaataaagtggataaaaggagaagctgcttggaaaactttcccacttgggaattttttccacattcctaattttcctttgtggaatgtcactcaccatttcccatttggaactgctctttctagatagtagatggaatggagtggttgcagtggtggtggtggtgttactgtttacatcaacctagagaaaaatggaagcatcttaacttggttaaaatgtttctgttgtttatataattctttaagcctcattccagtgttgctgctattaaaaaaaaaacaaaaaactaaaaacttgcatttcttttactgatcattttgtagacatagaaataagagattctcagcatagtagaatttttaaaaattaatggatttttttaaaaccaaaatttaagaacataaattgcattgaaaagaattttgaaatttattctcagcagaatctgtaataaaatacatgggccggagaattaattttcaggtcaagttctttgtctatatgttgttgatgaagttgttttctttcagctaagtaacagtttggaattctaaaacagagaactcataatcttcaaccaagtgtttattaaca

SEQ ID NO: 115289 - DNA, 1040 bp, Homo sapiens
atatatgtgtctaggaaatgcactaaaatgttaacagtggttatttctgataggtgatttcattttcttcaataacttcttgattatcttaaatgtagacaatgtgctacatttctaatgagaacaaagttattccgaaaatatggcattcctataacttaggataaaaatggtatatacaaaatgaaaaactcattttcttaaaactttgtttaaattaccttggtagtctcagctactcaggaggctaaggcaagaggattccttgagccgaggagtttgagtccacagtgcactatgatcgtgcctgtgaatagccactgcactccaacctggacaacatcatgagacctcatctgtaaaacaaaccaaaaaaccttttggtatatttactgtatttactcctagccttcttttctatgacgtttttaggtgagatcacatagtatatgtaatttattgtgctgctttttcattttaaatttatattacatgccatcattacttctgcaagttattcgctagttgtctgtctgcctgcctccttccctctcttcttctcttcttccccacctccctgccatctttcttccctccctccctccctcttttcctcctctgcctgcctgccttccttccttcttctattcttttgtcagcaaacattcattatgttccttctgtttgccagacactttactcaaacacagctttactgaaacacagctccaccctccagtgggggagatggatacctagcaaaaaataaggggtgctaaatacttaattttatgtgtataaacacacacacgtctgtttttgaggcatggtctcatgccatgctggagtgcagtggcacgatcatagcaccttgtaactttgaactcctgggctcaagcagtcctcctgcctcagcctccctggaggctgagagtacaagtgcatgtcaggatgcctggctgctttttctattttttgtagagaaagggccttgctgtgttccccaagctgttcttgaactcccggcctcaatcagtcct

SEQ ID NO: 115290 - DNA, 1021 bp, Homo sapiens
tcctctttcccttccattctctcacacttgggcctccctctcttctctccaactttccactgttacttttcctcaaaggaactgtctttttgctaaacacttgaagagtgtttagcaaatcctggccttagagtcagagatgccttaaatctaaatacaggcaaggcacagtggcttacacctgtaatcccagcactttgggaggctgagggaggtgtattgcttgaggccgggagtttgagaccagcctgggcaacatagcgagatatatgcaaaacttagcaaatttctacaaaagcaaaaaaaatctaaatacaaactttgttagactgggatcttatttctagtcccattagaatccttttattcttacaaattcattgtccttatatatttttctttcttcctctcttttcaaatagttttgtttgcttaattgcccttttgtatccataattgcttgcctgagtggcttctttctttcctagatcaatctgttctaattgattttactatttgtttacttgcctggaagctagttttgctttatcatcttttcttcctgtctcattattattatgatgcttctccacttattttggggtgttcctgataaacccatcataagccaaaaatatcctaagttgaaaatgcatttaatacccagataaaaccatcataaagtcaaaaaatcataagttgaactgctgtaagttggggactgtattagagaagcctgaagaaagagggagcctcgttgggtttgactggtactcgttagggccaaatcaaaagtgtgggttttttggaggaaataatatgaagggttgggctagcattgttctctgtctgctcaatattgtaacacatccaagtatatatttagtcaaaagggttttagtgtaatagtataattatgctataaaagcagtaaaaccaattgcaagtatataacaagagatttgaaacttcttttaacaagcagacttaaaaccaaatattattgaattgatggaggcac

SEQ ID NO: 115291 - DNA, 1437 bp, Homo sapiens
tagcctcaacccagctttgtaaaacgatggatttgaagtgttgtttatgctttttttctaatacgcattgcattaaataccaactagtttaaatagcatttattcttgtgctacttacaatcatcttacatattaccatactttgagaaactgtctttggctgtcagagtatgtcaagtatatatttagattacttatcctcagtttagcttgtggttttctatctcttccactaggtggcaataaaaatcacataattttaataactgctttggactgaaagtatgatggttcgcttatccttttagtggaactggggtctaactaaacttaggtggaggaaggagcttgttgttataggggaataatatatgtcaagtcatttggggggctttttcaaactatgcaggcctactttttattctgcatacccctcccccaccagttttccccctgatttgggggtggaataaggaatgtgagtggagggacagaaaggtttagaagtctcctatcttgatatatgtgctacattccattagcaagtaccagtctaagaggttactttcctgtttttctcagactttctggtagccaaagatagaacctgattttcagtattgcttgatgttgctgcatattcaggattgctgctattctcggactatgccctggggaagttgcccatccagctagcctacaaacagattgtgaaatagttaatttgtttttgagcttctcttgtttttcagtctttctctatctctgtttcctcttcttccattttccccagggcctagggatttcatatccttctctgtatgcccagtattacccagggcaggaattcactcagacttaaccccttaggcaattctttgtaaaccatatttttcttctgccccttattcaccagtacttatctgtcctattccctccagggctctgttgtcagcttggtattataatggaaaacaattggatatgtcagagacttagtctattacatttccatggctatttgcattttaacatggagaatccggtaaatatgaagtcctaaccaaaagtttcaagatttttctaactgagaacatttcaggtgctctgataagccaagtggggtacaggcagcattcctactgcccttcaaacaacctaggtatgctgtggcactcttttttataatgtcctctagcgtgcacatctgtaaattggtctttctgttttacctgtcactaatactgtcactatagagcagcctaagttgactctttttggtacttaaggtcttaggagagaggaagaaggaaaaatatataaggacaaagaatttgagagaataaaaggattctgatgggattgtaaataaggtcgcagtctaacaagtttatatttagatttaagacatctctaactccacatctcagattgtcc

SEQ ID NO: 115292 - DNA, 1562 bp, Homo sapiens
atactataacattggcaattaagtttcaacatatgaattttggacgggacacaaacattcaaatcatagctggactccttattaaaaccaatcttaaacaattagagactcatttaatgacttagatttgacttagtggtcttgcatctgggactttgttttaaaactcagagattgagtgagatgttaaaagtgattatgtctgggttttgttttgagacagagtcttgctctgcaacctctgcctcctgggttcaagcaattctcctgcctcagcctcccgggtagctgggactacacgtgtgtgccaccactgctggctaatttttgtacttttagtagagacagggtttcactatgttggccaggctggaatatgtctgtttatgtcatcttgtatatttagcccctaccaaattatatcaatgtaatgtctgacaaattaatactatagaagtatttagcatttttgttaatcattgataaactattctgcattatcacctatgtaatatttgctgtggaactctaattcacctctcaacctaagtcatcaaacttcgggatattttatacttctcatcaagacattcaaaaaagctttaagactaggcatggtggctcatgcctataatcccagcactttggtactttgggaggctgaggcaagaagattacttgaggccaggctgggcaacatagtggcgcacagctgggatcccagctattttagaggctgaggtgggaggatagcttgagcctggcgggaggaggttgcagcaagcccagatggcactactgcactccagcctgggtgacagagtgagaccctgtctcaaaaaaaaaaaaagaaagcatatctgttgtcacctgaaattctcaggagcaacgagtacagttgtttctgttgtgacaaaacttgcaccatctacacaaaaaaataaaaattaaaaaatttaaataaaaaaattccaccttggctctgtgtggggaaaaaaggaggggacattaaatttctgttgaaaatttaacatcatgctaattgactaattgagacaactgcaaattaccagttttcttacagttcttcatatttacttgaatattataaatctttgaaaggcaccagggactttgaactcctcatttatgatttgttatttgaaatcatcagttttctacttatttagaataaatagctaattctgctatgctgcagaactttggatttgctcagaacaaatacacataggtgactaaactggaaattttaattcctcagtggcccttacatttttccccaaccttgatttcactttttgataaggttcactgaaatccaaggatctttctagatttctcctctttcctggtttcttcactttcaatctttaagtaaagtattaatttccagaaagtgaaaggatcttctctctctaaactcacccacattctcagtttagtttaggaaccaatactacagagtatattggtttacaaagtaaattagaaagtatagccatatatttctgccattgtttaggcagatatgtttttgctac

SEQ ID NO: 115293 - DNA, 1065 bp, Homo sapiens
tttgctctgatactcaagctttagtgcagtggcactgtcatagctaactgttaccttgaactcctaggttcaagcaatcctcttgcttcagcctcccaaagcattgggattacaggcatgagccaccacactggacctatatggtattttttaaaaagtatatatgggcttaaaagttaaaaaaaaaaaatcacttagaggttaaaaatgtctaccaggcctgcattttgtaacatacttaaatttctgtcgtttgctagggtttttttctttcttaccactgaaatataacttgagagcatttagtgttcccattgtagaaggagagattctttggtaccacagcgttgctttggtaatttttttgtgagaccacactatcctccagcactgtcaaatttaacgccttttgaagcatttattgatcaggttggaagcatgttccaactgtcacatcagaataggagcattatagatcctattggctaaccagtaaatgattcatcaggaagagatttagataagtttgttattggagtttatagctgttacagactaatacagaagaaaatatatatacatagcataactgcttccaccagggtgacttttttgtggtgtggttccatttgcttttatgttggcatactacagaggtgagtaaactatgaccaaatttggcctgctgacagatatatttttttcataaagttctattggaacacagccatgcacactcaattgcctttcatgctaacaggtagaattgagtagctgcagaaactatatggctcaaaaagcctgaaatatttattatctgaccctttacagaaaaaaatatgtcaacctctagcctaggacactgagtataaatgtagtatctgaaactctataacatacacaaaagtattcagtaatattcatttttagtctctgagaaagaacatatataatagttgtatgtgggtccatagtcacatttatttgggcacaagctagtgtattctattgcagattgatgctagcatcttggcatagattctatagatttatttttgcaaagaa

SEQ ID NO: 115294 - DNA, 1050 bp, Homo sapiens
acgacggagggagcatgccaactcaacagttttttcaaaccagcttccctttgtgtctgtagggtccaaggacgtaaccagatcatacaacacgcgccaggaaagcccaaaagaggggtgatccctcgatggaggtgccgcatcagcgttttctcacgtggcctccggggctctatgaatggcaagagattgcattccttctactacccctcccagcctccagccgggacaaggaactggagcaaactcggggctgcagttccgactggactcgcccacctgggcgcgccggctgcccagcctcctgaagcctcggggctgggccctgcggtgatgggcgtgctggccgtcgcagagccctctgggagttgtagtccgtagcggcgagaggtttgacagcgaccgcgggcttggcgcattcagaactccaactcccgccggcccctgcgacccaggctattgccgcttcctgtttggactaggagccccgcggtcgcaaattgcgagaatttgggaagggaatctttatcttctcgtctagttctccgaggttgaaggctcggcctgctcaggtagatcacgttcccacgtctagcaaactcgcccctcggggaggtgggaaggtatccgagggaaggcggcgggaagggttgaagttggggcgaagccggctgtcacctgggatagttctttgcagcgcatcggaaccgtctcttcttttggggctcagggaggccatagcctggagccgcggagactgctccggaggcacggcgcgcgctcctcaagggctcagggaaagaaagtcaggagtccctcggggtctgaggaaatccgagtgtctatgggagtcggtgtcagctggagccttagagaaaagatagggttggggtaaatgaacaccctgaccctcgggtgagagaaggagggagtaggagaattgtgggacttgcaggaatgggagcacccttctttctctctcttgagatagggtcttgctccgtcgcttgggcttgagtgaggtggcgcgatcacggctgggagcacctt

SEQ ID NO: 115295 - DNA, 1025 bp, Homo sapiens
gaaaaaagtcttcagattttaaatagaaaatattggataattgttcttgttttaatgtctgtggtagtaataaactggaacttttttttactgtagcaattaccaaaaccccaagtcatttcaagtatgttgttatttttgtgcccttaatgatgactcggaaaaatgtttggatgactcttgagctttttaaaagtagttttaaaagtcagtgtctttgagaaagaaattttagcaaatagatgttacctaaagaagcctaccttggtgcattctctctaggtttgggacttagttaaatgaacttatttgaaggaacattgtaactgttgtaatatagttagttgattaagagatcatctgtagatttcctttcattcttaaattattaaattctgattgtcatgtgcaagaatttcagagccgtattctgaacttttgccataattaaaggaagtttacgtgagaagaaataaagatgtggattaatgatgataaggacaccctaagagttagtgagaaaaaaattactcaaattgtcattaatctagagctatccagagaaatgttggaaggttccaaaattaacctgcattcagctattgattttataataagttgaattttctaaatctggcagtcattctaccactgctaatgtaatgcatgtgtgttaatagtaaatgattttctttagcctaaagtagggaaagtgaacagttagtatttgggagcaaagacagtcttcagctactgctgtgacaaatgtgattaaaattaaccatgaatattctgatgctacagctgaggatataccttttcattgtagttgtagtgcagtggcaggttgcatatataaattgtttccagtccataagtgaatttactttacagtgaatccttttttttctttttttttgagatggtgtgagacagtgttttgctcttgttgcccaggctggagtgcagtggcacgatctcggctcaccacaacctctgcctcctgggttcaagcgattcttctg

SEQ ID NO: 115296 - DNA, 1252 bp, Homo sapiens
aaccttcacctcccaggttcaagtgattctcctgcctcagccttccgagtagctgagattacaggtgtgcgccaccacgcccagctaattgttttttattagtagtagagacagggtttcaccatgttggccaggctagtcttgaactcctgacctcaggtgatccacctgcctcggcctcccagtgtgctgggattatagacgtgagccaccacgcctggactgtatagtttcaatcttgattttcttctcagtagaacttgcataactaataatgtggtttttgaagttgactcttcattgcttaaaatatcgactagcttgttatgtcctgtgaagtatgtctgagtagcttggacttcttgaatcacacatctttgaaatctgattaaaatacttttatagttgggcatacacaattttacaggtggtttcaggagttacacagatcccttttaactcccctctacaagggttttacagaggtaagtaagacagtatatagggatcacagggaatgctttaatttttttctcagtgatagtttaaagcatcattttatgctgttttggatgtctctcctgttctttttttaatgttttattttaaataatcgttcttgctatcacatctctgctctcgagatttttaatttagtggtagagaaacacatggaaagaaatactactttaaaaaggtacagatagtatgctgtgggaatgtggaagaaggataaattatgactggagggctaaaggaagacttcacataattggttttttgaagaatgaagtgaattttgataagacaaataagaaagtagggaatgccatgccaaaggaatagcatgtacaaagatacaaaatattagcagttgacagtgtggagtattggagttgtttggtgtgaattaaaatgttgggtgtttagaattacatagtgagaaacaaagctaagaaggttagtatggggaaatagtatggcgagatggggaggccaggaggggagtggtagtcttaggtttttcccttatgtagccccttgttttaattttaaaaatggaaaggatatgataaatataagaaatagaaaaataaaaaatagaacagttaaacaggacacgagtgtaagattttcaatagcagtgactttcacacagggcagagcgtaatagctggctctatcaggatgagaattcaacatatagaaaactatggagcagaattttcctgcttgaaggtctccaatataa

SEQ ID NO: 115297 - DNA, 1057 bp, Homo sapiens
aaagtaattttttattttgaaatagttttattcataagaagttgcaaaaatagtacagaggtttttcatgtacccatcacccaacttctcttaatgttttctatttttattcccactgtgatcaaaataactgtaggtttattttagggaaataattggccaaagatattgtgagactctttcccttgccaggtcccagattagtagttttgttttttttttttttttctcgaaagcagtaaatattagttatcatcattgttattccagggccaacttttcaaaacttatttctttcctgcccttctacattgtattaagtcctgccttccagaaagttgtcttgttaatggctcttcaggattgtttgtcagttgtcagctgcagctgaaataggagactgcaacaagagctttgggtcactgtttattgtagaacattattagttgttaaatggattgggactttcacacaggaacttagctaataacctgcaagctgtttggtcacttgctgtcattattttgacttaatgttcccagatattaaatattaatgatatgtacaaagatcccttgaaaccatctttgtattcccaaatgtgactttttttggaatcttctggaaagcctgatgtcatagtaataacatagaacttttacatttcgaaaaatcattcctttcagaataaacatttctgggaatggggtctaggaatttatttttaaccaactctccaggtagttttcaggcagccttcagtatagtaatctctcatactactattttaaaactctgggaatgttacttactaatatcaaaaatggagaagctaggatatccccaaattatttcattagcatgaatgggggaaagtttgcatatatttaagaaagcacaaatgtcttgagtttattaagaatggtaaattggccgggtgtagtggctcacgcctgtaatcccagcactttgggaggccaaggtgggcgaatcacctgaggttcaggaattcaagaccagcctggccaacatggcaaaaccgcatctctcctaaaaa

SEQ ID NO: 115298 - DNA, 1057 bp, Homo sapiens
agcagaggttgtgccagtgcactccagcctgggcaatacagcttgactccatctccaaaaataaagtaaattacagaaaagatatgacattataaatagaagagtctagtggtctatggaccttatgtgagaaccacttgattacttaatagcttagatgttcctgaaatcatttttggtcaaactgaaatttatgaaattcttattttttgttttgttttgctttgcgtagtataatgcttggcaaatagtaggttctcaatttcatataataaacatttaatatttagatacatgagatgatttgtatagggaatcgactctgagtaatgtctttatatatctgttaaaattatttgaagaaatatgtttatattttaacttatgaaaatattttgtcttcttactaatttatcttgtgacagtgctattctttatatattgcatcatttaagttaattaaatgctatttacatgttaaatttttattgaagagtctagtaatgactgcgaagataatccaacacggaacagagggttttccaagagaggcggtaaggaccacattttggaacaatttgtacttaacacagagacactaaactggtaaaactgattttgaaggagctggatgaaaaacactgatcgtgaaaacctttgaagaaaaatactttggtatatgttttctgcttttaatatttgagtgagtattcagtgggtgcccctcctttcactcttttattttatttttttaagtttttggttcaggggttcatgtgtaggtttgttatctaggtaaattgcatgccatggggttttggtgtacagattattttgtcacccagataataagcatagtccctgataggtagttttttgatcctgtacctcctcccactttctaccctaaagtaggccccagtgtctgttgttcccttctttgtgtccatgtgttctcagtgtttagctcccacttataagtgagaacattcagtatttggctttctgttcctgcattagtttgcttagaataatggagctccattcatgttcctgc

SEQ ID NO: 115299 - DNA, 1054 bp, Homo sapiens
tggccaggctggtctggaactcctgaccctcaggagctgtcacctcagcctcccaaagtgctgggattaccggcatgagccactgtgcctgtccttgttttactttctaatgtcactggatctgttggttgtggtttttttttcccccctatgatctccagaatgtgctatcaattacagaagagggacaatgtgaatcttggtcagttgcaatttagatgaactggggatgtctttgtctctgaatagagtcattggaaatttgaggggggaagaaattgtagattattttttgttcaagtctagctgtatttcaccatactctggtaattcagcttctattgaatttgagatgagattgtatcaaaaattaccatgcttaattcttgattatatatgggcagtcatgttaaaatagcaatgacaacaaaacgtatgaagaatatagtgaacttactataaaattgctgaggatgtgcaaatctatgataagaggttttattgtttggaactacatagtaatcagatacatcagtgtttttaccgcaccttggagacattcttttcctttgcccattaggtaggtagctggctgaattaggccctccctagtgaaggtaggacttgtggatttcataatgagggaagactgtctccttaattacttcttatgataattgtggagaggggtggtggtggggagaaagttaagctaagaaaaaacaagactcatcttttaccatattttttttaacaagcaatttttggcacttaatgttcctaaaacatagctcatatttgaaatttttttcttcagaccagtgaatatcttttgtactattaacatttactttaaatcaatttaattcatatttaaatgaggcagtcgaaaccatttgcagctctatgtgcttggtcctgacttacagattagtgtaggataattagcaggggcacagccattttgcagggtatccctgatttccattctctgtagatgtatacatttgaggataggaagtttgcatataggggtcactcagaaaatacacgt

SEQ ID NO: 115300 - DNA, 1175 bp, Homo sapiens
acttaaacttatgtgccttacaggttattaaataaaactagaattaacaaagaagccaaaatgtttcactttaattgtagacagacacagctcctatattgagttttacaacaaaaaaacccatgtctttcagcatgcatctacacagtgttcaatgtaatgtagcaaagggcaacagtgaacataattcaactccttttacctcaatacacttactgcttaagaacatcctataatataactaacttgagcaaagctggaacttgtttaacagttatagtttactcaacttcagtgttacatcctagatgagtattgtgttaaaaaatactgagccttaagtcttcataacaatcctgatttctacttagagagtaagcataaatcataagtttgtattgcagaaactgttaaactgaagttttgggtttttcttaaaaaaaaaattgagcaagggtcagtgatcaattatattccccatccaccactcatactggacatggtagacatccctcccattccattcacacctatagatgcacagcttccattactgtagtagctgctgttcattgctccttggctacctatgcaatgtctgattgaaaatcacatgagttttcctgtaaaacttggtcaaatccactcatgctgctgtggccaccatagccacctccataaccaccactcagctgcgggctggctgggccaccataactggactggattgacaagcccatgccccccatcatttggctaccgtaagcagtaccgctggctcctgctgcacaattcaagaagggttctacatagctgtgttgcatatttgctttgtcttttgacatagctgccacagcatcttcatgagttgcaaactcaacatctgcttcaccagttactctgccatcaggaccaatttcaatgtgtaccctcacagcattgagcagtcaaaaaaattacaaatgtcattctcagtagctctgtaaggtaatccacacgtatatacagtgtcctgttgtgctctggaaggtagagccaccatccccatatttgtgatcagacattcctgaaaaacaataattgaggtctcttccaaatctatctgacccaaatccatagccatagccattataattgtcacaggctccatatcctccaccataagcaccatgcct

SEQ ID NO: 115301 - DNA, 1071 bp, Homo sapiens
ggctctaaagaaacacaaggaaagaatagggcacaggtatattgaaatctttaaaagcagcagggctgaagttggaactcactacaatccaccataaaagcttatggccatgcggcggccaggtcccatgacagacctggttctggcagaggttttaacagcattggcagaggagctggctttcagaggatgaggcatggtgcttatggtggaggatatggagcctgtgacaattataatggctatggctatggatttgggtcagatagatttggaagagacctcaattattgtttttcaggaatgtctgatcacaaatatggggatggtggctctaccttccagagcacaacaggacactgtatatacgtgtggattaccttacagagctactgagaatgacatttgtaatttttttgactgctcaatgctgtgagggtacacattgaaattggtcctgatggcagagtaactggtgaagcagatgttgagtttgcaactcatgaagatgctgtggcagctatgtcaaaagacaaagcaaatatgcaacacagctatgtagaacccttcttgaattgtgcagcaggagccagcggtactgcttacggtagccaaatgatggggggcatgggcttgtcaatccagtccagttatggtggcccagccagcccgcagctgagtggtggttatggaggtggctatggtggccacagcagcatgagtggatttgaccaagttttacaggaaaactcatgtgattttcaatcagacattgcataggtagccaaggagcaatgaacagcagctactacagtaatggaagctgtgcatctataggtgtgaatggaatgggagggatgtctaccatgtccagtatgagtggtggatggggaatataattgatcactgacccttgctcaattttttttttaagaaaaacccaaaacttcagtttaacagtttctgcaatacaaacttatgatttatgcttactctctaagtagaaatcaggattgttatgaagacttaaggctcagtattttttaacacaatactcatctaggatgtaac

SEQ ID NO: 115302 - DNA, 1875 bp, Homo sapiens
aactataaaacttcacactttgtaccattaaaacctaaaattttaatcttgtccttttttactatggatcagtcggcactcgggaacagcagcaaggaaaaaaagcaaatttcattcacatgttctgtgttcatacctcttctctacctaattgttcatttaaatttcagccttattccttgataagggattttaccacatgaagtcatccagtgaccctagctcttattgtgaagttagtggagtatacttagaaatgttacaactttaaaatgttacaaaacattcattaaagctcatatttaaagtagagcatctagtttgagaaatagaaatcaattattaaagatgtcttttttctacccatttaactagttaaaaccatgacatgtaaatgtagaagtagaataatcatagaattccctaaaatatttctgtttactaacatatattgaccaagtacatcaagcaggagagatcttccttcattctgttatagtccacatcattctaattttgctcagttgttattaagagcatattcctaaaccatacacttttgtttcaataaagttttattttgttgagatgaataaaataacaaagttataagctgcataagacaaaagttcaattgttcaaaaaaaatttactgggatagctttctattacaggtattgttagattatattgtgctgataagattactttctaaaaaatttgtacttttctgtaaattaaaagaatatggagtcataaaatggcaagtgttttaggattagcctaaaattggacattgtcattgatttcaaagaaggtatgaactagcagtcttacagcctaattcttctttggactggtccttggcagcagttccttttcagactcgataaacagaattcagatgatgtaagtcaaaacaaaactttacaaagccaagcgtattatcttttgcattaacctatttttttccatcatacatgctactagtatgtgcattagcatgatattctcatatacattgcattaaaaattaaaaggtggcagctcagggtgagctcttctgttgctcatttgttcctaaatttttaagggctttttctcagtcaatagtttgtacaaactggttagtttaacttcattacccatttcattaaagttgatgggtcgtgtgatgagatgcatttaaggccgatagtgatagatgttttttttatttcttgaacacaggctttgtctgaatgatgttcttttatctcttgaacacaagctttgaatgataactacaggttttaagtgctgttacattaataccataatgtgatgtgttagaaacaaagggatatttcaaaggtagatatttgaaaattctctagtctcaatatgtatgtgtattgaatatactctaaaaataaatgtgcaatttgctagtaggacaatgcagtgactgactagcattaggtatgtttcttttatatcctagctatgtcccactttcttctaagtgcaatcctttcatgttcacttgctgttttaccccatctactctaacttcatttggaaggcttgtctagagtatagcatgtatttttacctttgcagtgaattgcatgtgctaattgtaaccacagctatttttatgttgacataactccaaatgttatattaaatgttctattatatattagctctaatcccttaagtaaattttaagaaataaatacttgttcaaattttttttctgtatgtggttactatcatctgactatgcatatttgtaacagcatttatcattagtggtgttagctaaataagcatcttagtgtaaatgagatgcttcgtgtgggttttgtgacattttaaatgacataatgg

SEQ ID NO: 115303 - DNA, 1391 bp, Homo sapiens
tcattattgtagagacacttaataaagagatggtattttaatgtctgcagttctgaggtagggtggaacttagttctacattgtgatttaggaatttttaaaaccttttttcttcaagggagaagtgacccaggcctcgagtttagtgctaaagccgctagtgtacttatgctgtcccctaaccaccacgtgcgatatggaagcagatgctaaatataggggttttcttagaaagtaagaggaaattagcaagcgttattagtgattgactactgctatcaagtgaattcaaaggaaacaggtttttatgccatatttaagttacagaaaccaggcatgcttagaatagtttctagaggttattggagaatagaaagctaagaaaacttggtatacatttacaatggaaatataattacactttttactctcagaatattgttcacattagacttcctgtttatcttttatattcttgcatttatataatgcctcatcctttcaaagttctttcacatattatatgatcttctttatgaaaaaaatagatgtttcattctgatatattcagtttcccactttaggcaaaagtagattaatagaatgacgaattcaaagtagatgaggaaaatcaggcacagagaagtaaaggtagggatagacccaaatttacacaacaagataatgacatctccagcttttaagttgatcatcaaaggctgggctggatttgtcttgctgtatgtgtcaggaaatttatacctattacattttccattttctcaaaatttaagtcacatgactaatatttagctgcaactttcctcataacaaatagtgtcatgaagaatgttgtagtgtgaagtttgtacatttcagggtcagatatacaatatgaactcttaatctacaggaatgagaatggaggatcattgaaggccatgatataaacaaatttgcatgttgaagcctgtataaaacatggtacagtgagtgaatatacccccatccccaagaacactttatacatattaaatggatatatgattactgtgcaaaaattcattctggaaatgaacatatatttgagcactaatatgtaatgtacacctgccctaaggagaaaataaattataaaactttttacattcaaaattactttcccaagcatgtcttagaataatctatgtgttgatgcatgtaaattgtactttaggtaggcaaagaaatctggttatttatgtaaaaactagtctaataaagttagttagtggctttatcactttaaatctttagtgtccaaaagtggtgtttaaagtaatagcacatcagaaaaccttgtctggacaaaactagttcactcactgcttctgcacctgcagttgctccct

SEQ ID NO: 115304 - DNA, 1987 bp, Homo sapiens
attttagcactgatgaaatgatctctgggaacctactctaaactctgaattttaaatatgccccaaaggggaactcatttatatttattatcctccggtagtccttaaattttatattaacagattaaaatgtattatgtatttttatattctacaaaatctctgtcattcaggtttgattttccttaatgttttctagttttctgtccagttaatcctaggctgcctagtctaggcatgaaatattaaatactacttgtagaccattagcttatcaaaatgtaacaccaacaatattgatttagactacttagactcattttatagtatctgcattttgggtagttgacagtgacttagtgacataatacaggttatttctgtaccactgagagttactgggaagtttcagagatgcattagctctgtggctttaactaatacttgccatatacaattttttctcttccttagcacaattttaattcaaaagatcaaatgtattcagatggcaatttcactgatgtaagtgttgtggaaatagaagcaaatgacaaaaagccttttccagaagatctgaaatcattggacctgttcaaaaaggaaaaaattaatactgaaggacacagcagtggtattggggggtcttcatgcatgtcatcttctaggccaagcatttctagcagtgatgaaaatgaatcttcacaaaacacttcgagcactgtccagtattctaccgtggtacacagtggctacagacaccaagttccgtcagtccaagtcttctcaagatccgagtctacccagcccttgttagattcagaggagcggccagaagatctacaattagtagatcatgtagatggcggtgatggtattttgcccaggcaacagtacttcaaacagaactgcagtcagcatgaatccagtccagatatttcacattttgaaaggtcaaagcaagtttcatcagtcaatgaggaagattttgttagacttaaacagcagatttcagatcatatttcacaatcctgtggatctgggcaaatgaaaatgtttcaggaagtttctgcagcagatgcttttggtccaggtactgagggacaagtagaaagatttgaaacagttggcatggaggctgcgactgatgaaggcatgcctaaaagttacttaccacagactgtacggcaaggcggctacatgcctcagtgaaggactagtagttcctgctacaacttcagcagtacctataaagtaaagctaaaatgattttatctgtgaattcagattttaaaaagtcttcactctctgaagatgatcatttgcccttaaggacaaaaatgaactgaagtttcacatgagctatttccattccagaatatctgggattctactttaagcactacataaactgactttatcctcagactagctgaatgattttgtgctgtttcaggatgtttgcactgaagaaaaacagaaagcttatctgaaatttataaaactttttgttttgctacatagaaaacagaaggtatttgaataataagcagtgatatgcttagtgagcacagctatactgattttgattagaatagtcatcagagtggcttagggacagttaatataaaagaggagcaaggtgtagaccatcatctacttctgctaaaataacttaaaaagaggtccataggccataactacatgagcccagcttttgtaatctgacaaaaaaatgaggagcagcttcgtgtatatcagtgtacacggtattccttaggtcccttccattggtagtgatgctgcgagttattactggagaaaaggaattctagagctttaacttggcagattaaaagtactcattttttattcatcaataattagtaatctcactagttttcaaaaatttgcatattattgacaacctctttgaagatgcatttcacaaactcaacagagtgccatgataagagctagggatccc

SEQ ID NO: 115305 - DNA, 1050 bp, Homo sapiens
tggcaatacttttacagacagttttacctgattaagcttgaatccagtacacaaaagacaatgcttacttagaaaactgcagttttaaaagaaaattaagtggtcatgaaattataatgtaaaaataaattacggtattaacttgactttttcattatggaaaaacatgcttaatctgctattcttgctttagggaacttagcagagagcaaatgctatttgataacagttactccagtatatgctgatggaccaggaagccctgaatccataaaggcataccttaaacaagctcgtaagtccaaactcacttctttgaaaaaaaaagtttagggctttgtattaacagaaacattttatcgcttttaaataaagatgtatctcattatgttcaaatgattttatgacaaggaaattttactagattgtaaatgattttcagttagcaaatgtgttcactctgttacagcaccttccaaaggacctactgttcggacaaaaaaagtagggaaaaacgaagctgtcttagagtgggaccaacttcctgttgatgttcagaatggatttatcagaaattatactatattttatagaaccatcattggaaatgaaactggtaataaaactgtatcagttattaagaatcagttattttttccttaagcttttaagtactaatttaagtctgttcttcttatacatcttatagtatattggcctcaggagacacctgagaatttgccttatggttactttcatggatttattgaaaaagtattgtgttgtgctttagaacataaaattatgtcagaacattataaaagttgttttccaacaaaaatacttcgcttcttttttaacactttcacaatgccaaatataggccaaataagcaaaagcattgaatagttgaatgaagcacagttcttatttcttccagctgtgaatgtggattcttcccacacagaatatacattgtcctctttgactagtgacacattgtacatggtacgaatggcagcatacacagatgaaggtgggaaggatggt

SEQ ID NO: 115306 - DNA, 2916 bp, Homo sapiens
tttcaagattttgagaactttgtatacatatgactgaaacgtttatctgtagctttattcgtagctttcaaagaagaaaaattgcaattacaaaccgaaagcatttgaagaatttagggaaagcaaatttttttttttctttttgagacagtcttgctctgtcgcctaggctggagtgcaatggcacgatctcagcctctgcctcctggcttcaagcgattcttgtgcaccagcctcccaagtagctggaattaaaggcacgcaccacaatgcctggctaattttgtatttttagtagagacggggtttcaccgtgttggccaggctggtttcgaactcctgatgtcaagtgatccacctgccttggcctcgtaaaatgttggaattacaggaatgagccacagtgcccagcggggaagcaaaatctaagtttaaaaattgactactttacctgtaagttataataaagtgcttttaggcaaggaagtatatgctacaaaaattgataaatcacatgttttggaaatgactgtaaaatatggaaatttcaaatttgttaatatttattatttcaatattcaaactttgttttaaagctactcaccctgtaatggatcttaaagcattccccaaagataacatgctttgggtggaatggactactccaagggaatctgtaaagaaatatatacttgagtggtgtgtgttatcagataaagcaccctgtatcacagactggcaacaagaagatggtaccgtgcatcgcacctatttaagaggtatacctggctagaaacatctaaattgatatcctttttctaactctttaggcagctttttcttttgcttatagtgttttggtccgttgaaacgacttccaatttatcatagcctcactacttactagatgtgtgactttcagcaagtcatacttaacctctctgaattacagtctctttatgaacagagtggggttaatactttcttctttttgtaccccaatatgattttatcgtcaagggaaaactcctaaaactatagagtatagagaaatataagagtccaacctttgctgctgattagttatatgttctctgtacctcatccttcacatgagaaaatagtttcctagagcatctggatgacttgtgtaatgtcttagaaccatcagatagaggaagcagaactagaactcagatttccttatgtctttcaattggaagtagtaacaaaggacagaagtaatgaatcgtagcgctccagtctgtgtgttatggtgctgcttaagtggttataaagtgatacaacaactttgaagagaaaaaaactcagtttatagtcttttgttgataattaataattagaattcagctgtgaataatatggttaattagagaaaagccctaagcagagagattcctgccataaagtttttgagctttagtcataatacaggctgtttggacttacatgttattagtgtacagttttaataagcttggttatctagtttactgactttatcaaattaaaaacatggtggagcttaggaagtcctgaaacaggctggaaataactatagaaacttcttaaaaaaaaataaatacagggtctcactctgttgcctaggctagagtatggtggcatgatcatggctgactgcagccttcaactcccaggctgaagtgacccttctgcctcatcctctggagtatctgggactacaggcacatgctgccacactcagctaattttatttttttgtagagagggaatctcactgtgttgcaaaggctgatctccaacacctggcctcaagcgattcttttacctcaaactcccaaagtgctggtattacaggcgtgaaccactgctcagagccaatagaaactttttaaagcagcagccgatgcggtggctcacgcctgtaattccagcactttgggaggctgaggcgggcaaatcacctgaggtcgggagttcgagaccagcctgaccaatgtggataaactccgtctctactaaaacaaaatcagctaggcgtggtggcacatgcctgtaatcccagccatttgggaggctgaggctggagaatctcttgaacccgggaggcggaggttgcagtgagccaagatcatgccattgcactccagcctgaacaacaagaacgaaactccatctcaaaaaaaatagaagctagcataagttgtggagacattaagtttgggtaggtagtcgtatgttgctcagtaaccctgaaagcatcacattagagtagaatataaaaattgttcattttttggtaatattgaatcattaagaaaaggtaaaatctgtttaagaaggtaaaggagcatgtaacttcatgagtaatagttaaggaatatacattcttattgaaggtataaatttcaataaaacattttctaatatgtacagataatatactgtataaataagaaaaattttagtggtgcatgctaaaaaagataaaaataaaggaagtttgttttggtttttgtttttttgagacagagtctcactctgtcgcccaggctggagtgcagtggtgcgatctcggctcactgcaagctccgcctcctgggttcaagtgattctcctgccacagcctcccaagcatctgggactacaggtgcccaccaccatgcccagctaatttttgtattttcagtaaaggggggtttcaccatgttggccatgctggtctcaaactcctaacctcaagtgatcctcccaccttaacctcccaaagtgctgggattacagacgtgagccacagcgcctggccgaggaaattttttaagatacccttttttccaactcgcaaactaggaccgttagtgctttcccctaggtcttactgctttagtcgtcttgctccttaggctgttctct

SEQ ID NO: 115307 - DNA, 1049 bp, Homo sapiens
attcattttaatagcaaagcatttgattactatttttactaaatagaaaggtaatgctttatatgtattaatattatatagaagtcaggttcataaactacaaataataccttataggtatttaagtacagttctgtgaaagtataagttctataagaagaggaatgttgtttttgtactttggaattttccagagtaactcagaaaataataaaagtttgtgataatcaaaatgtatgctggtaagtgcatgagtagatcatactaaaaaagaaggtagaaaaatactcaagcataaaataaataatttagacctacatagccacagtgcagaattgatacagaaccaaaagctaacggaatgatgctacttacccttttttagttgaggtcatgcttttactcttcatttagtatgtactagttttattttagaaccaaatttaaaatggagattgtgaatcctttccagttaaatatttagagatttgacataatggcatgatttgtgaatatgaagaaaaactgattttttattcaagatttatgagattatttttaaaaataaactattttattacagacattgcctccttttgaagccaatggaaaaatcttggattatgaagtgactctcacaagatggaaatcacatttacaaaattacacagttaatgccacaaaactgacagtaaatctcacaaatgatcgctatctagcaaccctaacagtaagaaatcttgttggcaaatcagatgcagctgttttaactatccctgcctgtgactttcaaggtttgtatctgtgagatggagcctgactcttgggtggaaaaatggtggttaggtatggacagggctcccataaaaaacacaagttatctaagactgtctcctcagtatcagggataatcacttgtttattttttaattttttaaattttataaataatgattttctttttttcagagactgggtctcgccaggttgctcaggctggtctcgaactcctgagctcaagcgatctcccctggcctcccaaagtgctg

SEQ ID NO: 115308 - DNA, 1010 bp, Homo sapiens
tcgcgccattgcaccattgagctccagcctgggcgacagagggagactctgtctcaaaaataaatagtttctaggctgagcgcagtggctcacatctgtaatcctggcactttgggaggccgaggcaagtggattgcttgaggtcaggagttacagaccagcccggccaacatggtgaatcttgttgatactaaaaaagtacagaaattagctgagagtggtggcgggcacctgtaatcccagccactcaggaggctgaggcaggagaatcgcttgaacctgggagaggtagaggttgtgttgagccaagatcgcaccactgcactccaacctgggcaacagagcaaggctgtgcctcaaaaaaaaaagtttctgaattttaacacaatttagaagaccttactaattgaggttttctgttgtttggtttgctttgtttcagattcctcctgaagacacagcatccacccgatcttcattcactgtccaagaccttaaaccttttacagaatatgtgtttaggattcgctgtatgaaggaagatggtaagggatactggagtgactggagtgaagaagcaagtgggatcacctatgaagatagtaagtacataagtatatgaagaagtaaagctattggaattccagatgtgaactggttctggttttaataatatagcctcattgcttcttagtttgtgatcattttattcaaactgcagtattttaacgttttaatttttaaggacattaagatgtaaaattgaatatggatcattgatagtataagtctatttgatacctaattaaattatcatggaggccagatgcggtggctcacacctgtaatcccagtactttgggaggccgaggtgggcggatcacaaggtcaggagtttgagaccagcctggccaatatggtgaaaccccttctctattaaaaatacaaaaattagccgggcgtggtggtgggcgcctgtagtcccagctactcgggaggctgaggcagga

SEQ ID NO: 115309 - DNA, 3378 bp, Homo sapiens
gctaaggggtaatagaaattcttacccctaacctcctgtcaccttctagcatattgtgcttaaagaaatttgtggtacagtaagggttctgttttaggaaaaagaaaaaacagcactgggatcacaaggaaatagataatttttggagaggagtaagtggggatggagcataaaattttaaagcacaatatttttagactacaaatttgaaaataattttatgttttaagatatagatcaaagttaattttaaagaaaggtttatttttaagaaattttgttagtgaccagcagttatattgcaaagtttgctacaacaatctaggtctcatcaaactctttgcaagtaatttttttcactctaattttttcagatgtgtttttaatgactgattcttcaattttttgtatttagggcaacacacaagtttgctgattgcaaagcaaaacgtgacacccccacctcatgcactgttgattattctactgtgtattttgtcaacattgaagtctgggtagaagcagagaatgcccttgggaaggttacatcagatcatatcaattttgatcctgtatataaaggtagttataaacctgaatttgagagtttatttgacactgtagtcgtttacaaattaaagtagtttttatatttagattttttaagattttaatgtagatttttagattttaattaatgtagtttttagattttacttttttagattttaattaatgtagattttagattttaattaatgtagaaacaagcatttatcttagtgatttttatgaagtcattttatcaataatatcaaatagaatttggaaaaagaaaaatatccataatccaaccacacttaacagctgttttcactttgaatgttttctgttctcaaacatcttacaccattgtaattacagtatgtatgttccatttttattcttttttaaaaatttgatatcataaatatttgtcttttgacatatgaacctgaagagattaacaaatgtaaattaacaaggagaactgaagattctttagaaatctttttttttccattataaggtatatagcatagcataattttcagagaaattagttcatttggtaaggataaattattgtaaaataaaggaaggacaatataaagagtatatttgagtttgtatatgaaattggaaaacataataaaccttaggatttattttatttttcagtgaagcccaatccgccacataatttatcagtgatcaactcagaggaactgtctagtatcttaaaattgacatggaccaacccaagtattaagagtgttataatactaaaatataacattcaatataggaccaaagatgcctcaacttggagccaggtaaattgaaagttaccgtttattcaaatagtccttctttcaaccctctaatcttaaaaagtttcagtcattttctaaatgtctttaagtttctggttatgtgaaatattttgcttgataacctcttctgggttgttatttcaaacaaggggaatcaggaagatatccagatagaaaatacagctttgctaaatacagtagcctttaagtaaaacatgaaaatgatatagggtgataggaaatggcttttttttttttttcttctagagacagggtctccatttgcccaggccgctggctcactgcaattttgaactcgagcttaagtgatcctcctgccttagtctcactacaggtgtgcaccaccacacctggctttttaaaattattattattttttgtggagatggagtctcgccgtgttgcccaggatggtctcaaactcctggccttaagcgattctcctaccttggcctcccaaaatgctgggattacagatgtgagctaccactaccagcctagaaatggcatttttgatgggtgttacaaagaatacaagtaataaagcaaattaagtagaggagcaaaaataaagagattataaggataaggtagctagtgtagggattggtgtgctgcagtccaccaaaatcagcctgtgacttgtttttgtaaataaagttttactggaacacagccacactcatttctttacatattgtctctattctacagtggaagagttgagtagttgcaaaaagagtctctggcccacaagcctaaaatattagtaaatattttatctacctttttatagaaagtttgccaaccactgaggtagaggaagggattgatagggagcttgtaagactgaaaatgatagtatacccaaagatgatgctaccagcaaaagaaatacttggagcttttaaaaaggctatcaccatagcattcagctatccatactcttctctgttttgattccatttatcacaaacagtatgtctttgcttttgttgctctggtcacagtgagcttgttagggaattgggctaatgactttactacttctctccttaccccacttatctaaagtgctcagaatacaatcagaaaaagcaataaaacaaaattggattaatgcttcatgttgtacagagaatatacatacctgaagttcttcaaaatgtggtattaagtatagaatcttaattcagtgctacaaaaaagactgatgtttattttgtatctaatactaaattatcagagtaatatgaccagttatttatctgtatttaatctcctctttttttctgaaagccaagtttaaaagccaggaaaacttttgtttttcttgattgggctggatatcttccttttgcctgtccacatctacgctctacccttctctttgttgtgtcatgctgacctgtatagatttcatctgtgggtttccattctttctagcttccttgtgactgtggttaatggaaggaagggactaggcaggagagaagacagaagaaaagtgaaattggcatgttgattttccctgcttccttccaggaactggctgtctttttttttttttttgagatggagtttagctcttgttgcccaggctggagtgtaatggcatgatcttggcttactgcaacttccacctccctagttcaagcgattcttctgcctcagactcccgagtagctgggattacaggtgtgtgccaccatgcccagctaatttttgtgtttttagtagagatggggtttcaccatgttggccaggttggtctcgaactccagacctcaggtgatccacctacttcagtctcccaaagtgctgggattacaagcgtgagccaccgcacccagccggctgtctttcaacttagggtcactacctgtcaagacagccctctctagctgaccggcttctttcaggttctggtacttcccctcatccctttgggcctagaggtagaaacagctctaagccccag

SEQ ID NO: 115310 - DNA, 1093 bp, Homo sapiens
gcttcccaggttcaagcaattctcctgcctcagcctcctgagtagctgggattacaggcatgtgccaccatgcccagctaatttttttctatttttaatagagagggtttcaccatgttggtcaggctggtcttgaactcctgacctcgtgatctggctgcctctgcctcccagagtgcttagatgatagacgtggccaccgcgcctggcccccttgtctttttctttccaaaaaattgcttttagatctacagatttcatcagatttgggtttgattttttttttttccccaaaaaaatattttgtaggagtgatgtgtacttctgtcaggaaagaccagataatgtttcactgtttttcttttttctgatactaagattgagcagtggtttcgggtgttgtcagccttattcctttatttactaagtttcccatttgttttttccaaacagaaaagttgaaagagttttacagtgaacactcttgcataccctagattctacaattaacattttactatctttgctttatcacctatttatctatgcatccttctctccatctctcaatctatctcttttttatgtatttcatagtgagttgcagtcattaatatacctcacccttaatcacttcagtatttcatagtgagttacagtcattaatatacctcattcttaatcacttcagtatttacatgaactagagttcagtattatgtttttaaataaaatttacatatagtgaaaacacaaatcttagtgtatcattcagtgagttttgacaagtacagacacctgtgtaactcaatcagtatcaagacatagaacatgactaacacacctaaaaagttccttcctgctccttcagtcaatcccagcaagtgccccaccccatgagcaactacctgtctgatattcttcaccatagattattttttcctgttacagaatgtctcatataaatgggattatatagtatatactcttctgtgaaaagttttataactcaacagaatgtttccgaaatttaatcatgttgttttcccactagtatttcccttacagctttgagcagtcatcagtgattata

SEQ ID NO: 115311 - DNA, 1076 bp, Homo sapiens
acttgtatttccttttctataaactattcaaatatgtttgcctgttctattaggtgttagaattttttagtgatttgtaggcattctttatatatcgggaaaatttttggccatgctatgaattacaaacatttttttccatttgtcaggtatcttttaaggatacatattatggtgagttttgccatgtagaaatttgtcagtctgaagttcttaatctcacagttatttactaatataagacttcacataagaaagaaacaagatatctcttttaattaaccttaaagtataaattatgttttctagcagtgttttccatagccataacttcagtgggaataaagaaaaataatgtgaagacttaagttttctacattctcataagaattttaccaccttttagaaacacagctacagcatggaaacaagattgtgtcttaaattatgtgtatataagagaaaaaatattaaaagtaatattacatgtgtctgttgcagaaatatccgcgcaagatgttgacgttgcagacttggctagtgcaagccttgtttattttcctcaccactgaatctacaggtaaggttcatgaaataccctatcttctaacttcacaaattaggtttatatatttttatattattatataattaagcttatgtttaattattatgttcatatattctttctaggataatcgagagaataatatcttaaattgattttaataaaaatattcttgataatctgtttttgtataatttgagttgtaacagtcatcttacatgctaagtcagtaatttaagtcagtaatcttaaatgctgtatatcaatactaacaataactttaaaatggggaaggaaagaagtgtgtgggtttttttttttttcttcagtaaatgaataggagaaaatttgttaaatcttgttaaattttacgtcattcatactacatgctcttcaggtattgaagggctgctttcctgtgtctgtaagtccttgtccccaaattacagttacccagatatctaatcattctataggatctggtttttaaccctgtgcatgctgatta

SEQ ID NO: 115312 - DNA, 1229 bp, Homo sapiens
actttgggagtctgaggtgggcagatccctttgagctcagcctgggcaacatggcaaaacactatctgtactaaaaataaaaaaattagctaggcatgatggtgccatctctagtcccagctactcgggaggctgaggtgggagaattacctgagcctgggaagttcaagctgcagtgagctgtaattgtgctactgcactgcagcctggtgatgggagtgagacattgtctcaaaaaaaaaaaaaaaaagcactagaatatttgaatactcttatacaagtgtttatgggtttattttattctgaagctcagaacatatctaaagtaggatactttctgcaaacccaaaagcctaagagcagatggggatttttaaagtacacatataataaaattatcaaagccagccttctgaacaagactctcctctctttacagtgaaacccaatggaaaaagcatgacatttagaagtagaagacttagcttcaaatccctactccttcacttactaattttgtgatttgggtaagtaattgatcttgtctgaattttttgtttttttattttacaaagttccaataaataatccctgccctactcacctgattctttaggatattaggagactaaagtgaaataatttatgtgacaacattttgtgtaatgtaaaataatatcctagtgttaattgttatgaactcataattgatactaatggaagagaacagagtggataatttaaaaactaatttaataattagttaattttgtgtaggtattaccaacttctggcagtttattcacagtaacactgtactgtgaaagatatatagaaattttcttcatcttgatccccacgcaacttattaattcaacaagcattattttgccttctatttggcaattttagttcatatactgttctacaattgtaatagtaatgttaccatagtaacaaagtttatattgacattctttttcacatgcaatgtaaatctaaatatattcgtgctttttatttcatccttaggttaagttagaaaatgaaaaaaaaatcacaatccataggtgacaaaaataatttataaagagcctaaccattaaatatttatccattgtaactctactgctttttctctcacttgagaaaacatatggaaatgaaagtaaatgagaatgaacaactatagggataatcttgaatttattctattttaaataaatcat

SEQ ID NO: 115313 - DNA, 1030 bp, Homo sapiens
aaggagacaagaaagaggataaaggaaagaattcaactacattatctggttacatagaaaccaggatataggagaaattcaagaaccagggatggtcaacaatgtgaaaggcttcagaaacacttgtgatatatatagtcaaaatggctacagtctcttcttcttcttttttttttaaactttgcggctatctagtgtatcttagtaagatttaataagaaattagctgattgatcgtgaataagagagctacattggctgaaaaatggctatagtatatagatgattgttttaaagctgtgtgtatacatatccagagcaggagattcattcctttcagcactgtaaatctgttgccctgttacatttggaatgttctgcctccaaagtttcattttcttttaagcaatcagcttcaccctttgctctaaggttgattgatctgctcagtctttttttgtttggatgttctgttttatgtattacccccaaccccaccccctagtgcaaagtgagttaatcagagctatgtttcagatagcatagctctggttagactggcatgctctgggattttgtcattggtaatcttcacttgacaattagagtcaaagatgatgtagagttcatatgtgtgctattttctctatctaggaacccctacccttattttaagactgggcgctcctggcccctgtctgaattgggtattttctgtgctcctgtggcactttgtgcatattctgcatctctaaactttggacttcttaaaggcaagaactatttatatggcttcaattatgtttgtaacggaataaaaattgaataaaagcttgagcttttatttcttaagcaatggtgagaacatggatgttcatcaaagtgctctgtaaaccttttcatttggctaaaatagtctaattttaaaaggccctaaggtcataagcatattctatgtgtttttcaatatgcttataattttgcttttgcatttaggtccttaatctggagagagagtgtatgcttatac

SEQ ID NO: 115314 - DNA, 2334 bp, Homo sapiens
tggagacgcggagggtcgaggcggcgcggcctgaggtgaggaggggccgggtgctgggtcgcgtagctggagttagagtgtcggtggtttcggacgggctatctggcactcgaggagacctcccttccccctgagagcagcgcccggaacttgtcagcccagcctggaaatccccacattccttccccttcctgctcccggacctccgaattctacttccacaactttgtcacctcgattatcgcagccctgagtacaaacttcacccaggcgcacgcacgcacccctcttaacgcccgccccgcagaacgcccttcaagaacaaacccccctttttgttaccagatcccacgtttttcccaatccccttttcatctcccctgaaattctattcgctccgcacttgtcttcattctcgaggtggatttcccttccccaaagccgttttttcatcttgaaatcgtaacgtttcagctttgttgaaagttcacaatgcttataaacactattaacgtttctttccttcttttgatcttttctattaataattatcattcctaacgaattccacatctcactgtatcccaaggagaacaaatcagtttttaaaattttacctcctccgacctaaacttttgaagatagtgcaggaagcaagggtctgttcttcagtggatgaacagcattttatttcataatccgaaactgaaaaaaaaaaaaaatcacaggttaaaaataagacgtcaccttttttttttttttttttttttgccttcagaaggaaacgcattttggcttagtttgtgaagtatttcaacaattatactgccttaaaataactagttattagaatgccagggtgaattttctgaaagattgtggtatttgcttttgacagtgctgtaaacaaaccctttaaactgtgtatgactgccagcttcaagttggaacaactcttaatttgaaattacggactcagatcatcagtttagctgtgtgccattatgttaatttcttaaattcatgttaattcctatttggaagtatttttgaactatgaactgaaatattacatttatagaaccaacttgctattaaattgtgctttccaactatttctctttagggataatcttgaacgtttgtttttaatcttgagtgaaagaaaaaaattacaggaaggagaaagtgtcaaaaaggacagactgtagtgggatttttttcttattttaagtatgtattgacaataccagtttaattttctcacaggcaatttagattattataaatactgctgccacctaatttaatataatatagtcttacgtaactaaaaatgttgttctcactcttatttgtgaattgcagtattttcaatttatttaaatttgtttccaaggctttgcacttcagttcagtgttagggcgaaagttaaatacatgtgaagtaggtgttaaaatgtcccctttatagagaaggaaacaggagtctcgctgaaaactagatctgtgtgactccaaatcctgtgctctgaatcattttgtcatgttgacacgtttctcataaaaaccccagtgccacaatttggtttgggaacttaagggcaacccataaatcctctacagtggcagggagggattccccgctccctcctttcagagctgctcattttaatgggagtcagaattctctggccctaatacatttgcagcttggctcctagagaagcatggaatgttctcacagcttctccgtttctttgattgcaaaggcagaatgatcagagttgaggttcctattgtgctttattattttacacagcaaatactaagcaattactacctgctgtacgaactcacaaaggtgcaggagatgtaatcaggaccttcaaagagtttataataattggattgacaaacttatacgaaaaaaactacaaggatgcaaagcagttttaattaaatgcagagtgatgcagaaaatcctgtagatattaaaattagggaatgatcgtttaaggattggagtgagcatttaaggattggaatgagcaaaggatttaccagaagttggccttgaaacctgggtaggatttggataaagggaaaaatgaagacagcccattaataatagcgaatggaggacaaaatgtagaatggagaatatagaacataatataggactagcttgtggaaaggatcagcagtaactaaggtctattaattaaaacaggcaatatatttagtgcttatgttgtgccagttgctgttttgagcactttgcccatattaaggcatttaatcttcataatattatgaagtaggtctaataat

SEQ ID NO: 115315 - DNA, 1279 bp, Homo sapiens
catgattgttaagtaatgtctgccactggtagaagataaaatgatgtcacatatgtcacatacttgccatctgtcatccaatcctgttttctcatgacagttttaaaaatattaaataaaatagcaaaatttcctgtcttagcctctcatccaggctaaagcacctagtagaaatactgaagtctgtaaattctggttgatatcaaaagatgacccctcaaggcatccttgaagtggccttaaaattagagcaagaaagagcattttattttttcatttattaccttttattagatacctctggctcttcccttttgcggctatcaccgaagcaggagtggccaaaatgaagtttaatccctttgtgacttccgaccgaagcaagaatcgcaaaaggcatttcaatgcaccttcccacattcgaaggaagactatgtcttcccctctttccaaagagctgagacagaagtacaacgtgtgatccatgcccatccgaaaggatgatgaagttcaggttgtacgtggacactataaaggtcagcaaattggcaaagtagtccaggtttacaggaagaaatatgttatctacattgaacgggtgcagcgggaaaaggctaatggcacaactgtccacgtaggcattcaccccagcaaggtggttatcactaggctaaaactggacaaagactgtgaaaagatccttgaacggaaagccaaatcttgccaagtaggaaaggaaaagggcaaatacaaggaagaaacaattgagaagatgcaggaataaagtaatcttatatacaagcttcgattaaaacttgaaacaaagaaaaaaaaatacctgtgaatacccaagagtgccataattatttggaatctctctaaaaacactgatttttcacaacttaataatgaaattagtattctcctaccacccattgcacacacattgctgttggtgtgtagtgtgttgctgtggagagaacattagatggggagttagggagtgttatggcccgaattatgtctcaccaaatttcatatgttgaggccctaacccctagtcagactctatttagagacagggtctttaaggaggtaattaagcttgaatgaggtgataaggatggcactgttcttcaaaagaactgaattccttatcgaaggggaagaagcctcattagggcatgcatgcagaggaaagaccaggtgagaacacagcaataaggcgggcatttgcaagccaaggagaaagcctcaccagaaaccagccctgccgaca

SEQ ID NO: 115316 - DNA, 1037 bp, Homo sapiens
gaaatttggtgagacataattcgggccataacactccctaactccccatctaatgttctctccacagcaacacactacacaccaacagcaatgtgtgtgcaatgggtggtaggagaatactaatttcattattaagttgtgaaaaatcagtgtttttagagagattccaaataattatggcactcttgggtattcacaggtatttttttttctttgtttcaagttttaatcgaagcttgtatataagattactttattcctgcatcttctcaattgtttcttccttgtatttgcccttttcctttcctacttggcaagatttggctttccgttcaaggatcttttcacagtctttgtccagttttagcctagtgataaccaccttgctggggtgaatgcctacgtggacagttgtgccattagccttttcccgctgcacccgttcaatgtagataacatatttcttcctgtaaacctggactactttgccaatttgctgacctttatagtgtccacgtacaacctgaacttcatcatcctttcggatgggcatggatcacacgttgtacttctgtctcagctctttggaaagaggggaagacatagtcttccttcgaatgtgggaaggtgcattgaaatgccttttgcgattcttgcttcggtcggaagtcacaaagggattaaacttcattttggccactcctgcttcggtgatagccgcaaaagggaagagccagaggtatctaataaaaggtaataaatgaaaaaataaaatgctctttcttgctctaattttaaggccacttcaaggatgccttgaggggtcatcttttgatatcaaccagaatttacagacttcagtatttctactaggtgctttagcctggatgagaggctaagacaggaaattttgctattttatttaatatttttaaaactgtcatgagaaaacaggattggatgacagatggcaagtatgtgacatatgtgacatcattttatcttctaccagtggcagacattacttaacaatcatg

SEQ ID NO: 115317 - DNA, 1718 bp, Homo sapiens
tgtttggagtttgaatttggcctttgaagtttgcatttggcggagtggtgtaagagccaggaccggatgtgtcagccattcagtttcaaagcagtggtgactgctccccgcagcccctccggcttggcccggggactgcggcgcgggtgcagtgcttcctgctcggtgccctggcgcgggccgcccgctgaattccaggggccgcagtgcggtgggcttcggctcagatgcgtcttctggtgcatatgaagtacagtatgtgtaaggtaatttagaccagcggtttattggcctcgcccatttttggctactggaaatttttatgttaaaggaaattcttttaagtgtgacagctacatccttgtttgtttgttttttaaaaacctgattaacgtatgcaaagtacaaagtcttgatgggtattttgagttgctggaaatgtttttgtgatagtccctcgtggccctgtagaattccctgacctttattatgagaagaaagcgtgtcattttgtgagacgaatttgacagtaggagtccttggtttggattcattatctaaagtgatctggcattttttgtgcatttgattatttgcttaaaatcacgatccatttagtatttggaagtccccttcctctccccaagaactaaaaaatatgcttcgcactgtaccatggcactactgagaccaaaggagatttgtgactgatacagttttgtgtgcacttgtacatgtaatttattcttacaagagttatgtacctctatagttttcccatttctgtgcagattgtattaaaacttaactggaataattctttgaaggcaacttctactttaaatgaattccagataaaaatttttaaccccaaatttaagaaattgtatctattgagacctaactttttggatacaataaataatttagcaaacgtcagcattctagtactcttaatgagctgtgaatatagtagaagagcatccactgtaaaaataatgtactgaaattgtttaatgttgtctcttgacacaaaataagaggactaaggtggaggcagatagaatttagggactaagtaatccatgcttagtatttgcgttttgtaaccgaggttttttcccctttgcttaaggtgtagattataattgcacagtataagaaaataatgggcttgtaaggataatcttttttaaagaaattatttttacgagtcagaatgctgttggtttatcccaaatgtcatacgtaaagatttcatttatagtaaaatgttgattccctaaccttatgaaatatagtgaatttttttttcttaacaattgggttgaaattcatttgaatctgttcgtataaaactttgtggggaaagggcttgtatcttatttgagtgtgtatattttgtattgcatgttggttatgctacactattacttaccatttaaagttttaggaaaaaaaacccttaattatagccaactcaataaaatatcaattgaactttatgttttacttttttttgacagttaagttacattcatacttccaagaggaaaatctaagattttgaaatatttgagagttctgtgatcttttttttaattttagaatttccttctgatctttgaatgtagaaaatatactttgaattagaatttatataaataaataatactcgtatttaaatagaagattttaagtttgtccctctttttcag

SEQ ID NO: 115318 - DNA, 1088 bp, Homo sapiens
gattaggagtaacccaaagttgtctttaagaaattatttaagaacatgtttaatcatgaaagaaataatcagggccggaattagtaaatggttcattgcaaagcatgagattagtcagatactcttttcagtttgcaaaaatatattaggattttatctgtggcttaaaacatactcattgagcatatagatatgcctagataccttttacataatcaactcttttgccttctgtgtgtgtgtatgatatctattatatgtattatatatatgtttatatataatctcatttgatcatcactgcagccccctaagatagtgtaatttctgttttctgtaggtgcaaactcatctgagatggtaaaacctcatgattacacaactagaagacagctaggattcaatcccaagtcagactgactccacagtccatttctttccactactctgcttcttccattttcttttttcaaattaataatcaaattaattgattatttttaaggagaaatttgttttgcaggcattctaatagaccatgagctaggtctctaccctgtgctaagtttgcctgttaatgtatataataggtatgtttctgtaacctggccttgtatatgtaatacaagtaaactgtatttggatcaccctatcatgtcagccaaagagggttagtcattagtgttgaatgtttcttagatttattgatttgtgctgtattaaatcataagtgaaaggagataagctgaaattaatatggttcattcatggtaatcacacaggaagagaaacttttactattgctagaccctacccctttgttattgttttagatttcatccattcaacatttatgaacttctgcaaggtggtggtcttgagtggtggagaaaaagatcatgagtgcacaagctgtttctgtcggtaggttgtagtatgaacatgtttcacaataccgtgttaagtgctataagagagatggggatacagaggggatacaacatattagtttcaaactatttctgcctattttctgataagaatatatacaacactgcatgttcaggcatgtttttttttcttccaag

SEQ ID NO: 115319 - DNA, 1058 bp, Homo sapiens
tccatctcaaaaaaaaaaaagaacctgggccctaggaattagacctgttagctacttggaccccagggaagtcacttctctgaaccttgaatttcttgtctctaaaatggggtcgttggtggtataatgaagcaccattcttgatccagaaaagtattcagttaatactaactgtagataatactcttgcaagtaactgtctatgctcactacttaaacctttaaccttttagaatgaggttaagagcctcccccaaggttgctgtgctacttatcactaggttagcaaaggcggtttgtgtagataatacatcatcttgataacaatacattttcccctgttattttgaaatgatttactagaaaaatagaaaatggcaactttcaaaattctgtgatatgggataaagcatctcctcagggttcttatctctgtgacctaatgcaggtttcttggtcttcttttctcatctgtgaaaagaaaaggttggtttacataatctctcagttccattcaagctctagcaactctccaaaaatttaacttggaaattacttcttgtggctaaatttagctgtaattattgaaacaacaattagttttttgaacttagaaactcttggaattttaaacctgggtaacaactataaagagaaatgcaaatgaaaagcaacaaaagcttagaaaaaagaaatcatgtttgtcaagcaacattaagtgatgagaaaatctgttttttaaaaagcgtaataactgctaggagaatattattttgcaaattggagaaaataaattaggtcaaagtcattagcatgtttgtgtttagcaaatactaccttagggggcagtttttaaagtaactttaattttttgacaactttgctattaaaagctatctttttcttcttaatgttaattgtataaagaagggacatttttggatataacctctaaaaaagcttcttctttgacttcttcttgtgtttatttataaagacctttttgtaaataaacatgtatgcatcttttttttttaagttaaaaatgcatcgcttgg

SEQ ID NO: 115320 - DNA, 1061 bp, Homo sapiens
tcaggctactactttgcatctttttgacttacagcacttaaatatgcaaatgcaaaattgttaaggttttttttttttttttttaaagatggagtcttgttctgtctgtcacccaggctggagtgcagtggcacgttctcagctcactgtaacctccgcttcccgagttcaagcgattctcctgcctcagcctcctgagtagctgggattacaggcatgcaccaccacgcccagctaatttgtgtgtgtgtttagtagagatggggttttgccatattggctgggcaaggtgtttcacacctgtaatcccagccctttgggaggccaaggcaggcagatcatctgaggtcaaaattgttaagccttttaaggaagagaaatgtatggcttattgatttaaaaaaaaaaaaaactagacaggttaatatttttcatgtaaaacgatcttaaaatctttgtgctctctactttctcgaatgttctgcttgacagttgtctgaactttctgagagctttgatagagtcttatacataatacgtgcctctcttagtaataaagtttgaattgctatgatagtgaatattggaggagtctaaaagttcgtaacagtatgtcacccatactgatatactgcctgagttagtacaaggggtctgcagatccacttagctaccacgtagatggtgatgataccttaagaaaggattttcacattcaaaaacatggagagccactggattatagaatgacaaagaatattttactcaaaaaaattttgggaagtactctccagatttaacgattaaaaggaatttgtggtcctattgagctttctatcttctgatggtgtctatctgcctgacaggaataatattgatgtggcagtggcgataaatgaattgtatgttcacactgaatgaccctaagctatcatcttgtagtctgatgtgatttcataggttcttaagttccaaaaaggttgtgaatttcttaagagcatgtcatggctaatggcacagtcaggacttgattatgaatttccagacccctgaatcctgtc

SEQ ID NO: 115321 - DNA, 1032 bp, Homo sapiens
cttttgttgcttctgcatccctgtctttcttctaatttctctctcttctcccttatttctgtctcagtgtttctacttattaccttgctctgtttccgtgttaagtgccactcttcctgcagtaacactatttgtgtgttttactttcaaactctcagggagagagctgactcaggcgtacaataccgttcagtacagaaggtcattggaccaaggaacattcctggaccaggcagctgtggaagctgggatggattcagatgtataaagcaccttaagcattagccaccacccttaggactgggcagacccttcgcttcccagaaaggggcagtatgtcaggtcactgggcagtgtgatagaacaatgaataagagggaacttgtcctggaagagctcacaatgtggagagggaagcagatacttaaacatatacttaattttatgatatattgtagttaatatttaccatgcagcgggagagcagctaactgccgtagaatggtggtaggaaattcttcattgaagccatattgagatggcaaagggtattcctggcagggaaaaaaaaaaaaaagtcatctgcagagacgggagtaaaatatcatggtatatttatgaagtttttttgtgctatgagaagagggccatagttggtatttaaggggctccaggaagaaggtctaatttatggtactgatgaagatgattagacatagaaccaggagaaaaagacctcatagaagagtagaggagagacctacaagagagttagcacaatcaacagtggctgacaccacattataaggggaggactgactacagtttccctgagaagggacccttgaagcatcttggtttttaacaggtgagttttgtaggtctaggaagagtctagcactagaaacctaacctcagggagtaagcgttcttgaagttctgtgtcaggtcacaaattcattcttaggaatgtctagaaaccaaaaccaagaaacctcatgtttcctaaataaacaggaaatgaagataaag

SEQ ID NO: 115322 - DNA, 1720 bp, Homo sapiens
agccaccatgcctgaccggataatagtttcttaattaagaaatgagaaacgtacctaataaaaaaaaatgttgtgaagtttcagagtggcagaatcacaccaccccgaagagccccttcaccagatggcttctcaccatatagccctgaggaaacaaaccgccgtgttaacaaagtgatgcgggccagactgtacttactgcagcagatagggcctaactctttcctgattggaggagacagcccagacaataaataccgggtgtttattgggcctcaggtaggattcgtcaccattttatactttattagtagtagtatatggtactacctcaaatttatatactataatgttcttaaatttagatcaattaattccctatagtaaacaaagttaaacttaaaatgtattttaggctaatatttttctttaatgtatttatgaggttttactatcttaatataccatagaatagaaatttgatctatttaataaattcagtgaaaatgaaagattaaatcatggaaatagctgtagatttttcttatatacaaagataatgaagaatatgaattaatagaaactttagtataaaaagttggaaatattgtaaaagtgataaatttagaagttcttgtgaaccacagatgtattaacctataggttttctttttaactctttagaactgcagctgtgcacgtggaacattctgtattcatctgctatttgtgatgctccgggtgtttcaactagaaccttcagacccaatgttatggagaaaaactttaaagaattttgaggtagtttttaataaatgcttagagtaaaattgttagcatattcttaggatatattcttaaaatttatccttcactaaatttaggcagtgaccattttaaaggtgtgaaggtatgtaagaattagttgatgcttataaatagttctcatgagatatttactaaactttttcttctagcttgaaaaaaacaaacactgacctgctgtaagaatgttgtccttagtaaaaactataatgtgttcttatttttgaagctcttaaatcaactttatgaaaaacatgcaaattaaagataaataattcagcctctagaactcttcatatgtataattatggcacaaatatcattgttactgtctttttccaatgttaggttgagagtttgttccagaaatatcacagtaggcgtagctcaaggatcaaagctccatctcgtaacaccatccagaagtttgtttcacgcatgtcaaattctcatacattgtcatcatctagtacttctacgtctagttcagaaaacaggttagtactttttaaggatttcaaacattaatccagtgttacttttaattttaggggtaattttttatatctacttgttaagttgctctaaaatgatttaattattgaatcttggctttcaagttaaaatcaagggtgaagatactaaaagttcgctgggcatggtggctcgtgcctgtaatcccagcaccttgggagactaaggcagaaggattgcttgagcccaggagttcaagaccagcctgggcaacatagggataccccaactctacagaagtaaaataattagctgggagtggtgatacctgtagtcccagttactcgagaggccaaggcaggaggatcgcttgaacccaggagttcaagtctccagtgacctatgatcgcaccactgccta

SEQ ID NO: 115323 - DNA, 1098 bp, Homo sapiens
aagtctaggtgaaagattgtgtacacttaaaatgtgatgtgttcctagattcatttctgggaaagttggatcagttcatactgccaccagaaatttctgaaataggcatttaaatttaggatgtggaatctttgagctctaaggtccgccagtacttaaaatcttgaaactggtaccatgtagtgtatttttatacatagtcaaacctgttggtctattcaaaaggtacagtagcagaatttgggggatacaaatgtttctttctaagattgcagtctgtgtattgaattgttttcatagcaaagaaggttaactcacacctacaatctataaatactcgtgtgttaatctgattttaaattactgtatattaatagtgtaaatatgtatctcttagttatataagatgctcttaagaatttctaatgtatttatattctaagcaagcagaaagtgtttttagcatatccgttctactttatattcttttatgcttaatactttttcttccccttttctatagcataaaggatgaagaggaacagatgtgtcctatttgcttgttgggcatgcttgatgaagaaagtcttacagtgtgtgaagacggctgcaggaacaagctgcaccaccactgcatgtcaatttgtatgtggctctttttctccctatgcttactcaacacagttgctctctgagctaactatgttatttaagagtgtaacatggcttgaggggaaattggtgagagaataaaaaaagtatatctaagtcctaagtcctatgtgaaaagttttcaacaaatgggaatgtaggatctttaggagatgacctgtgtgagcaaagaaatgcaataaagtgtgtgtgacatatgtgataatggaagaagtgcacagaattagaaacaatttcaatctggaaggtatacatgaagggaaggaggtggaagaagacctgggcaggcattacagaaaggctagcatcaaagtaaggtttggaaggactttacctggtagtcaaacagggcagaatgttttgaaaaatagtaagcagagtacatgttatcagaatgaataaaatagcatttgcaaatcaaaatca

SEQ ID NO: 115324 - DNA, 1027 bp, Homo sapiens
actatactgcttattgtacagcttcaacttcaaaacttcttgtggtttcacttcacatatctagaaacatctcttcctgaactaacggacatacggggttattcaaggatagaaggatagaaaccagaacccttcaatgctaacttttcccaatgtttaatccccgtgcctgccaagaatttttatcatgtttcttatttgctgccatttaaaattaatttctcttttcatatcctaatggcatacaatgggtgcttaataattgcagaggagatgaataagaaaaaaatatgtgatggttaccttgagttcatcatttttatttgtaagaacagtttcccatccctttaccatctcttctgattgaatgttttttcatcctcagtaagtagggcttttttgtcagttggtttgtaatgattttcttggttgttgaatgctcagtctattattttttaaatgtaggatctaaaaccagacgggtctccagtagacaataataaagtaaaataattattttcaataatctgttaaattctgttgaattaaatttgtgaacaggtgcattaacacattgagcttatatatcattaggatttgttacatttttcttttgtgaccattacagtcctgcagctttggaattctcttagcatattagcaacccatttatgaatctaataaaatctgcaaaaatattaaacacattcttgtacctagttcattaatgaaatttaatgaactattaatgaacataggccctcacctgccctttcatgacccatcaaagaactctcaagttgattctgagctgttagagttcattctttcaagcatatggtctagtttgttttgcctaagctttaggtcagactaggctctacattcctagctttttattaagcatgttaggtaagacagttaaaacataggtagtggtacactacttaacagtaccagaagctcactatattctagttggttcattctcccataatatccctttataacaaaacatatgtaaata

SEQ ID NO: 115325 - DNA, 1038 bp, Homo sapiens
gtaaattactaccattttttaagtttccatgtatttttcagtaattggaacttatatggtaatgaatgtttttttctttcaggtataagaagctgctgtccctcttaacctttgctttgcagtccattgataattcccactcaatggttggcaaactttccagaaggatctacttgagttctgcaagaatggttactacagtaccccatgtgttttcaaaactgttagaaatgctgagtgtttccagttccactcacttcaccaggatgcgtcgccgtttgatggctattgcagatgaggtggaaattgccgaagccatccagttgggcgtagaagacactttggatggtcaacaggacagcttcttgcaggcatctgttcccaacaactatctggaaaccacagagaacagttcccctgagtgcacagtccatttagagaaaactggaaaaggattatgtgctacaaaattgagtgccagttcagaggacatttctgagagactggccagcatttcagtaggaccttctagttcaacaacaacaacaacaacaacaacagagcaaccaaagccaatggttcaaacaaaaggcagaccccacagtcagtgtttgaactcctctcctttatctcatcattcccaattaatgtttccagccttgtcaaccccttcttcttctaccccatctgtaccagctggcactgcaacagatgtctctaagcatagacttcagggattcattccctgcagaataccttctgcatctcctcaaacacagcgcaagttttctctacaattccacagaaactgtcctgaaaacaaagactcagataaactttccccagtctttactcagtcaagacccttgccctccagtaacatacacaggccaaagccatctagacctaccccaggtaatacaagtaaacagggagatccctcaaaaaatagcatgacacttgatctgaacagtagttccaaatgtgatgacagctttggctgtagcagcaatagtagtaatgctgttatacccagtg

SEQ ID NO: 115326 - DNA, 1061 bp, Homo sapiens
gtacttaccaactagaagtccgtggcccttaaaatacggttttaataatatctttcagacccttattctcgacctttctttgccttggcaatattcaaaaaacaggttttaatagatttacttaacggctgttactaataaagaattctggggtaatttatagcagttgttttgtaataaactcaaagtgcacataagaaatttttaaaaatattctctctctattctaaaaggagatgagcatacagaggcagctcctgtctgtagtggaaggagtttaagcattgttcttctgactcagcttcttctgtcgtgttcataattcttcatgttcatatgtagtaatgatctgttgtcctcttgccacatagtttgctaagagcaaaattctgtgatgggactctgcttcagaatctcacaattctccaaaatatttttgtgctacctggaaaattaagctcattaatgaaataaattagatattaggtagtccacagaattcctgtttgtaccagttttctccctaaagtaaggaagtagaatctataactacaaaatggccttctctttttcaaatgagtcctatttccaaattaactctgatttattttaggtactaagaggtcaacagtatggaaggagctgtgatgtatggagtgttggctgtgctattatagaaatggcttgtgcaaaaccaccatggaatgcagaaaaacactccaatcatcttgctttgatatttaaggtaattgtgagataaaaattacttctttgtgctaaaaggagtacagcagaatttggcaggaggcaaattttgatgggttctccctaacaatctagcatgaaggtaaataaatagtctgtatatttattcagagaggatttgatatacaagttttttactttaagatggtgcaaaagcaatacaaatttggtaaaaaccatactttgaattttgatttttgtctgagctagcaatatgtgctatgatacactggtgatgctaggcagtggcagcgagtcacagctcccagtcagccacacaatcacgagagtgaaca

SEQ ID NO: 115327 - DNA, 1575 bp, Homo sapiens
gcatggaatcctgaaggaaaatggtagctttttaatctttttgtgtgtgtgtgagtcttttaaatcaagtactgattaactattaagtacaactttgagattttagttttaactcttcagaagccagtgtgaaatagaattggttattctcaaagactcaggataaactaaataagctatatatagagtacatttaaaatgtacaacacaaattggaaataaaataagttacaagataagtttacagggatatattgcttacaatttttaaaaggcagtttgttttttatgtgaatatgtttcttagtgaaattttacattcctttgttttggaagattggcgatatttgaagagttaaaaatagtacagaaatgtgaagtttggtatctctaaatgtgttgtacttgactttcttttttattttgtttttttttttttttgactacttagaattttcacaattctaataagattgtttccaagtctctcatgtgcaagctttaaaggatgcactcttgccattttatgtactggaagatcattggtcagatgaatactgtgtctgacaaaaatgtaaactgtataaactgaggaacctcagctaatcagtattactttgtagatcaccatgcccaccacatttcaaactcaaactatctgtagatttcaaaatccattgtgtttgagtttgtttgcagttccctcagcttgctggtaattgtggtgttttgttttttgttttgttttcaatgcaaatgtgatgtaatattcttattttctttggatcaaagctggactggaaattgtatcgtgtaattatttttgtgttcttaatgttatttggtactcaagttgtaaataacgtctactactgtttattccagtttctactacctcaggtgtcctatagatttttcttctaccaaagttcactttcacaatgaaattatatttgctgtgtgactatgattcctaagatttccagggcttaagggctaacttctattagcaccttactgtgtaagcaaatgttacaaaaaaaaaaaaaaaaaatctctgggttaagaaaatttggcttaaatgtatcctttgttattttaaatatattgagatattttaattaaaatttttaccccattgaaccgattttatagtatttgtacctattttggtgtttttgtctttatagtaaataaaagtttttgaacaaatgttgttacttttatttattttgaaataatttcatacttatataaaagttgcaagaataccacagagaacttctgtatacccttcacccaaagaccccagtcaggtttcaccagctgcccatttatgtcctttatagcaagaggatccaaaccaggatcacatgttgctctcagttgtcatgtttcttcagtctcattgaatccagggccattccttagttcttccttgaccttaatggccttaattttttaaagatttcagattattgttttatagaagctcttcaaattgagtttgtctggtgctgcttcttgattagattcagagtatgcacttttggcaggaacatcacagaggtgatg

SEQ ID NO: 115328 - DNA, 1028 bp, Homo sapiens
cttaacagagaatttgttactgtttattaaaagaattgcatttggaagcaagaaaacaaccggatttgcaatcatgtgaagaaacaataatgcctttattatcaagtgttaagcacaattcttataacaaactgtgataaattctttttgtttttttttcctttgccccattattttcttatgaacaaaccaaaaattcatggtgagcagttgcagtgttggctgatatatcttttatgtacagggaatttgaaaaggacagtggattcatttagaagtgtaactggtgctgtgattatagcaatacatttgttagttgtacttcatctttttcatgctagctttttaaatgtttagttttcctcttgtcatggtcagctgctgaatttacttgaaggatgtagaatactgtttaaaaaatactaaaatttgtacaattagatcaaagaattgtgcaatcatttcctttttaatttttaaaatgttgaggctcataaatatttgagaacatcagatctaatagagcatagtgatactatttaatttaaccaaagtctctagtgaatatttcaactttgaatgtaaactaacaaataaacctgaccaccaaggagattgtttgcccagagtttcaaagcacattgtctacaaatggaaattgaaataatttataaaatattgacgttactatgttttttaaaaagttcctaattttttcactaaatggaggaaactattagttttattgttaaatatggtagatattaatattcctcttagatgaccagtgattccaattgtcccagtttgaaataagtaccctgtgagtatgagataaattagtgacaatcagaacaagtttcagtatcagatgttcaagaggaagttgctattgcattgattttaatatttgtacataaacactgatttttttgagcattattttgtatttgttgtactttaatacctggtgtacagttccagaaataaaaatctgggaatctttttttcttggtttgtgtgaatat

SEQ ID NO: 115329 - DNA, 1340 bp, Homo sapiens
gttgccactcaatggtttacattttgggacatcttttaagttgtttgtagcactgcagttcaaagtgttaatatttagagggacttctagattttatacctaatgcagtagaaccttgaagtatatttaagcttttttgttaagcttgaacagttggcaagaataatgtgagttcctatctgaaatagaatggtacattaccacttttaagttttaaaaattgatagatgttcagatgtatctcaaactcagttttatttttattccaaatattgtgaatgagaagccattgtcctaaactttggccatttttgtgctataaacatgcatttttaagttataaggtgaatcaaacaatatgtaatacagtattaggatgtaatctttgcttttgtagtactgttaaaatagagaattatgttgtttgcaccgtcttaattaaaattcttgatttttactagttgctttgcaaaaaacaaatgtttggctgcattgctaatatttgtaagtataagttgcttcaaggttgtgctgatgagtagataggatgtagtgatcttagtagtgattgaaagggagggtatttattatacaaactgtgaactgcaatgacatccttagttttggatgatgtgtattcttgtttttctttgcagcattttaatgaagattgctttgaagtgtttacgcagtagcacattagtataaaatttagtttagcacagtggacaaaaagtagttaaattaataacttaaaatcagtctctaatttatacatctgaagtatagcattcctgtatgcacacagtaaataatgggtagcctgggctctgtgttactttcttgtatttttatccaagttgtcagcttcttattgctgtgttgttgtgctaaactttgaaccttatttcttttattaaaaatcagtacactttctataatttagtaagatactggccataatcttccattgttataaccttaattttcactctgggtttacagtggctggtctgtataaataatttacacaaagatgactgaatgctaataccagttgcacttaaatgaacatgcccattctcagtagctgatgcagtaatatattcagtttatctatgcattgctggggtcttgatataagatggaaacagtgtttcttatctaaagttttgattatcagcaagttgaatggacactttagttatttaaataaagatttttgaccaaaatccagaaaatggtatgagagaaaaataaattccagctagtttaatagatttttaaatgtcaatctgattttagcctcttagagagtgctaactagctggtaatgttta

SEQ ID NO: 115330 - DNA, 1011 bp, Homo sapiens
atcacatcaccagtgccaaaatggctgtttctgtggctgactttggcagtctctctgccaacgagaccaatggtttcatcagtgcccatgctctgcatcagcacgcggccctacactctgagtgacctgagtgaggatcccggaactgcgtgtgcagcaccagtaaacttgaggggagctatcaggtttgcatagtctttcactggaagtttgaacctttctcactatgacatcagtgatgtcagtatgtatagaactatatcttgatttatcaagagtattttcatttttcaatccataaatgtggaaatgaactatgatcagcagagttgggaactaagattgaactctgtggtgcagctttaagctctgcttctctcttcctcatctcccaatacctcttccccactcccttctttttctattcttttgtgttccccactgccctcactcccaattttaaaacctgtagacagaggccaccagctcaaaaccagcacagatgttctgaactgaatggtgtggcctgtttttgtgtaaattccttttgccgtaatggatgcagtggaataacaatgtttacaggtaccgatcccgatccctgctcaatgtagcatttttttggttttattttcttaataaaagcaggggtaggtttctttaaactgcacaaacatgcaaggattttttaaaaatggaaacttctctcatgttattcaactagagcacttcagtttacaaaacagcaagtccatctttatggaagccagcacaaggaactgtgtgcaaataatgaagacgcttgcttggatcctgtttcaaaattctagaccagggctaccttacacagaattggtcatgttactgccaggagatttctgtgtaacttcatttattggctacagttttggcatttgaagatgtggtactcagatggggttttgtccaccattgtcaagattgtaatcttaaaaatcataccagtcattgataatttagtttatcctgagg

SEQ ID NO: 115331 - DNA, 1066 bp, Homo sapiens
aataattatcaggatactatacacttttttttttgagatggagtctcactctgttgcccaggctggagtgcaatggcgtgatcttggcttactgccacctttgcctcccaggttcaggcgattctcctgcctcagcctcccgagtagctgggatgacaggcaccccccaccacgcccggctaatttttttgtatttttagtagagcctgtcggccaggctggtcttaaactcctgacctcaagcgatccacccacctcagcctcccaaagtgctaggattacagccatgagagccactgcaccggccaggatactatacactttattaggattttcagtgtctcattttgaccaatgtcgattgtgagaaacatgcaggtggtttagtatacttatgctgatctcacatatttaacaacattttgtaaaatacaacaggcattcttccaggttctgcaaaaataggcagtaaaaacctttttaatttttgtcttttaagcaaatactgcatgtgatggtgataaggaatcagaggttgaagatgttgaaacagacagtggtaattcacctgaagatttgaggaaggtaagctgagttaatatagtggactaaattggcttttaaaaatatttctgaaatgatttatgataattttgttgttttgacttgtagaaactgattaatgatatggggctttttttcagtattttttttttaataagttatttttacctctcaattttcctgtaggaaataatgattggtttacaatatcaggcagagattcccccttatcttggagagtacgatggtaatgagaaaggtaaggaaagcttttgattttgataatgtttggtagataaggttaccacttgataagtgtatttaaatatctggctttataccagccttggcaatagatagatagatttgggaaacatgcagagttaggatttttaggcctgacttaggaaaaatgtatcaaagttaatcactagactcagagtttccccccacccccaaccctgcccaaggcacacatagtgcttattagccagtgtgctca

SEQ ID NO: 115332 - DNA, 1279 bp, Homo sapiens
ctggttctcttcctgatataaatcctttgacttacagaacagttcatttataagtgtgactagactctactgtgtcccttaaaatgtaaataggttcaacaaaatacccaagaagaggaagagaaaaatccttatacccgggataaggtgatggatcacacttctaagctgatttagctaccacagatccttacagactttgagacttactaattcaattttgaaaaaattgtttttatgttttaaaggacttaagtgctttattaataggctctcaaagagagttcatttgtgaagtgcttcagagactagattcaccttttccagttttgctttaaaagttttggtgcaaatgatgtgtgttttagcatcagccctctggccacccgtgtcatcccttgaacttattaatgcagtttctacggagatggtcatcttgtccctcaacagatggtcattcctgtgtctttatagaaaagcggggttttcttgagtggatgctgggaacctcctgtctccctcacatgtacaaacttttatattattctttccctcctgtcctgcaaagtatctgtgatatcccaggctaacctctagattctatccctcctgccctcaatttattcttctaccttttttttttttaaatttccacataagaatcctactaatgcagatcccacatttggaagaaattctcttttgatcttgtgttgccctcagtcactctccttttgtagccaagtctcaagtcatgtatgtactttcttccctcccgttcagtctttagcttggcttcttccaccatgctataaggccaccaataattacttttttagagatggtctcactctgtcacccaggctagagtgcagcggtatcatcatgccaactgcagccttgacctcctgggcttaagcagttttcccccactcagcttcccaaagcccagggattactggtgtatcccaccaccctggctaatttaaaaaaaaattttttttatagagaaggggtcttgcaatgcccaggctggtctccaactcctgggctcgagcaatcctaccttggcgtcccaaagtgctgggattacaggcagcagctaccgcgcttgtcccaggtcaccaataattcctgattgccagatactaagatttcttgtctttctcttgctcagtttctttttggaatttgacccaagtgaccattcttgattatccatacttgtttctgccttaatttaagtaatcctactttttcctcgttctattttctggct

SEQ ID NO: 115333 - DNA, 1466 bp, Homo sapiens
ccaaaacaacttgcaatggatatatcttccaaaaccttcagatgtgattttctgtattccctacacataatcctaagaactttgttagtaatccaaagtaaagcaaagtcttacagtttaatgcttgtctgattaatgctagggaacttgaagtactgttagagaaatgtaaagtgatacaatgcttttaaaagctgaatggctgtatagctgcttcacagaaacttatatttgttttataaagcagatttttgttgtgttttctgtctttatttgagggttagaatttgagtaaaatttatattatcctgaagtgtgcatcttagtgtatagtcgattcttgtgaaatcttccattcatggaaatttaatctttctgatattttgctattgcttttagacagatgtattaaatgataagcaagtttgactttttctattagaatgtttctttaaaaccatgctgcttaaatcactttgttgttatcataagttgttttcttgtggactaaaccccttataaaagtgtttgtgaataactttgccttgttattttgctgatttagacatattttcagaatcatggggtcttaatttataacctataaattatatagtaaattcatttagtaaaaccctcatataaacatgaaaagggactggcagaagaacacaaatttttattttcttttgttaatagccttgtaaatgtgtaaagtgattcagtttgttttattccagttgggtctttgtcttctgaggatcatgattttgaccccactgctgagatgttggtccatgactatgatgatgaaagaactcttgaagaagaggaaatgatggatgagggtaaaaacttcagttcagaaattgaagacttagaaaaggtataagatttactttaatatacaaacttaacaaagattttgaaattctgttgtaattttaaaaataatctacctgaaataaaaataggatcataatccttttttttttcactcttattttgggggatagcctaataagtatgctttcatttaatttttcaaaattattttgtatctgttaacttaatttttaagcttatatcaacacagtgaagtaggtacacgtaggcattttacagatgagaaaattgagatacggaaaactataagccctaagattatttctgaatcctagtctagccctctttccattgtaactactattctgctaagggtcaaacttgaatttgtataagtactgtagtagatacagagagaagccttttccttcaaataactcataatctagtggaatattttaagaaaattgaaaaagatttactgtattttcaaatataaattggtaatatcccatcccctgctcctttaaaagtcatctttgaaaaggttggcaagagtgagtgtagtttgtaattttttaagccccaagtcaatataaattcaaatgaactgtattttc

SEQ ID NO: 115334 - DNA, 1034 bp, Homo sapiens
gatgtccctgatgggcttgttcaaggagacttcaccagcataggaggtcaaggctggctgcctggaaagacctctgtgggtgggtgacaggtgccaggtggtaccaaggagcaaaagaagttgactaaagatcagttgctaagaatactataaatatttagaatctcaacccagagagttttccaaattttcctttacctctctaatagtagctctgtgataccacctatgaggttactccaggagcagcatatgggaagagaatgttccagagcccaaggattacagcatgcctggtactgtgatcactctggggccacagaaacaatcaaggatcccacggtccactgaccagcacactgaccattgttagtccactgccttttttgtcctgtctggagcctagttctttattttccttttcccacagaacagtctttcggttccagttcagctacagccaactctcatagagatccttaagcaaagcctactttgtttttgaagtctcagtcttctttcccatgtcccatttcttgcatctgggcttcggtctttgagcctatccccattattaacctggaaggtatccccatatcctcttagaacaggagcctgcctttgtcttgccagtctcgctcccagggaccagacccacaactattgatacaggagtgctgggaagggaagagcgtggtccctttaaatgatacagaaccggggaagggaagtgctgggtagaggactgcgtggtccctgggtagggctctacccccatggacatagatgaggtcaggcccttctgcctttgggcccaaatgttgcattttccaagaccgccctggctcaccacacccccaccatgggctaataaaaacctgagaccctagcaaggcagagacagaagctgctggatggcaagaggaacacatcagtggaagaaaacacaaaaggctggacggcaaaaggacgtcgggacatcaaagggagcacgctagcggaagagcacaccgacagaggcctgcaggccatca

SEQ ID NO: 115335 - DNA, 1029 bp, Homo sapiens
gccttgattcaaataactactctgattctcaatagctttttatgaaattaccatgcagagcctaaattggtgcagctgaattaaataaatatcggagtttaacattcttaatcgcaaaccctcaatttaaccaaccatttattataatcaaaaagcaatcaatatgttgattgtggtgacatgcaaaatggaggtagaattattagtaattaccatatatttgtggttcaatgtgatggtgaaataactgggaaaaaaattttaaagcacactacagttaaaggactggttgctatgttttggagcagcatgctatattgattgtagtctttaaataagttgagtaacatagttgctgtcaaacatatgaattattcatgaagcaaagtttgagaacactaaagcagcccctgtttatgaatattcggacgtgttaatatataaacgactgacccaacactaaccaattcttgcatgaagaaaaggtctcagaaacaaaatggaaatctattaggcaaactcacttgagtcactcgcttgaaatgtaatcagtctgagagatggggaataaagactgagctgcaagtcagggaggtatcaggccaaagagggaggcatggggaccttcttcgactgggattgcttggtgatgccaaagtcttttttgcaggctccagggaccctggaatttctatgatcacatttgcaaaggtgtggcctttggatcccttcctatcaatattcggaactacatagtaacacacctctggtttactttttcagccctatttaggaaaggatgaaaggaaatttcagagcattccatatttgagaaaatcctcacaatttcttttctctaaataaatttccacaatggcctgtaagctgtatgttttaatatttacaaggcctcattagaaacacaattcttacttcccaaaaactctggacatcactgagtcttgggacaatatattttagtaaaagataaaatagagaatttttctgaggccagcagattacatagat

SEQ ID NO: 115336 - DNA, 2070 bp, Homo sapiens
gttcctttgagtcctgtggggtctgaggggacatgtgcatttttgagagagaaccattctttggtttacgaaaagggccctgtaccttccaccccctcagttttgggagaaacctgttttcttaattcgaggaagtggaaacctacaccttctagccctttgctccctcagaagtggggaagtctcctcgggagaatttaagaagcgggtttgccctacttctagttcacctttctggccttactgggtgggaatatgcctcctctagtagacgttctgatttggagggagcctctttctctttacacttatctctgagttacattcgctaatactccgtggcagcacacctgtcttcgctttccttggtccatcgaagagggttggagatcttttgtaagattatgtgtcaatttcatagttttaaaatttattcaagaagtataagaaggtttgcttatataattccccagtatgggatctgcaccccttcccaggtgaaatctgcccttgccctccataataccgtcacctaccgtttttccctccctctactccgatgtcttgttcattcagtagacttttatcgggtgcttgcttgggtaaagaagcccttttccaggctcctgtagggttatatagaagtgattttctctccagaggttgactttttaagttggggattgatttttttagctcaaaatcaaaactcagtatataattttttttataacttttacaggtgattgaattactcagatatgaagatcatcatctaggttttgtgtaaaaggccctggatattttaagtggccattttggatttacagtgtttttggataattttgccccagaagtttattaaaattggcaagaatcgtctgtgaagtgaattgatagtagtgaacaattcagcaagctacttaaaaagagacccaggcagcatttcttcagtattttggttcaaacggattatataactggttacagtatttcagctggtggtaatttttgcctccccttcccccaccccgttgttggggttcttcagccgaaactgagagacgttgatttgtgtactgagtagtttcagcagtttcaaatgactgagtattgctgaagtttcatggcagtttatttttacctttattgaaagttttaggaatttttgacttcagctctttcatgtcacaatgggacactttttctgaatgaagagattgaaagaatacagagtttttttccttttatcttttatttacgtggaaatttaagatgttgcagttttccggcagcatggtagtattgagatagctatgtgtgtctctgtatatgctgatgtttaggaatgctcttcagatgtgaaattttctttttgtttttgctttttggctcgtaaattggatatttcatctggagtggacaagtacaacagtggcaagtacatggaataataaagaagactttgatcttaaatctaaagaacttggctaattcgggagatagccatatgaaaactttaaaacagaagtatgggtagctgacttgaagtaactctatgtcaaatagtcgtaggttaagtatcttcaaagaacttcgatattatttcagaggatacaaaataaaaatacaaactggaaaataaagattacagagaaaaaaccaacaccttcctgtgcagtcctgttggaatttgtaagtactattatggtgagcaaatcaaatgttcatttgtaaactgtaatcagagttgagtttatcctatgttattctcggaagcctttcagtttcttgcagtaacattgcttggtttcagtttccttgacagtctgaaaacaactattaaccattgtctgagtaaactgaaattcagaaaaaacgtttaaggcttaggaacttttcagattcaaacagtcctaagctacaagtttttgcgctttttaagtaaaaagctaaattcgtatggccggtatatattgccttaggctttgaagattcattcacagtggtagaaaggtaggaaaaaatgcaacaaataattcaccacgtgtcttcctagccagtttgtat

SEQ ID NO: 115337 - DNA, 1050 bp, Homo sapiens
agcagttcttcaaggacagatttacttgaacgttttgacagatattttcagtattttatttttctggagattggaataaatagttgcatccgttggtaattggaactattgctggacgctgcttttccccagaagttaacaccacttttccttttatcttttctactctttatattttgcttttttgtccctttctaaactgtaggtctaaaaataataatcatagtggctaacatttatagatgatgatggtttttttgctgtgtaatttatgtggcatattttaattaattcttaatcccgtgaggaaagtactattatagtcactgtggtactgatgagaaaattaggatttaggggggctgagactgggagaaagttactttgttagaattgtaatcttgaccaaataaatgttcaagcagtctgactccagagcacatactcagcactatgccatacttacactgccttcttggggattttactttactaattcatttatttgaacattatctttgatatttttttcttttcatgtactgcttctctttggttgatgttgattacagactgctaatggagtttggaaataaactaagagatattactgttttgctatttgcagtaactatttgggtgatacctttggttagctaaaattgtgtgtgtgtgtgtgtttgagacagggtctcgctctctcacccagattggagtgtaatggcacgattgtagctcaggcaacctcgaactcctggggttaagggttcctcctgccttggcctctcaaagtgctgggattacaggcctaaaccacagtgcctggccttgtatttttctttcacccatagcctgtttccacaggcatggagctaaatgcatagctttgttttaccttgtcttttttttgttgtttttttgggtttttttgagacagagtttcgcagttgttgctgagggtggagtgcaatggcgtgatcttggctcactgcaacctctgcctccccggttcaagcgattctcctgccccttcagcctcttgagtagctg

SEQ ID NO: 115338 - DNA, 1325 bp, Homo sapiens
ccttgcttactgtcttactggcccattggccttctttctcttacctgaacacgagacatttttctttatatttgttccctcttctctgttcttcccttgtcagctcaattttagctcaaacctaactttctctgagattctctaaccattttgtgtaaagtgggccactctattcaatactttgatttctcttattattctatattatttcacttaaagcacagcttataattatcttgtttaccctgtgcccgtctttatcacataagctctttgagagcagggaccttgtctcatttgtttactgttgtagtctcagtgcacttatttgcacagtaaaagaactattaacatctataaataatttagccttacttttttttaggggggggattgggtgtatatggttgtttttattatagagctatttttaactgcttggggactaggtggaatttgttattggattataggagggttgatttgttgtcatgtcatttagaagctgttttatcagctgggcgtggtggctcatacctgtaatcccagcactttgggaggccgaggcaggtggatcacctgaggtcaggagttcaagaccagcctggccaacacggtgaaaccccatctctactaaaagtataaaaattagccgagcgtgttggcacgcacctgtaatctcaattactgggaggctgaggcgggagaaccacttgaacccaggaggtggaggttgcagtgagctgagatcacgccactgcactccagcctgggtgacagagcaagactccatctcagttaaaaaaaaaaaaagaaaaaagctattttatgtgtctagaattaaataaattgttatatgagctttttgtctgctagattcaagactggctttggatttgctgttagcttttttttttttttttttttttttttttcctgagacaaggtcttgctctgtcacccaggctagagtgtgctccattatcacagctcactgcagccttgacctcctgggctcaagcaatcttccggcctcagccttctgagtagctgggactacaggtacataccaccatgtctggctaatttttgtattttttggtagagacggggttttgccatgttgcctagaactctaggcaaaacatgttgccttgaactctaggtaaaacatgttgtcttgaactctaggcaaaacatattgtcttgaactctggggttcaagtgatctgcccgccttggcctccccaagtgctggggttacaggtgtgagccattgtgcctggctcctcttagctgtttttttcttttcttttttttttaag

SEQ ID NO: 115339 - DNA, 1004 bp, Homo sapiens
ccttttctttctttcgttttagaattatgctgctggccaaggcatggatgcaggcagggagaaacggtgataaattccatgttctttctatgttagtgcttgagaaggtaatttcattttctgtttaattaaaacaaaacataaagcattgtagtttttgtgtcttgagtaaataagtttgaatttttttttttttttttttttttttgagatggagtatcatactgtctcccagcctggagtgcagtagcacgatctcggctcactgccacctctgcctcctgggttcaagtgattcttctgcctcagcctccctagtagctgggattacaggcatgcgccaccatggctggctaattttttgtatctttagtagagtcagggtttcaccaagttggccaggctggcctcgacctcctgaccttgtgattctcccgcctcggcctcccaaaatgctgagattacaggtgtcagccactgcgcctggcctgaaaattttaaataacaaaacttacttttgtatcttaagggatacactccgttgcccaggctggagtgcagtggcatgatctccgctcactgcaagcttcgcctcccgggttcacgccattctcctgcctcaggctaacaagtagctgggactacaggcgctagccaccacgcgcggctagtttatatttttagtagagatggggtatcaccgtgttagccaggatggtcttgatttgctgacctcgtgattcgcccacctcggcctcccagagtgctgggattacaggtgcaagccaccatgcctggcccatgcctggctaatttttgtatttttagtagagagagggtttcaccatcttggccaggctggtcttgaactcctgatctcgggtaatctgccctcctcggcctcccagaatgctgggattacaggcatgagccactgcgctcggccatgagccttgttttttaaaaagttaaattctgtatcgtatgaggtaattgttaggtat

SEQ ID NO: 115340 - DNA, 1080 bp, Homo sapiens
atttttgtatttttattaatagtagaggtgaggttttgccatgttggctaggctggtctctaacgcctgacgttaagtgatctgcccgcctcagtctcccaaagtgctgggattacaggcatgcgccaccgtgcccagcctgttctattagttaacaagtcagtttttattacaccatcagcgtacactaagccatttatttcaaagttgtcttttgtagtaatcagagtttcacaaattttaattcttaccagtcatatactttgaacagagcatcttacctttttctatactgttttttactcttacatggattgacttgttaatgatatccaccatacatgatgtacttcagtttgcagagtgctttgctgaacattatctaatttgttcataattccatgaatgtggtgatttagaattattcttagtccctgctgtactcattttaaatattgatctcctttatgagggaaagtaaaatgattgaggtgcagagtaaagggtttgtgcacagtcactttgggatgagggtgatttatctgagttttctgtgtctttccccatctttctgtaaagctgtttgcctcatttgatatcaaacccatccgttaggctccattaattcccagctgattgctctattgttttcattaatgcctgaagggcctaaatttgatccatgctctgatccaatttagttatggcaggtgtagttttgaggcccagtctcctgaggttggttctgaccctagtagggctctccttacgtatctctttctcaggttcattcagaactagctggcctgtgattcagcttattgctcttcatgcagaggagctacttattttcttactaccagtatctccattgtttctgagagggctgttagtgtttgaataaagttagttcctttgagagactgcttcttacccttggcaaaatctttgagtcattactccacgtgctaggtggagcaatagcctgaatcttctaagtttttccagtgtgaaactacttattgcttattcagcttattgctcttcatggagaggagcctcttattttctcactaccag

SEQ ID NO: 115341 - DNA, 1947 bp, Homo sapiens
ccaaagtgctgggattacaggcgtgagccaccatgcctggcctttttcaaacatttattgatcattttcatgcattttctttttagattactgagacgacttgttaaaattttcccttcccttcccatcccgttgcatcgcatcgcgtcccgtcccgtcccgtcccgtcccgtcccttctcacatgcaatggcgtgatctcggttcactgcaacctccccgcctcccaggttcaagcgattctcttgcctcagcctcccgagtagctgggattacaggcatgtgccaccacacctggctcatttttttgtgtttttagtagagacggggtttctccatgttggtcagctggtctcgaactcccaatctcaggtgatccgcttgcctcggcctccgaaagtgctgggattacaggtgtaagccaccgcgcccggcctaaaattaaattctttaaaaaaactgttggaagttttgattgtggttttatcagattagtagattaatatttggggctagtgacttttatacattgttagaacttttctgtatttctaattttttggaatacttattgtacattcttttattttgatacctttttaaaaacacttggtttggggaagaggaatatggaaataaatttaagggacttagaactgaagattcatttgacaatttttctctgatgtagaaggaaactgagctgtagtgaaaatttatatcaagtagtgtatgataaagacttaacattttgttgagaaacatcgtattttaacttgttttccatacagtggcattttacctttatattttttggaaaaaaagatgtcgaactctaagcacatgtgcttgtttccattagatagaagaaaatggaccatcggtgaatccattatacagttacccagttatcaaataccttgaaaataactgcaatatgttgttcttaatcatttaaaatttttggaaataagtgaagttggagtattactagtttttaaagttatatttaggtttcataaatacctgtatttttataatttgtttcagtcgtcattgaattttgagaagcattctgaaaactttgcatggacagagaatcgttatgatgtgaaccgtcgacgacacaactcttcagatggctttgattctgctattgggcgtcctaatggaggtaaaatttgctaaggaatgatgtttatggctaattttctttatgatttttaaagaatgttttgatgtgattcaatctttaagcttctcttctttgaatttatattactttgctattatcaaataaaggtaactttggaaggaaagaaaaaaatggatggcgtacacatggaagaaatggtacagaaaacataaatcatcgaggtggataccatggtggaagttcccgttctcgtagcagtattttccatgcaggaaaaagccaaggactacatgaaaacaacatacctgacaatgaaaccgggaggaaagaagacaagagagaacgcaaacagtttgaagctgaggattttgtaagttttttatgacttttatacaaatgaagtttctgtaagtgctattttaagtgattctcctgcctcagcctctccagtatctgggattacaggcatccaccaccaggcccgcctaatttttatatttttgtagagacagggtttcaccaggttggccaggctggtcttgaactcttgacctcaggtgatccacctacctcagcctcccaaagtgctgggattacagccactgtgccactgcgcactgagccactgtacactgagctactgcacccggccaaaatactgtatttcttaaattacagaaaaattgacccagtgtacagtcatatttatctagttcttgcgattcattcttgataatttaaaagctagatagaatttgcactctttttatatattcattgtcaattcttatt

SEQ ID NO: 115342 - DNA, 3998 bp, Homo sapiens
gatcatagtgtgacatgaagttaatatttttacctatgaaagtggttacgtatatatatatacacatatatgtatagactgttacagataattgtataaatttgcttgtggagctagtctatatttgaagttatttgtctctgatttctgattttcaaagcttaatgagagttcttctagaaataacccagcccccatttttttttaaaagactgctgacagttcaatttgttagcattttacagaagattaaactgaactcatatagtacaatttagacagcttttttaaagattcaagtgaagtttaaaataatggaaaattttatactaagatttgacatctgaaaaataaaattaatcatttgatactaaattcagaggtgctcaatccatgttggaacttaaacacatgttcatttgtatttttctattgaaaatcaactcactaaaacaaaaggattgtggcttttgacagcatactagtcctaacagtaaaggcattattttaaactttgccacttcctgtgctatattgtatgtatgaggtgaaactcgggaattattttgttttcttttgatcttcctctttatttaagggctttttgagggtgggggtgggggtggtcagacacttttgttagaaccatgtgaatggcattgttttttctgtattgcaaattagtatttctaccactctccccaggcctacacgcccagacacacacatacccaaccaaaaaaatctcccaagctcctctcttaggtatgtttccttattattcagtttttctgggaacaactgattgcataagaatatagaaccacctggaaggtgttaaatagaatctctaagaaattaggaataatttggatttgattagaatgaaagttttaaaaatcaagaatgccagtgagcgtttgtcatataaaactatctatagatactattggtactgatcctgggttgatttaataatcttagaaatgatttagagacaaagacatatttgaaaataatgagagtaaaatgtattaatatgaagattttggttctactgtttcagggttggtctaaggattttgagtactagttgaaaagatgttcaaaaggaagatgtactctttactgtgtttaggtaaactaagaaatgtgtctgcataaacaaaaaaagaaaatggttaattgtggaatggttaattgttaaattcccagtacttcccataggaatacaatgaaactctcattgtatcacactttactattcctctctcactttcccccctgggttcccaagtattgttttccctattgcaacatttaaaatagctatgttcctgaggaagacgagaattttaggaaagacttcaatagagcttttctagtgctacttccttccaggtaagtaaaaatttactaacgaaaatataatatttattaaaaaaaaaaagcaatttgtccctgaaactataattttgtagattgaaaactggcagacttaaacatgatgccccaatttgagaaataccctgcggggaatgtagttaagtgatttataatatagctacataaattgaattctgcttagaacctagttggctttactggaaacaccctcatgcagcttatatctgtgacttcaatagtgtttttatgttaaccagaatcatagctattaggtacataaaattaatggttattaaatagtccatctccacgctgttaatttaaaactaaaacaggaattcaagctgcctatgagaatttaaaaataatgtaattgtttgattgatttctttggtgagtgaggaagaaagagtgatgtatgttcaagtgttagtgtgcagttgagttgagttgcattaataattagtggcgaccaggcatggtggctcatgcctgtaatcccagcactttgggaggccagggcaggtggatcacctgaggtcgacaccagcctgaccaacatggagaaaccccatctctactaaaaataaagaattagccgggtgtggtggcgcatgcctgtaatcctagctactcgggaggctgaggcaggagaatcgcttgaacctgggaggcagaggttgcggtgagccgaggtcgcaccattgcactccagcctgagcaacaagagtgaaactccgtctcaaaaaataaataaataaataaataaattagtggctactgatcatgtgtttttagaagtcctatggagtactgtttttgtgccagtgaccatgtcagcaacatactattggcagaacttaacatttacttaagatattaaaaaatcagaaatttcagtgactagtaattagcttaagcatggtcttcttccaactcagcatttatatattttttcagctccttggtagtttgatgagctttcttgattttagctcatatttgatatactacttaagaacataaaggttcattgctcagagttcttttggtttgttgagcattctgaatcaaagcaaattagtcaccagttaatataaatggattgttttctagagaattccaatatttgccacaagcatacagattgagtgacataattgcattcagtgaggtaaattatgatgaaagccaatggggattgattttattaataggaactttggtaaacagaattaagggaagggaaaattcttcgttggatttttttgacagtattctgttgatgaattgctttgtatgttgaaatgacttttaatatctgtcttatatgaaaacagttgttgaaattatagtgttttaagaaaaaagtagtacaacgtgttcatggttgaaaagggaaaattaataggatttgagtagacagcttgatacagcttgacccaagtacattttatttggtctgaattacttgttcaccatggaaattgttgatatttgtgaaatgcatttctttaagcatgttctttatatgaataacgttgagagcccccgttaaagggggaaagtaccatatcgattggtgttgatataaattataacagttagtgaaactcatttgactaaaactcacagtattgtaaaccaaaatagatttgttaataaaataaagacgttaaaaaccagctgggcgtggttgctcatgcctgtaatcccagcactctgggaggccaaggtgggctgatcatcagaggtcaggagttcaagaccagcctggccaaaatggtgaaacccgtttctactaaaaatacaaaaattagctgggcgtggtactgtgtgcctgtaatcccagccacttgggaggctgaggcatgaaaatcgcttgaaccggggaggcagagtttgcagtgagccaagatcgcgccactgcactccagcctgggcgacaaagagacactccatctccgaacaaacattagaaaccaacaacattcaaacagcaccaattgttgtaaaaatgatcttaaacattttttttggtattaaaactagtgttcacaatagaaatttgtttaaattgctgccttatagagtctttgcatttggtctgtgtatgtactattgtcttagtgataagttttctcttcaaattaattggaaagcttgctgggtgcagtggctcatgcctgtaatcccagcatttttggagcacaggatgggggtatcacttggggccaggagctctcatagggagacccttgtctctacaaaaataaaaaataaaaaattaactggacgtggttgtgtgtgtctgtagtcttagctacttgcgaggctgaggtgggaggactgcttgagcccatgatttccaggttgcagtgagctacgattgtgccgctgcactccagcctgggcaacagagcaagactctttctccaaagaaagaaatgaaaacttgattaattcagatactgattacccttcacttggctacatgcttttgttgatacattaaatttacctcttctgtcaaaataataggaaactaaattagtaactggcatcaatgtgatgatgactcttgacgtcac

SEQ ID NO: 115343 - DNA, 1053 bp, Homo sapiens
aatatctgccacaggaacaatttccattttcttcattaatataatggtggaagaatattgagttcagaatcagatgtggctaacattagatcttttgcttattgattatttagattttgggcacattgcttaatctgagtgaatttattcatctgtgaggtgaggatgaccacaaaaattataatgagaaaagcactgttgggccgggagtggtggctctcacacctgtaatcccagcactttgggaggctgaggcaggtggatcacctgaggttgggagttcaagaccagcctgaccaacatggagaaaccctgtcactactaaaaatacaaatttagctgggtgtggtggcacatgcctgtaattccagctactcgggaggctgaggcaggcggaggttgtggtgagctgaaatcgcgccattgcactccagcctgggcaacaagagcgaaactctgtctcccatttaaaaaaaaaaaaaaggcattgttaaggttaaattgtctactatgtaaaaatatttggtcatgtcacaggtgtttaataaatgtcagctaattatgttgttcaaatccaataaatgaaggagattctagttgtagctttgttagaaggcaaaaatgaatttctaggtagtgggccaaagaatgaagtagttaaatgtagtgattgagtcagaaacttcatgtatgtagaaggtagctatatggagagtgtagtgaaaggaaagaggtgaggaattgaaatgtcaactctgaattatctgtgtggccaatttactttgtattatatgtggcagtatttttgttctaatttgtcttcctgagaattgggccagttccccgtcatcactgcatttatagaagaaaactaattcttacattcataggtatgggaagagcatgaataacaagacaataaaagtgatatttaatatttaaagtcaattatagggccaggattggtggtccaggcctgtaatcctagcactttgggaggccgaggtgggaagatcagttgaagccaagagtttgagaccagcctgggcagca

SEQ ID NO: 115344 - DNA, 1031 bp, Homo sapiens
gactggagtacagttgtgccatcacagctcactacagcctcaacctgggctcaagggattctcctatgtcagccccccaagtagctaagactacaggtgcacatcactgtgtctggctaattgaaaaaatttttttttgtagagacaaagtttcactatattgcccaggctggtcttggactcctggactcaagcggtcctcccaccctggtctcccaaagtgctgggattacaggcatgagccaccacacccagcctacttcctggatctgataccttcatatttataaaaatttttatttcttcttatatcttcagctttccacattggatcattttccttctgcctaaagtacattctttagaattagtaaggatcttttgaattattctatttttatcaaagttgcatttctgccttctaccatatctggcattttcaagtcctgatccctttgaggctctatgtggtagattaggtcctcctcagctgttaggttcctttgtgtacactctaaattgaaactttttatttacttctctagaactgtgtgttgaaatcattttcttgctgatgactctactcctattttatatagttgtgtttggtttcctcccttacagtaattttaatataagaatctagaagaagataaacttgtgtgcttagccacattgaactagaagtctctgttagccatgtttaaacttacttagttgtagtatagtgatagaactgccccctgctttaacacctggattcctctcagatgagattacctttcacattttgtagcactgatcattcctcagattcctgggctttactcaatttagattttgagttacatgctaagattttctctcacattttattaatgtcaagaattttttttatacttcatccatgccattatcatctgtttaccaaaaataattggaaatcttacattgttgagtacaatcctaatattatttactattctttgtttgagattttttttttttttttttttttttgagatggagtc

SEQ ID NO: 115345 - DNA, 1597 bp, Homo sapiens
cagtggcgtgatctcggcttactgcaacttctgcctcccaggttcaagtgattctcctgcctcagcctcccgagtagctgggattataggcacatgccaacacgccccgctaattcctttttgtatttttagtagagacggggtttcaccatgttggccaggctgttcttgagctccggacctcatggtctgcccgcctcatctcccaaagtgcagggattacaggcttaagccatcacgcgcagcctgtttgagatctttattcatttttgttttgttaactttgttgtgtaatatcagaaaagctatactttggtagtaatactttgtgtgtttttgtgtgccagaagttgtcttttttagccctttatattgggctttttttagaccgtcaggaagtttcaatctttaccctagtaagtcaacatgtgtttaatttttggaaagatgaaccttttctcagattattttaagcccttgttctttttatcctttagcatttcaataggtgaagcaccataccggctttatcttttggagagcttgaatcctcccatgaactggagagtccctccgggtttccctaggagtccatatttagttttgggttttgagatgatccatgaggaagcttgatttagtttttgaggagggaatcattacagatatctacccagctcactaattcacatgatcttatttaatgtggagaacttaatttattctaaactttccagctgtgaaactgatgcttttaaaagtttttgtaagggaagaaagaaagacttcactgcaatgtctgtttgattacacacacacattgattaaattataggaataataggtatttttggcaactgcagtagtcttgagaaaagtctgcctttagcaattattcgtagtatttatcttcagaaatcaggattgagttggttggtctgcattcatataatgctttgaatgtagataaatggtcaataaatacatgaatgaattgatattgtgaaatagaattctcagtcataactgaagtatttagaaataaaaggaatgtaatttcttgcttattggtaataactttgtaagtggagtaaaaagaatgaaaaaattgaaattttaattctcttcaaatggggaagggaaaatagaaatgtattttatattctaaatcttaagagtcattaggttgatgtttgcaattttttatagttaatgcaaggcatgttaaaatataatttgtcttggttttaacattctgagccactgtgtagcagaatttatctgtattacttgacattgcccaattcttcctatattctgtgggataatgttttagctttacttgttcaattggaatatagtttgtacttttttagtttagttattttacccaggaggcagctgttagttaaaaaaaaaaaaaaatttggaatatactgttcttttggtggttttattctatactaaaacttgaaattgtgagtgactcttggtcatgctttatttatgcagaatatcctccgaatcctaaatctagagctccaaggatgctggtcattaagaaaggtaatacaaaagacttacagctatctggatt

SEQ ID NO: 115346 - DNA, 2477 bp, Homo sapiens
gtcccagatcttgggaggctgttgtgggaggaacacctgagcctgggaatgtcaaggctgcagcaagctgtgattgtgccactgtactcaaacctgggcaacagagtgagaccctgtctcaaaagtggtggcagagtggggatgggggggaattccaaacatcctaataaacaaagaataattttttggggggtggtaggagggacagagtctctgttgctcaggctggagtacagtggctcgtttgtggctcactggtgccttgacctcctgggctcaagcagtcctcccatcttagtctcctgattgtctaggactacaggtgcttgccactgggccagctaattttttactttttgtagagacgaggatcttgctatgttgtccaggctggtctcaaactcctggtgtcaagtgatcctctctcctcagcttcccagttcctgggattacaggcatgatccaccacacctggaccaagagtaatttttaagaaaacaattaagaaaattgcaattttcttaatttgatacttgtgatagttaccttgtaggattgaaattaactaatgaggatttgtattgtataatgtcttcttttggggatgatggacattttattactattaacactgattggggggaaaggaggaacaagagagaaaggtatgtattgttactgtactgactgtgagtacctggtagttcaggtattttctttctcatttgatcaaggttttgaaactcccagaacagggagttctctgaccagtctagtgtcaaaggacacccatagcacttatattattatacctgaaattgctttgggtactgtattggaacccctcatatactattttttttttttttttttttttttttgagacggagtctcgctctgtcgcccaggctggagtgcagtggcgggatctcggctcactgcaagctccgcctcccgggttcacgccattctcctgcctcagcctcccaagtagctgggactacaggctgggcatgtagccactacgcctggctaatttttttgtatttttagtagagacggggtttcaccgttttagccgggatggtctcgatctcctgacctcgtgatccgcccgcctcggcctcccaaagtgctgggattacaggcgtgagccactattttttatttatgatctcagacagaatttttgagctttgagggaaggactagcattcctagctgcttaattctgctaagattagttataatatacatacattaatgccaacaagtaagcattattatggtttgtttccgtgactaataatccatatgacacagagttttaacattctgttttgtgttccactgtcaaaacaccaaagaaccaaaaacaaaaggattctttctcctctcctccctgccatctcacaaacattttaccaggtgaaatccactcttataaaccctatgtatgtgtataaataattataaaatacattttattggagctgttactgaactctagaactctgtgtaacacagtttgaaaagctgctcttctgtgtattatagaaaagtttaaacaattctaggatgcatttataaaataatagacacctaatttagaatcatagttctgagtattatcagaccttcattgtttgtgggataagaaaattattttgttgactcattcagtaggggaaaaaacagggatagaactagactgtaacatagacattataatcaattttattttgtgagtaaaggtaaaataggaagctgtggtagtagtgaattttatgttgacattgattccttggctacatatttatcagtatttctgaatttcctcttagtgtaatcgctcaaattcctcttctcctgttgacaaacttaatcagcagcctcgtctaaccaaactgacacgaatgcgcactgataagaagagtgaatttttgaaagcattgaaaagagacagagtagaagaggaacatgaagatgaaagccgtgctggctcagagaaggtaattgaatttatagcaatacttgatttgacattgatatgtcattgaaatatttgagcatgtattaggaccttggaatacatttgaatcatttccttggaaagaaacttggaaagccatttgcataaataatgacttggcttctcccctcctctctccttttctcgcctccccccttccccctcccccttcccctctccccttcccctccttcccccctccccgtccttccccctccccttcccgtccttccccctccccttccctccttcccctttcccccttccctccttcccctttcccccttccctccttcccctttcccccttccctccttcccctttcccccttccctccttcccctttcccccttccccctcccctccttcccccttccccctccccctcctcctcgtttgagacaaagtctcactctatcacccaagcggagtgtaagggcatcat

SEQ ID NO: 115347 - DNA, 1445 bp, Homo sapiens
agatatgaatacttagggtaagaaagctttggatatccatcctggcttaatttttcattcctaaatttaacaattataagtattacgtttatggttgttggtttttttttttttttttagagttttgctcttgtctggagtatagtgtacaatggcatgatcttggctcactgcaacctccacctcctaggttcaagcaattctcctgccacagcctcccaagcagctaggactacaggcgtgtatcaccacgcccagctaatttttttgtatttttagtagagatggggtttcaccattttggccaggctcgtcgcaaactcctgacctcagatgatccacccgccttggccttccaaagtgctgggattacaggggtgagccactgcgcctggccgcatttatgtattttcaatggaagcttagttaggatctattaaaagtttttaataactgtattctgtagaactcattcttttttttttttttaactctctaaaaatcaggatgacgactcatttaatttacataacagcaatagtactcaccaagaaagggatataaaccgaaacttcgatgaaaatgaaattcctcaagagaatggcaatgcctcagtgatttcccagcagatcattcggtcttcaaccttcccacaaactgatgttctttcaagttcacttgaggcagaacacaggctagtatttgtttgtactttttgctcagcattttctgtattcgagatttcaatattatagagtttttacgtgatttaacaggtttattggaatacaacttacgccataaatttcacccattatgatatacagatggtttttaatatattcaaagtagccctttgttcactcgcatttacttttcatttgcactctgtcctaggcagctactattctttctatagatttgccttgtgtatgtatcttatataagtggaataatatagtatgtgatttttgatgtctagcttctttcactaagtataatattttcaagttttatttgcattgtaagcacgtcagtactttgttcctttttattgctgaatagtacactatatgactatactgcttttttgttcatcagttgatgaatattagttgtttccacctcttttttttttttttttaacagtaggctctagtccaatctactttttgactgttttggataatgctgctgtgaacattcatatataagttcttgtgtggatatgtttttatttctgttggatagatacctaggagttgaattgctgggacatatgatagttgtgtttcacatttttagaaactgacaaactattttccaaaatgactatgtcattttacttccttatcagcaatatagaaggttctagtttctccacattcttaccaacacatggtaccatctatctttgattacagtcattctagtgggtgtgaagt

SEQ ID NO: 115348 - DNA, 1025 bp, Homo sapiens
atatcaatacaagatatgtggccatataagaaacaagcttggaggtttcctgatcaaatgaagtagctattgatgcagtgttcatgactgcccaagtagaaaacctaatgagtagtcagaaatatggtggtactgaagaaaaagaggagtgatattgctgttacttttagtataagaatttagcagatttgcttcacatctgttaaaagtttccagcctgaagagcctttgacaccaaggattaagcagtcaaggagttcattctaattttaatatcagtttattaatcttacctgtttattcattttcagaaagatactcaaagcctgagctcaaaaatccttttgatgtgtcttggggtctttgtataatggatcctggtggatcatgttttcttatacataatgtaaatgatactgtcctactcagggtaagctttacattaaacttaatttcctctccttttcagattgttaaaggaaatgggctggcaggaagacagtgaaaatgatgaaacatgtgctcccttaactgaggatgaaatgagagaattccaagttattagtgaacaggtaagaaaacctgaatcatacaacttcacttttaaactgcccttatttagaacaatataattatatgtaagcatggagtgggggagatttaggaatttatcacgataggtcagaattgcttttaaaaaaaaaaagagggaggacaggcttttgctatggtgtccagctggcctctagaactcctgggtgccaggtgatcctccaaccttagcctctggagtaactgggactacaggcaggaaccactgcacctggttgaattgactttatagaagtctgcaatagtgacttatttaaactattgggtgtgcaatagttaggaattagtgtaagtgatgtctatggattagtcattttccagaccttttttgttttgttttttgtttttgtttttggcttttctgggggaggagcaagagtgataagaagtagagagtgttagtagcttcctaa

SEQ ID NO: 115349 - DNA, 1858 bp, Homo sapiens
tatttattaccaaccttttagttatgatttctcattttcagaaatagagaactgtattttttctagtatcttcatctccggttaaacgagacaattttgtaactttatatacctcattctactttacaaactatgaacaaagcagattggggggtgtattaatttaggtcagaataataaaaataacagatacagcttaatggtttctgattatattctggtaagtccctgaaggtatttattacagttgtcacttgaggcaataaaaatgtgggaaagtttagtaccttaatcagtgtgacaattattactcacatctactttgtctggatccagaattttttcagaaatatcattacttgtgtagtttttgggttaggatacaattttattatattcatgcttatattattacagtaggtttgtaactcttgagggataatttatttattttgctgttaacattttagttacagaagaatggtctgagaaaaaatggtattttgaaaaatggcttgatctgtgacttcaagtttggaccgtggaagaacagcactttcaaacccacaactgagaatgatgacacagagacaagtagcagtgatacatcagatgacgacgatgtgtgaaggatttcctaacagctttagaaatcttagtgtgatacatctctcatacagtttggggtgaattgtaaaaatgaagaactataatttatgtagtgaaataccccattagaagaggattttttgggggacttcaatatgaagaaaaccaagaatgttttgttgggctgtgttgaacattatttctttgtaaatgaatgttgtaggaatgaggacttgggttggtccaacattgactttcttcatcactgcaacatttctctgactagcaatgtgacgatgtaacaaatgagattttctcatttaataataaaaaattgtgtaatgttttgcaaagcttctgtcttaaaatgtccaggtcttaagaaaaaaggcagcttacactgttttgcttgcagagtcatatctttttcgtacaatggaaatcctcaagtccactttgtgcggtctccctctccttcccccaaaaaacaacaacaacaaaacaaaaaccaaaaaggaaaatgtagcatgttggctaaaactggagcaaagtgcactaaaacaatttcctgaactcacctgttgtactattcaccttttaaaccataaattgctctttagccatttgtagtgcagtaaatgttacaggaaaagacttggcacattttcttccaaattttaagaggtgattttcaaaagctttattggggtatgttgtcagaccagggttttcagagttgatggaaaagagtcttgtgagaaaacttattttgataaattattacacacgcagaaaaactgatcacactgactggatctgtccacgacatggaaaataaactggattttcagaatattgttgttttctgtagtgttcaaggtattgtttctaaacataaacatactctaaacatgctttattcacttgttaaagtcatacttttaaaagtaataccttactaaagatggtgattacttttccgaggtcagaaaaggaaagctaagcgttttcattatcaaatacacaagcttattaaatgaatgactgttaactactttattttcatttgcacattaattttggaattgtttctgttttgctgctgacggaaatactattttggctctgtgtatatttgtattttgatttttctggtttgtttacccccatttgcttttagctcccccttatgtttaaatatattctaacttatgtaaagagcataatcttagagcaaaaatacttgagg

SEQ ID NO: 115350 - DNA, 1030 bp, Homo sapiens
cattttaaaccgttggcaataaagagtatgaaaacgcagaaataatggtctcctgtctttagtagaactcttcaccacatcgttacattttttgataagatcgtgccaagcagtgccaagaagccactgagtatagaagcatactagagagttagatctttaattttttctaactacagtttctaggaagtctaatacctgaagtacaatcataaactttcagagtagatctagcttaagaacaccattcttcttacaaccaaaatataagcctcctacaaaatccaaacccaatttctctctgtagtatttcttcaaaacttgtttagcttggaggtgaagccagattaaatagatctctgttattcagtgtcaataggtacaggaagtttatcttaatatgggcaaaactctgaattagaatacatgcaccacctaaacatattactcagcataaacctgcctaaacacttccagtgccactggcagtactagcacataattccagtagtgagaaatactttgtgaataagtcattttattttccttctggtgcatggtagttgaggagtggtatgggaaccaagttgtggtttggggtccatcttttaatctattaaattaagaggtaaatttgaggttttctttttcagtgggatctactctttgacaggtgtagtaaaggaaagctgctcatcctgttactctgaacttacaggcatctgcataagatgtaaatattttttgttcaattgtaatcccactataaggaaaatactgtcctatgaaaagaagtgctttggtttgttaaggctgtgtttacattgtggtcctgtacagcatagtatagagatgctagttgcacttttacatttttctaaaattgttaaaactccacttggtatattgtattaataaaagccaaatccagggaatatgttatgagtatttcacaactcctagattaactcctgctggctggagttctctggccatgtatacaaattcagttgtatttttataagcagag

SEQ ID NO: 115351 - DNA, 1743 bp, Homo sapiens
gaaaataatcttgagttctatgtctttcgaattaatggagtgaaacttagcatctaccaaagcctgaggttttattgctaaaatattgtataacttgaaacatttctgtctgacttttcaggccttgaagacagtaccatgggaagtgttgcagacacagtggcaagggttcttcggggatgtctggaaaacatgccggaagctgattgcattcccaaagagcagctgagcacatcatttcagtgggtcaccaaatgggttgattactctaacaaatatggctttgggtaccagctctcagaccacaccgtcggtgtccttttcaacaatggtgctcacatgagcctccttccagacaaaaagtaagtgtatcaattaatgaaatcctgtcagttctctagtcttgcactaaagaaatctaaaaacaatgattaactgcttctatttttttttcctcttctctccctttcgttcctgtttttatagaacagttcactattacgcagagcttggccaatgctcagttttcccagcaacagatgctcctgagcaatttattagtcaagtgacggtgctgaaatacttttctcattacatggaggagaacctcatggatgtaagtactgtggctttagagtggtgacatttgaagtgtaggccacaaagcagtagtgtctgcatcactttgaagcttgttagaaacagattctcctgacctaccgttggtgtactgaatcagaatctccgggaggtggaggcagggatttccaaagccattctgatgcttgcttaagtttgagaggattttcttagaataataatagagtgcatgctacaaaatctttgtaggcactaactcactctcctaatctcttccagggtggagatctgcctagtgttactgatattcgaagacctcggctctacctccttcagtggctaaaatctgataaggccctaatgatgctctttaatgatggcacctttcaggtaaatgaactcttcaggaaagtgcacgtttaggtcctaaacagaaagatttgtacctagacagtttagtgattgactgaacttttctaattctcgaatattttgagagatctaatgtctatgtttattttttaaggtgaatttctaccatgatcatacaaaaatcatcatctgtagccaaaatgaagaataccttctcacctacatcaatgaggataggatatctacaactttcaggctgacaactctgctgatgtctggctgttcatcagaattaaaaaatcgaatggaatatgccctgaacatgctcttacaaagatgtaactgaaagacttttcgaatggaccctatgggactcctcttttccactgtgagatctacagggaagccaaaagaatgatctagagtatgttgaagaagatggacatgtggtggtacgaaaacaattcccctgtggcctgctggactggttggaaccagaacaggctaaggcatacagttcttgactttggacaatccaagagtgaaccagaatgcagttttccttgagatacctgttttaaaaggtttttcagacaattttgcagaaaggtgcattgattcttaaattctctctgttgagagcatttcagccagaggactttggaactgtgaatatacttcctgaaggggagggagaagggaggaagctcccatgttgtttaaaggctgtaattggagcagcttttggctgcgtaactgtgaactatggcc

SEQ ID NO: 115352 - DNA, 2392 bp, Homo sapiens
cacttacactgcaaagttaactttcattgctcatcctgcaaagggaaaccagtgattttgataactgttttgacagattctcttttttccttctcctcttcttagtcaatggctcatattttgaaagcaagaaaggtgttgacagagccagaagttcgatactacctcaggcagattgtgtctggactgaaataccttcatgaacaagaaatcttgcacagagatctcaaactaggtaagtcattgacgccaaaagctgagttttgtgttagagttcttttttctctctctgtttttttttacatattaatgttcttaattgggatctcgtgtctgcaatcttgcttttgaatgggcgactttcatataacaattggctgcctggctccaaagtggatgtgtgtgtacttggttagaacgcattttcaaagggattcacattttgttttgtttatcgtctagggaacttttttattaatgaagccatggaactaaaagttggggacttcggtctggcagccaggctagaacccttggaacacagaaggaggtaagagtcagaaagatgcatcctagtagacttttgtggagaccaaatatgccttcattattttgcatttaatgtttcagaggtccggtaataaaatctataaatcatagcaatgttaatttaaagaaatacttattaaatgcccactatggactagacagagcaccctgtgcctctaaattgattatgaaagcagtcaatgaagtcttttcttggcttaaaatgtataaaatgccacgacgtccctggctttagttggttaacaacactttgcatgtgggctaaaacaacgtgtgtgcatttttaaaaattaccaaaactcatttggtcagatctcaattgaattttcagatgccaaaagtcaaatgtttccaaatagaaattcagtatagattttaagattttgtttaagattttgtctcccatcaagtcatgtcaagagaaccaagtttaagtagtggaatagttcctaacacgatctcaatattttgtctttccagaacgatatgtggtaccccaaattatctctctcctgaagtcctcaacaaacaaggacatggctgtgaatcagacatttgggccctgggctgtgtaatgtaagtaaatgcagcagaataattaaaaagcaaattcggatttagattttaacacttgaaaagagttgctttatgaccattgctaaagatgtgtttctttgcacacaggtatacaatgttactagggaggcccccatttgaaactacaaatctcaaagaaacttataggtgcataagggaagcaaggtatacaatgccgtcctcattgctggctcctgccaagcacttaattgctagtatgttgtccaaaaacccagaggatcgtcccagtttggatgacatcattcgacatgacttttttttgcaggttggtgcactatcttttttttttaattacctggtattgatcccagttacctgacaggttactgaaggctttttctaatattccacagggcttcactccggacagactgtcttctagctgttgtcatacagttccagatttccacttatcaagcccagctaagaatttctttaagaaagcagctgctgctctttttggtggcaaaaaagacaaagcaagatatattgacacacatagtaagttaacaagacttcttttcctttttcgtacccaatattatatttaaatttggtaaattagttaaaagagaattttatattagcataacttggccatatttgcgtattcttaaatgttgatatttatagcataataaatccataccttgaattgtgattgatagctttttattttgcaaacactaaagagggcttttgggggtagctgcagctaaaggcaaaggtaaaatgctatttttgcccaggatgctcataagttggtcaataatgcaagaaggagaaaatatgactaaccctgttcctaccttgttaagatagactaatgtttgtaattctgtttcttgatatacagatagagtgtctaaagaagatgaagacatctacaagcttaggcatgatttgaaaaagacttcaataactcagcaacccagcaaacacaggacagatgaggtgtgttgggaaagagtaaagtagatactcacgctttacgttatttccactctttattaattagcacttggactatgattatcatggttcaaatatgtcatatttacttaaagtttttcttcaaaccctttgaaagggaagttaaaactaaaaggaagtcttttagttttacagtgcatgcaagtgagtttactgcgttatcttttatctggcttgtgtccattgctttttgatgagctttcccagcaat

SEQ ID NO: 115353 - DNA, 1136 bp, Homo sapiens
cttgggatttcttatcctttctaatatgtactaatatctgccaattcttaaaatcaagaaattcttctcgaggtctatatctacctcctttcaatagtaacacagcctagacacagaacactatgtgaagcttcatacaaatgattttactttatatagtgacaaattctgaaagtcgtaattaaatcatcccttgtcttgatgaagtttgaatatggaaaaggaactctctccagaagcagctagctttttcactgaactctcaaggcagaggatgagatgatgatgaatctttcttaggatggctacttccttgtcaaataaagccaagccatgcaaatgccagttaagtaaagttaagggtaaaatagagacaatagggcatagtaccaagatttagtggagaaaactattctaatggcttacacggatgaaatatcatgggtcagtctgtacacagctgaaagcaggtgcctacaggcatcaaagagagtatatctttgggatttgggattgagacaagaaaaagtcatccactgagaataaagttattaagtaagtgccacaaagtccatgagattagccatctgcagaaggaattcactccaagataggatgaacaaacgattttctggtgagaacagcacacttctcaaaatccatcaagggactagagtgtcttccaaatttctcagatggagggtaagacttctcttttatcagtagtctaataaatgataaaaatttcaaggtaaaaccattaaaagaaaatggagttgatttgtgtgaagtcaaggaaaaaaagagtcaaggattgagattatttactgcccagtatggtcaatggggaaatgagaggatgcctgcattgagttggctgagtatacaggtttacttgctctgtatcccaataaagagcattgtacttactcaatggtatcccttaacatcacatgcctggcacatagtgagagctcaataggataagaaatacatgagtagaaaaggaccaaggcaaggaacagacagctacgatttgtcaaagggagaatgctaagtgcagcaagagactgcagacacacatagggtgatttgaaatcaccatagggctgtgtagaagcacccaatctctgcag

SEQ ID NO: 115354 - DNA, 1598 bp, Homo sapiens
aacagtgcaaaaactttcatgccttttttttttttaagtagaaaaattgtttccaaagtgcatgtcacatgccacaaccacggtcacacctcactgtcatctgccaggacgtttgttgaacaaaactgaccttgactactcagtccagcgctcaggaatatcgtaaccagttttttcacctccatgtcatccgagcaaggtggacatcttcacgaacagcgtttttaacaagatttcagcttggtagagctgacaaagcagataaaatctactccaaattattttcaagagagtgtgactcatcaggcagcccaaaagtttattggacttggggtttctattcctttttatttgtttgcaatattttcagaagaaaggcattgcacagagtgaacttaatggacgaagcaacaaatatgtcaagaacaggacatagcacgaatctgttaccagtaggaggaggatgagccacagaaattgcataattttctaatttcaagtcttcctgatacatgactgaatagtgtggttcagtgagctgcactgacctctacattttgtatgatatgtaaaacagattttttgtagagcttacttttattattaaatgtattgaggtattatatttaaaaaaaactatgttcagaacttcatctgccactggttatttttttctaaggagtaacttgcaagttttcagtacaaatctgtgctacactggataaaaatctaatttatgaattttacttgcaccttatagttcatagcaattaactgatttgtagtgattcattgtttgttttatataccaatgacttccatattttaaaagagaaaaacaactttatgttgcaggaaaccctttttgtaagtctttattatttactttgcattttgtttcactctttccagataagcagagttgctcttcaccagtgtttttcttcatgtgcaaagtgactatttgttctataatacttttatgtgtgttatatcaaatgtgtcttaagcttcatgcaaactcagtcatcagttcgtgttgtctgaagcaagtgggagatatataaatacccagtagctaaaatggtcagtcttttttagatgttttcctacttagtatctcctaataacgttttgctgtgtcactagatgttcatttcacaagtgcatgtctttctaataatccacacatttcatgctctaataatccacacatttcatgctcatttttattgtttttacagccagttatagtaagaaaaaggtttttccccttgtgctgctttataatttagcgtgtgtctgaaccttatccatgtttgctagatgaggtcttgtcaaatatatcactaccattgtcaccggtgaaaagaaacaggtagttaagttagggttaacattcatttcaaccacgaggttgtatatcatgactagcttttactcttggtttacagagaaaagttaaacagccaactaggcagtttttaagaatattaacaatatattaacaaacaccaatacaactaatcctatttggttttaatgatttcaccatgggattaagaactatatcaggaacatccctgagaaacggtttt

SEQ ID NO: 115355 - DNA, 1058 bp, Homo sapiens
aaaaccttatgctctggatgtgttatagatactaagaataatgtcatattctgctgagctcatggcaactctagaggagaggttaaagatccaattctttcactttagagaaagctgagacctacagagtgaaatgacctgccacatgttagtagcattagaattcactccccaagattcattccagtgttgttcctgctcttatgttatctgatttattctctcctggatattgtcaggtaatgataagggcagcagagaagtttaggggaaattacatcctaaatccagaattttaagaatcagataaacttctcacaaacagttttgctgatctttggccttttgtcttttttacagactctgaacttgccttgatgtacaatgattcctcagtcttagagaaccatcatttggctgtgggctttaaattgcttcaggaagaaaactgtgacattttccagaatttgaccaaaaaacaaagacaatctttaaggaaaatggtcattgacatcgtaagtagctgataaaagccaaagaagagaactgtgatgcaagttgtttataatttagacataagaacaagatgagtattaggtaaaaggaactgcatttcaaaacatattatggccctttatgttatagaagctgcccgtgatgctggctgtgatgttctgtaataggtttttcacttctagcagtttggacttgagaataatgtcagctcaccctcatcatttattttctgggcccctccagtctggtggcgggcagagaaaaatgactaacaaaagcagattgtgtgggccacagctcaaatggattttttccccaccttttctcatcagtagacagtgccatttagacatccatgactttactcttttttctatgcatcttattcagtgattatgagacacaggaaaatctctagctttcaaaaacttataaacttgtgatgatgtcttatccatggagatgtcacccatttttcaccatgaaagtggttgtcagtgcctagcatttctgtatattacacacatttatctgggctttgg

SEQ ID NO: 115356 - DNA, 1030 bp, Homo sapiens
ccagattagacaggataacatttcatgttctacctacctatgagcacctataatgaggtacttttagaactcatcaaagcatacatacaaatattaatatacattggatgcagctccctgcatttacatggtatcagtggggaggtatcagtggggagggttcattatgtcctttctaagaagagcagggaggtcatgcaatacagtgcatgctggcactttacatgagcctggcctgatttattttgatgcttatgaatgtcttgagatattctgaattttatcaatttttagtaaatacataaaatgtatttttacataaaatttttgtgttaaaggtatatatatatatctatcttaaacaccaaacattcaaactggtatgttttctttgcattctgttatatagcatattatatgttcccttagaattaagagtagatttagaagacaaattaaaacaactgatagaaaggtcactgtcttccaagtactctgatacattttttaagggtaatgaggacctgctctattcttcattcttttgagcccttaaagcagcagtctccaatgtttttggcaccaggcaccaggttttatggaagacaatttttccataaactgggggcgcagggagagaatggttttgggatgaaactgttccatctcagatcatcaggcattagttagattctcataaggaacgcacaacctagatcccttgcatgagcagttcacagtagggttcacgctcctaggagaatctaatgtccctgctgatctgacaggaggcggagctcaggcagtactgatgcgggcttgcctgctgctcacctcctgctgtgcagcccagttcctgacaggccacggaccgatattggtccacagccgatggatggatcggggacccctgctttaaagggcacttgggctttgactggcacctggaggaccctggcatcagggtccctgtgcagtctgccatttaagctaacaaggcctcagtctacagatgaatctgatactctaa

SEQ ID NO: 115357 - DNA, 1021 bp, Homo sapiens
cattttttcatagtaccaaactgtaaaatatattttatagagagatctattcatatcttcaacaaattcttattaaatgccagccattgttgggcaataggtgtttaatgataaattagaaatgattcctgccctcgatgaatttaccgtcttgtgtacatcaagcctagtaaactggtgggcagataaaatacaattgctaaataaaagtttgctaataatagctgagtttggtgtcctgggacaactcttgtacctcatccacagaaagaaaatgcagtaaataaaggtcagtaatttgaatgtatcctggacttactttcaaaacaaaattgctgttatatatagttaacatttattaaacacttagaatatgttctatatataaggatgagttagagttgctcatcactgccttgaaatcgtggatgaaagtaagaagatatcttaggtcttttactatagaacacaattagcttatgtacgtattcacttatcaggtaatatttatgattctctatgctcccataaaacctggggatttaacccttatctcactatcatacagaaataaaaagtagcagaattaatctaagtcatccaaaacctgctgtttcagctcccacagtgttacccatttcagttagctgttagttttatatactgctgttttcatgacatttgcgtataaagtttctaccatttcaaagtatgtattgaaactgtagtccttagttggcaagaacaatattcagttcattaagtcagtttcacaaaggaatggaattgaacagtggaaataaccacctgttgtgtattctgagtctgctgtcatgctaagtcttgcagcattttttattaggacattgtatcaaagaggtaaccatggaatacatttgatattattattttgtaatggaacttatttgcttaattttgtgtttgaagacatcaaattaagtccaattcaaatgtaaatactgaactctctaaaaggaaactttttagttggaaacatttc

SEQ ID NO: 115358 - DNA, 1003 bp, Homo sapiens
gaaggttttatttttataccatcaatggagtatttgtttaaataactttgaatactgatatctaccaaacttgtaatgcatcacagtgcagcatattcaaatgatttttagcagaatattgtcaggaaaaaataagaaaattttcttactattggacccataccacctccttaaatatatattgggaggatatataatatacccagtagcacactggcgtgatgtagaagtaaaggagattacatttaaggacattttgttttattattttagtttgcttcctgaacaatcttaaatgcctaatgtaaattgaagaattgcagttctgaaaagcaaaatacagtattgagattcaactgcatttttactttcctttatgccttaactgctgtacacagacattctgatgtataatgagaacaaaggattcaaaagcattcacttagaaatcctcccgtttttttagttgcaaccctaaatctgtgtattgttttcagactacttaggccaaaaacaattagaaattcatcaatggaaaatatttagaggtcacttaaaaaaataaactaaatgcttaaatggttctgcattttacaatcggttcgtttcaaacagcagtttaatgttttgtcccttctaaatatattaattgagaaatatgatgggatttcccagaagaatacattgtattagctttaaatcagtccttccccctttggtaattttatgtagttatcttagtaaatattatataattatttttagatgagagaagtatcacatttttaaatgtttgttgaatgatctagtgcatttttttagtacatctagctatgcactccaaaaccaatttgtgagatcaactaccagttgagaaagcacttatggtaatttttgtggttattcatttagctttgctggactgaaacttttatatggatagcaaaaaaggaaaacaatgttaattccttttagaaaatacccttgtgttataacttaatgt

SEQ ID NO: 115359 - DNA, 1020 bp, Homo sapiens
gatgactttattatttgtatttgatccttgtccatttttctctagatctggtactaatttcatgtggaaaataaatcgttaggaggttttcattttgtacgttttggctgcaaacaaccacaacccagtctttaggttttcactgagggatttttgttttagcccaattattgtatgacatgtatctgctccagaggttcttataggtgaaatgagatttttatgtatctgtattcaaacacatagatagatagatagatagatagatagatagatagatagatagcgaaacatatagacatacctctgaaaatacaaccagccatataatgtaagcctgttgtgtgttaatgaatgatagggtaataatacattatgttcctgtcctgtagaggagttcgagtattcaatacagaggaccagaatgattggtcccagaaaaagtgctccttaagctggatcttgaatactgaggatttatataggcatctaatagggaagaggtggtattccaggggctggataaggcagggtaggatggggtattcatgtggattcgctttattgtatgtttgctggagaggagggtagtgggcattctggaggagtgagcctctctggaacagaggatgtgattataggaccagtggcaggtgtgagaaatgtagattgaggccatactgcagactgtcttaaatgccaggtcaagccatttgcacattgtcctataattcatgaagaacccttacatttgactataaggaaaatattatgaagaaactaaaataaggtgactttagaaggttatatctggtggtagtgtgcaggatagattatatcaaggggaaattgtactgaaagcaagaagaaaccgttagggaattaggtgtaagagtgataagggcctgaaataggatagtgatgaaaagagaggaatgagtaggagaaagattgcacagagaagggtgacagcatacataagacttggcaggaccacagccagaagaaagcatgaaattc

SEQ ID NO: 115360 - DNA, 1088 bp, Homo sapiens
gtggtggggacatatgataggtactgtggcctatccttaggagggatgaggaatggaactatttttaaacataaaaggtcaactttatatgctgccatataagtaacccagtgcaattggagcttgaatcaacagggctgggagaaagcttacagagtgtgcctttgaaatcccaatacccagtcatggtgatttatgagaccttaccagcttgcatatgtgatggcccactgagtttgtttactttagttttagctcagttacccagcactctatgatagcctattttttatttacactctcactaactcctttattatgatttctttgaaagaatatgaagacagccataaaaaagactcttattgaagttgagagggtctcctgtaggtcttcacttcactgtgtctaaacattggtctgttgcttgtgctttgcttttctctcaccctggatgaccttcaaggctcttccaaatgatttctctgattccctgaaatactgaaattgtgattaacagaagtttcaagtgttaatcaatatcaagatagtagttgtctcttcctggggaaactagaaatgaaaaccaaacataggcctctgtaatcattgcacagattaaaaatgaaaatgcagctgagaaacagaggaatgaatgagaaaaccctaaacctagttctagccccaggatgaggtctttgtcatgagtctgacgctagccacagccggtaagagaaggaattccctagtagtgtagttgttacaagggaatgagtcattttgcaggtaattgttcttcttccattttccacttgctgtcagccactttacagaggagtcggactttgttctgcttaagagaagtctctttccttttattgtttaaaaaaaaaaaaaaattccagaagcccttagaaagagatttgtgagatcaactggtttaccttcttcattcagatgaagtaacaaagcacagaaaagttattttgtcaaggtttctgtcttgtagcaaatacaaactttctggtgttaaacatatgaccctgatttgggtctttactgacatcatcacttttttttttttaatt

SEQ ID NO: 115361 - DNA, 1011 bp, Homo sapiens
aatgaatccctgttcattccttgaaattcttttttctttctaactaccctaaaaactgttccaggtaactattaagtttctggaccccgaggttatacctaggtattagttgataggctcactaaaattaatagaatgtttgcatttaagttagagacttgagtccaggagaaagtgaagatacaatggaggaggaagggaaaagaatctattaggcaatcaatgcaagattatttaactcacaacctctcacttgaactaaaataacttacaaggctcttgttattatctccaatctataggtgaaataaggccctagaaagattagtagctgaattgcctggaattgcttgtatgaagtggaatagagattggaatctttctccactcttccagtttctttcaaagaataatatcactcacagttgcacacatgtcacatgaagcccccaacctagatgcctaattaaacttagctcaaactccaattttttggacaaaaggcctccttattcttataaaagctttctcctctttctttgactcttctcttatgtcagctcagagagacatttctgcttgggccaatctggccttcaagctcagtcccttcaatgaataaaacaaaacaaaacaagtcgggattttgtaccttcagtaaccttattgacgattgggagaaagggaaaatgcacgggttggagttaccctttagaccaagctgactcctttctcttatatgcacacacacacacacacacacacacatcttcaataaccttattgatgattgggagaaaggaaaaatgtacaaattggagttaccctttagaccaagctgactcctttctcttacacacacatacacacacacacacacacacacattctctctctctctctcactctttcatgcccttacatacatgcacacacagagaccaagctgactcctttctcttacacacacacacatgcatgtgcacaaacacacattctctcgctctctca

SEQ ID NO: 115362 - DNA, 1047 bp, Homo sapiens
taccaagcttctcgtattactggtggggttcaacaagtatttgttgagaagtgatgaatcaagctaaagtttaagtaggcaaagatgaatcacgtcataacctctggtttcccaactttgtctatagaaaaggctccttgctaggtaaaacaaaaacagaagaagtatgtggattctcttcaactttgggactcatcaccctgaatctctcagttatctcaagactgattccctccaccctggagggcctccctgcccctcctttgtacagcagtgaaaggcagaaattgaatagaaggagggaaagagggaaaaaggtctagatgatcaagtggcaaaaacaaataacccagcatgaacaagtatgcagagagggaactctgaggaaacttgctgacaaaagatagagatggaggtgaggtcaaccacaggggaataatgggggcagacaagtctaaggaggtagattttatagggacttcgaatagatgaactgaagtttggggaagacctaaaggcattaaaaatccagtataagttcttgattaaggacagatatcataataattattattataatacaaggggtgctttgggaacataggctatgtaggagggattgacagaggaagggaggaaagatctaggaaaatgagggccaaacggaaaggtgtccttctcctgttcatttgccaatgaaatgcctaggatatatggtggtctgctcctaccctccacagttctagccactgcaaccaggatgcccagcaaccatgtcattcattcattcatatggtctatctgtctcctataggcatttcagtgagtggccgctgctttatgtgttctgttggtaaacttgtagtaccctgagaaaactcacacattatggagaaattacttcaaaaaatatgcacagtagttaactgaaatctttttatgtgttctactctcacgtgaagtagagaagtagagggagagttttttaattataaaaagggaggaagagggaagagggaaacaaaactaacatttattaagcaaggt

SEQ ID NO: 115363 - DNA, 2358 bp, Homo sapiens
gatgacaaatcatggaaataattatgaaaagaccatccagtttttaatgactttacaagaatagtgttcttgtgagactattgaataagaagaaatatatgaacatttgtatcattcaactgtctaactgataccaacaccaataaatatatgaacatccttattattcaagtgtctaatgagtgagggacagtgcctgtaggaaggagagcctcccaacaatggaagcagtgttattcttcatggtagggagaccattttttggttcctcacaatgacttccaggctggaatgatttccaagtagggcagggaagacaaatatctgaagcctaagggaagctccagggtgattcttgtagttttgtttggcagactttctaaaaagcattgtcagatagttttggagcaagcagtttagccatctactaccacacaatatattcaaatcagagtaagctggaagaaagtcatccaacatccaagtctcagcctggcctatgtgaacatacttcttcttaagactaagctgtaggggtactatgcttattacctcggtgtgaaataatctgtacaccagcaccccatgacatgcaatttacctatatgactaacctgcacatatacccctgaacgtaaaatttaaaaaatttttatagatatgttaaatttgagatgtttattgaacatcaaagcaaaaatggtgaatgaacagatatatgacacaaaaaagactaaggtataatcctatatcatgagtgaataggaattttttgttattggtgtttgcgttagttgagattttattcagcagtaaatagagagatttaaaatagaagtggcttaaggaagacagatatttctccttcatgtaaaatctgaaagttggcagtccgaggttaatatggcacctctatccagtacagtcttcaaggacacgtgctctttccatcttattgcactgtgaggtgtagcctctgttgctaaattcaactcaccatccaatatggctgctccgactccagccatcaacttcacattctagccagtaggaaagagaaaacaataaatacaggcagataaaaagatagatgacaaatttctcttaagggaagtttctagcacatcatataatatctacataacgcttctactaccaactcattcaccaaaacttagttatatggcaacacctggcaaccaaggaggctgtgaattttctctattttgggcagtcacatgcttacatgaaaacaggtatttgaaaacaagtgatgaagaaaagcatcaatattaggggacatttagcagtctctgccacaatgttgcctattaataatcctgcatacattttaaatatttaatatcagtctgcaacactctatttgcaaggtaatgtatagtataatctttaccatatgaacttagtagccatggtgttcaggaaagttgtgttattttgtgctagaatattttacctgccctaggtaagggcctaaagataaaatgtgctagactaattaattttaatggcatatagcaagagatttccagcgttaaagattgcatctccacctgcaatttgggaaaggaaaaactgatagcacaaaataaaagtagtgggtgtcctgaaaactgtctgatgctcttcatgttcttaccaactcatatcctcatctaaatttgaatcacaggtacattctgaccttgtcgtagagagagtcctaaagtctcacgagagaattaccgtgcttgttctaacaagactgtgttccagcaggcatgccaaaatttgatagctacaaatagggagatttgaaaggaaagaggtgggagaggtaatttcttttaactcaactgcatctggtggattaaggtagacaatattaccattttgctgacagaaggcagacatggcactaaagagggagaatgagcaaccacagagctgatttaatttccagtggggtttatggaagcaccaaaacatgatgtagccaaatgttcctaaaagtatgaagtaatttaatttgttccatcattacaagaaattaaagccaagcacaattacatcccagtagtaaaaggaacccgctgaattgccattgttattgactaaatgaagtgagatttctgattaccttgtccagcacattttaatttctgtctgtccatttattccaaatcacattacagggccttaactgatcttgacaaaataagctacattattaaggtgcagtttaacctgagaagctttaattactagattagagttttcaaatgggcatgtcttctagacttcagtacatttagggatgtaattattagagattctttgtttctgatgtgcaaaaga

SEQ ID NO: 115364 - DNA, 1023 bp, Homo sapiens
ttgcagtatcactctatgtgcacatacacacaaatatacatacacacacattgtctttttttctctgaaccacctgagagaaaactgcacacatcatagccctctatccctaaactcctcgatgtattcctcccaagaacaaggacacttttctgtataactatagtctcaaacatctgattgcctttgaattttatagcatgacttatttatacctttttacttcgagttctaactcagatactgagctatagaggaacagctcaactattagttgagggatagctcagatgtctgatggaaaaaagtcacatcagtaacattttgaattctgcaaatatacacaatatgccaatgtatgggagataactaaatactggttttagagaaaatagatgagttaatacaaatagagattccccttaattaatagatcttatatgtttggttatatgtcttatccatgctattatagctagctagcattcattaggacagccagagaatcttgtctttctgtatttttatactgtttttcttcttctgatcagccgattccaggttttgaaagaatgaagtagttcctacttagataatgctattgccttgctccttaacagtaagcagtggagaagcagagtggacgctggtgatgctgcctttagtcctggagggagtgtcaaccagtgggtaatcattctgaccctgcaacacaaccatcccttcactatttcagtgaaggtctctacttcggtggtaggtctctactcaacatggtacttatagccgttttatacttgctatcttaaaaaaatatgcaggctttcactgctgtgaacagataattgatatttatgtttcataatctgtgaagatagctaacacatttctgacagttgcaattttttttcccaaaacgagtttgagcatgcctatccctctctacccaagtatatttaacagcatttctatctattggggaatctgagtgaggatgacaacgtgtcagggattagaatggac

SEQ ID NO: 115365 - DNA, 1056 bp, Homo sapiens
taataagcctaaaaataagaagatactcctctactttgtcatacaagatcgttgaatggtgggtcattagttgatagcaaaaagtcactcattcttagttatgtttctgatgacttgaaaaattgagtggcagtatacaaagtctgagcaaaactgacttcagaatgagtatttggctttgatttctcatggcatcttgcccattgagccatcttttcagaggtctcagctgtatgaaaaaatagtacttttttttttccagaaacatgaagtctggcaatctttataactttgtgcagcttgttgattcccggattcaatggtgttagtgaaaaagaagtctcaggagctccagagtctcagaagaatgacaagaagacccctaattcttgcctgtctctatatttagtatccaagttggggataaaagctagtttttaagattttctgttcagaaatcttttctatatactattcagaggcagccctttgtttaaacctttttttgtctcaggcatggattaactgcaattggattctatgttaaaaatgtatttttttgaacattttgtaggcatcactccagtattttctattggtgaaatcctgatctttttctgtgtagaaatttttgtgaccttcttttctttactgaagttcccacatttcatgatcaattgtcttggtctgcatttttatccattgccctgggcacgcaatagaccttttcactccagagatatgagtccttcagttctgaaatgtttgctcttattcattgataattttatgccctctattttctctgttctttcttccttgaattctcattatcttagttggatctcctagatcatatcctttaatttcttaattgttttcttccttttttgtctttttgttttttggtcttctagaagatttgttcacacacatttttattttccaaccttactattaaaatgtttattttggtcatgatttaaaaataatttagcactctcattctctcctttttttttttttttttttttttttttttgagacggagtcttg

SEQ ID NO: 115366 - DNA, 1484 bp, Homo sapiens
agggcatttcagacaaagggaactacatgtacaaagtcacaggcatgtagaaaaagatgaatgtttcggagtaacttacagtatgtagggcgcaaacagaggaaatggcaaggaataagactatgtgagaaagcaagttagggcgaccttattaaaaagtttatagacagtggcgcaccgccaaagatgtagaaatgtggcttgctgtgttctgtattttggagcaatcactcgggtaccctgtgttgtgagtaggggtgaaagaagagaatcagtggaaccatgggaagcagtttgggagataggttggaaaaatattggaatgttctaagcatgacattgtgaaagaatgctagaatctttttcatatgaggggtgttatggaaaataaagaaagtattggccctgccctcaagaagcttggaacataaaagaagtaaaacatgagagcagggcctaataatgtatctcaaagtgctgaaggaagcatatgcattatagaagttctcatcctggactgtggtttgttgagaatgcagctgggtggagtctgaggaagtaagtgatggccataatcgaagaagagataagaggtaagagcaatggcttaaaagcaaaaaagcctcaaaacattcaaacttcctttgtataatagtggatgttattttgagaatgtcagtttcaggagataccataatcatgtgtttgtctgtatttaaaaagccaccaccataaaagatctagagtcactcatgaagttcaagtaccaatttttacccatgagtgtggaacattctgctcttttacaaacagtaactcgtactgtcacattttgcggcgcatctctcattttgttggttatttagtggccatgtaaacatgtacatgacttgtggtgaatatggtgattctcactttataaccaaagagggtggatgttacagcatatgagcagttatgactgtaaagcctgaagtgtgagtcacagggtctgacccaggtagtaagatgtgttatttgttcatgttggttagctgaatttcctgggctgacctcactgaagtttgctccagtaaagaaccggatctttactgatagatcaaggatctgaattctgcacctagttctttggctaaccagttgtgtcctttgggggaaatttcttaatctttctgctctccatttccctttctgtaagtaagggattagaccaaattccatccaggattgagaaattctatggtgtgacaaagactgctggtgctgactgaatatccttacagatttgttcatttagtaaccaatataataaagatgactgactgaatcttaattatattgggtgacatctgcctagtcaaaagattgcatttctcaggctttctaagagattgatgcagccaactacatgttagcagagggagctcctgcctagaagcactcacttttactcctcctcccgtttgtgtagtagtgatttggtg

SEQ ID NO: 115367 - DNA, 1055 bp, Homo sapiens
tttaagcctcccttccccaattcttagtggaaaagacactactggtactgtgtcctatggctgactttgtcgtctaattgaaatatcttattattgtatgcatcctctcctacttaaatgtgaccctgaaatgccagatctttcctttggaatgaatcttttttgtcttattggactggtagggctatgcacttaaaaaaaaaaaaaagttgattattagactcactgtttccttggccagtcaggaaaagatatttaggacaagagtttctcaattgtcctcatccagttttgcctttatagtgaatttcaataaatattaccatgcctatgtaagagggtgactggagaggcagaaattctatctgactgtccacttctaactctactattggaaaacctgctaggggtttttgtatttattatttttggaaaaatcattaagtggattcccttagctatataaacataaggcctgtcatctttttctttggagaaagagtgtgacaaaatttcccccttcttattaaaagctacccctcctcttggtacagtttgaggatagcgtggaccaaactacctaagaattcaggagtctaccaggagaaaagagactttctcactttgtcccacaattagaagtactgaggaaacccatgagaatggatgaaaaagggcagtcccatggtgtattgtcgggagagaatgctgatacggcgggccctagagggattaatgtatctgtgtagaggaaggggaaacctaagctgcctgctcaagaagagcatcttagattgttgagtgagggctgatctttactaaatgagttaaatcaaagagccaaactcttggagtccaaggctgggcatggagacccaaaccagcaaggacacaggtctggacaggaccattgttcactgtgataccacatggcagtggcagaagccttcataccaattgccgtcctctctacacctgaagtttagaagcacgactctgctttagactgaataatccctgaggttcttgggttatttgaaagaggggtagttttc

SEQ ID NO: 115368 - DNA, 1057 bp, Homo sapiens
tagctccaggacattttctgcctgtctccttccctccctcctttctttcttttcctctctccttccctctttcctttgttccttctttcctccctccccttccctccttttcttcctagttccccctttctttcctttcttctattgaataaaacgcaaagtaattctttttctacttactttgattcttatcagctttcttaagcagtttccttgccgctgttgtgaattacatggggctgtggtaaaatgtggcacatttcaaggctatgtatccctttagattctggttcagtaagcttggaaataaataggagagcttacgcttttaactactagcctgcgattcgtataatcatgttagtttgagaaacactacagtaatcacacatgtaagggctttggagtaagatggaccttggttatccaacgcttactgtgtgactttggtaaattacctaaacttttctagccttggattttaatgtgtaaaagatagataatactaactcagtaattctttatgggttccatgagacaatgtatttaaagcacccagcatactatctggttcatagtttacagtcaataaatgttaattccattatttgatcacaatgtaagactattgaggtttaattttgattgttttttcaaaagtttgtaatctgttaggaacaatttctaaagtaaaattcagaaaacaaaaccatcaaaatttaattcagctaacatttttgaggttctatatagtctcgaacatatattatctaattcgattatcactataaaccctgtgtatagtagatattatcattcccattagtggatatgcaaaccacggctgtgggatagttttacatttagtaagtggcagatccaagtctagacagcccaggctggttctctttatactctgcctggcaacatttgccttcatcactgtctgttttcaaaagtaactaacctctacatccctgctcacacatacaaatagctctaaaggtacaaaataaagctaattttctgagcaattcattttattcaaatcagtcta

SEQ ID NO: 115369 - DNA, 1004 bp, Homo sapiens
ttgtcctctgctagcccttggcagatcagaaatgttctaaagattgacctctattactttgggctttccttaacttggcatccatgaaaagatccacttaaatgctccagattcagtgaagtctccttatcagagcttcttatagcacccatacttttctttctcagcatttattatgaatgtaatcaaatcatactttgtgcatgttttgttgtggttgctgtttaatgactattttgtccatgaaagaaggaactgtgtttgttttatcactggtttatccaagggactagaacaatgtatggcacatacaggatttaacgaattttttttaatgattaatgcccctttagatagtgtttttcatctgagtgcctcaacttctatgtgcattatgaaactgatatagtgggtcacaactatcagtaagaaaaaaagaactggaatagagtagaaaaagatgagaatgtatcacgcatagggaataacttttataaatctgtttcagtatggataggcaggcctacaccacacacacacacacacacacacacacacacacacacacacacacacattgagttcctatgaatttgttttttttaatttctttcttttttttttttgagaaggaatctcactctgtcacccaggctggagtgcagtggtgcgatctccactcactactgcaacctctgcctccctggttcaagtgattctcctgcctcagactcccgagtagctgagattacaggcacctgccaccatgcctggctaattttttgtcgttgttgtatttttagtagagatggggttttgccatgttggccaggctggtctagaactcctgacctcaagtgatcggcccgccttggcctctcaaaatgctgggactacgggcgtgagccaccgcacctggccaatattttttaaggtaagaattttgagaaacactgtcctaggttccctctaaaaccgaagatatcaccctatgttcagccttt

SEQ ID NO: 115370 - DNA, 1036 bp, Homo sapiens
gttctgttacacagatgatttggcttctttggtttcccattaagagccttgttttctttgccaaataattgaaagtttcactcagaagataaggaacatcaaagacctcaagctttgtggtcttggaaagctgtggctttggtctctgtctcattccccttgggatttagaatagaaaaatgcaggtggagaacacattcaaacatcccacactttatcagtattttaaaagaaagaaagtatggctttttttttctcaaaacaatgtcttagttataaactgaatttgtataaatggccagttgtacattagggcagttgcacaatagaaagcatccagggaacaatcataacctcaagagcctattggaaagtgggatcctaaatagctttctatgatctccctagaaaactgtagaatttccccagagaataagccagcattttgttgaccattctgcaattccaggatcatgcttgcatagtcatagcttggaaggaggcaaattgaaacaagttgaaaatctgcaggaactatccccagtgagaccacagaaaagccagaagaagaaaaggtgggatttggggtagagaacgagccacttctcactagtttgcatgaagcattgaatatcccaagggagaaaacattgaagttctatgagacaccaagaaaagtgtatagattatcacagcatatggatagaggtcatttgttccctccctccctttaaagaaaagtagctttgcaagccacagtttaggaacaaatggactttttgacatagttcaaatcctcctgggtgtggaggcattgacaggagcaatgtcataaattggttaaaggttgcagtctggaatcaggctgccctgaatcccagccctgccatttactagctgtgagaccttgtgcttcctaacctcagttttcttttcttttcttttttgagactgggtctagctctgatgcccagtctggggtgtagtggcaccatctcagctcactgcagcctctgcctcctggactcaagcgatc

SEQ ID NO: 115371 - DNA, 1672 bp, Homo sapiens
gacaggtagcgatagatcagcagtagtaaagtaactgatatgggtaggttaatagaatgacccttttaagaagggatctcaaagagggaggctaggtaagctacaaaattatcagggcgaaatgcagtgaggtagaagtgaaagcagcttagagtcagcctgggctaagataaatgaggagtggagctgcagctggaggagcaagagaatatggtctactcgagtataaatcaagcttgctggtgagcagtttaggactagctcctggttttacagcaagactttttatgtgatcttgaccaaaccactgcacttgattgctcctttctactccttggtcctcacgtgtcaaataaaacccctgaattgcagagccaaaatgcaaacaaatagaactcctcactcaacctccctcagtttataagtaaggaaatgaagacctagtaaaacattataacttacagatacctgtcagggcagaaccagaagctggacttgggctaggaaaagttgttcccccctgattacattttccaaaggttataccttttccacagtttctaaggtaacatgttgattgacttgacagttgtagaaatattaggaagtggtataaagccaagaccatgtttactaaacagtgctgctcttttttttacatcatacagatgagaaagctggtgctcagggaatttaagcaacttgcccagagtcacgtagcttagaagtgttagagccaagatttggaccccagtctttctcactttcacagacttgcttttaaccactgtgttatgctatgctgcctcagtataagctcctttcaaacaaaccacttccagtctctgacatgcaagcccagaagttttcagatttacaatggcatactttttttctatctgctaagtgttagatgtcacggtgtctgcaatggagtagagctttagaaatgaggataaaacatttggtttgatgttagtattaagaactccaatatccaaggcaggaaacttggtaattaatattttaaatggactggaggggtcacaggtattaaaatcaatattttgatggcaagataacaatgtaggaacaaataattggagatgtttagcaaaattatgaattaagtagatgtataaacggcagattatgaaagggaaacaaagattacctgggaagagttttgtgttttagtcaactgaattaccagaatgggcagaaaaaggaagtatcaaagaagggtctgctgatagaaaattaaataaagaagaagatgccatggaaacgtttttagtgcaaatacactattgctcatggctgaagacagaaagaagactatgtgtgacttccagatgaagttcaggcatagaggcagggctaaataaacaagcacatagacccgagaattctcgttgattgatctttggaaattcggtataaatatgatcagttcaaccatgccttagctactggatcaaaggagacatctaccggctttgggagataggaatctggaaaattgacagactgaaaaaaccaaaaccaaagaaaaaaaaaaacaaaaaaaacagagaatgcagaatgccattttaaaaaccctaagaggctgtgtctgatgttacaggactctttgactccattagtctcaattctaatatttaagttaagt

SEQ ID NO: 115372 - DNA, 1179 bp, Homo sapiens
acggttacctggactggaaaatgtcttggaggttacgaagtctttgaattctttagtgtaaattgtctccgctttgaaattccacaattgatcgaatcctttcattctctttcccactcctaattgttccactctaactctccacccaccgccaggaatatgaaaacaacatagagtagaactgatgatatcagctgtataacacgctttattttacggcattaatgggcagctttccaagtccataaaaatcttttgctgatctgattttaatatccatattcttcagttatactagaaagaatgatttccgagatgtggaaatgttagccgggaaacaaaaggacataggcacataaagcaaaatctggcaggaaatgtgggtttaataaattgaattatgtgaaactcctatttcaaatggactgatactagaggagcagccctcgagagatatgcacagtaatgattcttcgttttcaaagacctgtttctttttgaaaaggaagaagccctgaacagcattcctttcaaatacacaaaggtagctaaagtacaaccttctcctctttcctatttgttctttaaaaaattgtaaaaattatattaagtgtgcttcttgtgatagagtcaataaagggagaaggagtttagcaaagcacatttactatatactcttaacccgtcttgcttactgtaataatcgaaagaaagatggctaattgtcttgcaggaatttgggttatcctctgaaaggatacaagtaaatttgtaacttgggtcgtattggctattttttgttctcttttgctttcatttttgttttgtctgaggtttataaatggaacccttctttcctttcttccttttttccttccttccttcttcccttccttttttcctttcttccttgctttctctctctctctctctctctctttttttttttttacaattgtacttaaaagaataaaggattctgaaaatcagttccaggatccaataagggcctagattgtatatcacaggatcagagccccttgctctcaaatttatgattgtgaggatgtattattgtatttgggggatcaataagcagagccagagccttcacacaaggctccttgtgccccctcccccgctccatcccatgaggttaaaaagcactgactttgactt

SEQ ID NO: 115373 - DNA, 1039 bp, Homo sapiens
taataggtggatgaccttgagtaaagcatgacgcagcctttgggcatcagtttcctcacttaaaggtagaagggttgaaccaggtgtaagctgctgttcttccatgttatgattctaaatagttctagatggaattatgttgcacatttcatatgttgttaaacagcttctctctggaacagttgctcctaatctcctaataagcttactatgggtcactcagcaatcttcaagagaaacaaacattatttggttggtggataccaagacaattctgatgtgtttgtgtcaaagattggtcagatgaaatctaactagacatgtatcattccatcatcaagcgaaatgaccttgactctaaacatcttaatttgaactgtagacatttcccaaatgctttagggtagatttggaccataatacactccactgtaaatggagaaagttcatcatccccataataattgcccccaaactgctaggtaggaatgcatactgggtttagtatgtattaactcccttgtgaattcagcttttgagagcagacctcttaacaagtcatgagtatttagagtgaaatatttaattcttagtgatactattttcctattctgctattattattcagctatgattattttccttctcctcccaacctcctatttctttttctttattaaaaaaaggagaggaggtgcatgctgccatctggggtgaatatgggcttcacgtggggacctgggcgctggttctgatccagagagtgagctaggagcacttacacaagagggtcttagccactgtgtcgggggaatagccttatatcaaagactgaagccttttagtaaaacctgaagaataatcagaagcagcattgactagtctctaaccttggttgagggacacacacacacacacacacacacacacacacacacacggctctgaaagctcagacacggaggacacgctgtgatccacttagccctctcttctccttcagggggtccttgcaggacagaacgctaaggaacaaagt

SEQ ID NO: 115374 - DNA, 1920 bp, Homo sapiens
tttacatgtatactgaatcacgtaaaagttatttaggtcagtacttccccacatttgttccttcatgacatacgctgataactatatttctacgaaaactgcagtaaataaaggatgtggcttgtgttcagtctcccacccactagcgacaagagccaagggaaatcaatagcttggctcacctgtcatctccactctttggcacaccattgagaagtctaatatgtgcaaagaaaagttaattttactttcaagggttatacctttgcttattccaaagaacggtgggggagtgtaccagggccattattataatgtatattattaaactttttacattttaactgatttctcttatagtaaaattaattatatattagctttggggtatacaaaattgcactttgataataatatttaggaattggcaactttgtgggcaaagttgtgggaactatcagaaaagtaaaaaataaaggtgggacccgaaagaaggaaggattgtaggttggagccatacgcgactagaaactaagacatgtatccttaaaaaccctcaaatctgtgttctgatgggaaaaccctgctaagtcaatggttcccagactttggaatttcaaaacaaaaaactgtgaggcccaacatacaattaccaactcttcatttttgccaaacaaaactattttcaacagaacacactaacatatactggaaccatgatttcatattatgacatttattttccacattctatatacttttaatatgcaaaacaaggacaaaaagggcagtcatctcccatggggggcttagaaatctctcattaatgtgtgtgtgtgtgtgtgtgtgtgtgtgtgtgtgtgtgtgtgtgtgtgttttaaattggccttattatttctttaaatttaaccaagggccagtaaaactcccttttggaataccacacgcccgtgctgttcaggaatgattatgataaagtcattcatgaggacatagagttatttcatatgctctcaaaaatgacttgcagtgcgaaacacagctactattggacaagacaacaacccaactttatataacaattttttaattcactagtacttgtgtatcagtcaataaagtacctggtacttgtgtactaggcactgggatggagttggggatacgaaagtgaaaaatatagtcacaatttctaccttatactctagtaggggaaagaaaaacaaaatgtatgattgaactgccttaagcaccatgaaggcaacatacaaattgctgtgagagcatataaccaactcagaaatcagccttaaactgagacctaaaaaggactccccctgtgccttttgtatatttaaggcatcttttttatattctagaaatacaatatcattgagcagatagattccaaagggccatcttctagctggatgaaatagaaaagggcaccccttcctcaggctaacagccctgcctgctgagggcatagttaggtgaatggatcatcactaatgaatggatggttttaaagaagggaataacatgaccaaatttgcatttaactttactcaatagtctggagtatttaaatatgattaaaccttttctttccattcacttgaatgaggcagaagggctattcaggaatttaaagttgactaaggtattgattgggtacaaaatttttactaggtaggtaagggcaggatgattccattagaaacaagaactttttctccagtgctctgggaagaattgattggttcagggctaaatcaccaagatgaataccttcttttgattcacacacccttttgacatctgggtttccctgaatcatatgcaatctaggacttacgcagaccactccagtttcacttacgaaatttgggttagccaacttaaacagtcatggctgta

SEQ ID NO: 115375 - DNA, 1044 bp, Homo sapiens
aaaattaatgatggtttgttctcaaaggcccattgtcccgttgattttatcagttattctttgttaataaggtggtaatgtggtcttaagagcttccactactgagagaatccaaggaatcatagataagtaaattgatgtcaaatattatgactttttctctttcattcttgtactgtatctagttgcctcatctttttttctaaatctcacagtttttgatcaaattccctagggacagcttacatgctagctttatgagggaggtgagtcatgcaatcccaagaaagcaaaagtggagttgagggggtgaaaggaacagcagtagggaagaagagaaaccatgtacaaggtaatgcattactaagcttgtcagagcttcccaacaacaacaacaacaacaacaacaacaaaactagttgctaagttacaagggacattgcctgtgaggctgtgtcgtaaaacattccacatggagaagaaagggtgagcaatttttctgtgcataggtcttttgtctctcattggtcaaagtttgctccatggtacccttggccctcccagagtccctggggaatacagagcctttgtccatctcacgtgtagctggatggttcctgtcaagtcagaggccattgcccacgctaagcccgcaaggatggggaggtggaaaacatgaggcaattgcagtgataaccgctgctttactggggctgctgtggcatgcctgggaaactgggagagtggcttatgcccaaggggtagggtgggcagagctgacctggggaggccacaaacaggacctagtgtacttttctacagtatactagcagaattagaatgaatcagacaagagatttattaaattaagcttttgtaatgtcctgatgtagtgcactgtattttaatgctgtgtcttctgttgcttgagttcctaatttgtaccaggtgttgtgccaaatgcttcaaataaattaccttgtgaaatcctcacgactctatggactccaatttacaaatgagaaaactaagacttaacttgct

SEQ ID NO: 115376 - DNA, 1472 bp, Homo sapiens
aaagagcttggaccagcacatttctcagagagagctctacttacagtaaatgttatgtgacagagcaggatagcaaatagatgttacctggggcaactctaattgcttggtcatgactgtcgggagtaaagtgttaatagtttcttgcatatcctccaagagagtattacaaatactattctgcaccaagctctttgtaatttaatagtgtatcttggggcccttttgtatggacttatacagatcatgatctagagataatgatcattcttatttgacacatagtattgcattatgttatgtctaaaaacccatttaactctattgatagtcttgtgggtcatttccagtttttactacaattaatacaaataacactgcaggcatccttgtgcctgaacatctttgtgagtttacccattgaataaagtcttagctgtgaaactgaatttaaaattttcataaatattgccaagctgtcttctaaaaagaatatattaagttacaatcccaccatcatcacaagaaatgcttgtatttctatacacactgaccctgagattcacaaaaaacatattttccccatctaatttaattgcaaagaaaattagtcacctttcatacatttatgggccagttccctcctacctccaaagactcattgaatcaattatcttgaggagtttattttttatggatatgttaatgttttgagtatattaagaaaatgaactctcctcatttgtgtaaacttttcaaaaaattttaatttgtttagggttttttttttttatcatttagtcttttaaaatatttgagtagtcaaattcatcctttcagatggtttctggacaccctgtatcttttatgcttgtttttcctggcattcggtgcagtacctatcacaaaatagattctcaataaatgttttttaaataaatggacaacgaatgcatgaataagtgaaggatataatttattcttttcattcctcctcatgctatgtagagatttgcaaaatgaatgccaaaacatatctttgaacagaatttcatggcccagtatcttcaggcagtggtttttctgttttgttcaaaatgatgtccctatcatctgcatagtgctggcgtatgggagatatacgtattgaatgaatacataaatatagagaataatgagataaatagaacgtggattatttggagttcatcctcctgagctaatgatgggcatttctggaagtgctgggttgcaaataagtccagaccagagaggattgtgtttaaaggcccagaatctcaactgataatcctcagaagctcagatttacttttttcattccaagtaaattaaactggagtggtaagaaaaagaaaaatggttatgaccatcaaccccagaaacagggaccacatttaattgaatttataatgtccctaacatctctgctgtgtttgaaaggttaaaaattt

SEQ ID NO: 115377 - DNA, 1004 bp, Homo sapiens
ttttagaaaagtggcatggctgctgatctatcagtgcaaaaaggagcacacccacccactacatggccaaaaatgttgaaggcaagagactagatggcttgtgaataatatcaaatgaagttgtctttctgtaggaagtcttagacaatgtaatcttgggaggcgggtggatcacaaggtcaggagttcgagactagcctgactaatatggtgaaaccccatctctactcaaaatacaaaaatagccaggtgtggtggcatgcacctgtagtcccagctactcaggaggctgaggcaggagaatcacttgagcccaggaggcagaggttgcagtgagctgagctcgtgccactgcactccagcctgggcaacacagcgagattccgtctaaaaaaaacaaaccaaaaaaagaaaatgtaatcaagctaaaatggctttggctttccttcagtaaatggttactgtgggaatatatgtgaaatgaatatcaatactatgatgagaaacacatgcactaaacagctatacttctgatgccattctcaaatctgaaactttgcccaatttcagggacaaaagtgaagtaatatgtatccccagtgtttagcttttctcttgccatggatactaacagtgagattcctcagggactgttcctttaacctcgttagggttgctaggggctattgtgcctttcacaacacagcacctgcaactgggaataattgaaattttctgccattagctattcccagcagagtattctgagtcacatagaaagtgtcagaagcatataaattactgatacattttttaatcccatattccctcagggttggcgtttttctctcttgaaagtttcccccttaaggctgggcgtggtggcttacgcctgtaatcccagcactttgggaggccgaggcaggcagatcaagaagtcaggagatccagaccatcctggttaatacggtgaaaccctgtctctactaaaaatacaaaaaatt

SEQ ID NO: 115378 - DNA, 1122 bp, Homo sapiens
aacaaatttttctctgaaatattgttattaaattttcttaaaaattgtttctaaccttctttactagagctcactataaggtagtctttagtttaagaacttcaacactctctgattttggtttaccattttcatttgtgcaaaatgaatgtgtacataagaatctgtatttccaacccaaagaggcattataatgaccgttaaattttccatccaagaaataaactaactccaccatccctgagtgtataccctgcccttctcactcttgtgttctttaattagacccaatgtgcaggacatgacttgactgaaatttatagccacattgagacatgcagctaaagaaagctcttagaccaggcatcatctcaaacttttaaagcaataggatcatttgacagaagtgtgactcgctatagtaattacacaggtgcaagttataactacttaatctgctcccagcatctctgttgcccttgagaagtatgatgtcctctagccaacatggctgttcatatgggactgaatctgcacatatttgaattgagtttttcaagtttagaaatgtgatactattttacccttatgtgccttccacaatcctactcctctcttaggtggatcagagtttctggaatccatcatctttagttctgcaatttacatctcagacttacatgtttctaggcataaatgcaagaatgacaacatcaaggcctatgaaacttagacttgtatgtatgtgatggtagacattgaagtttgttgcaggaaaatgtttctctgtcatcctaggaaaagcccccagtttctcagttcctcctcctccacacgacagttttttagtttttttagttttttagtttttttctaaaatggagttaagtccaggtgcaatagctcacacctgtaatcctagtattttgggaggctgagatgggcagattgcttgagcccaggagtttgagaccagcctggacaacatggcaaaaccccatctctaccaaaaataaaaataaaaaaaataaaaaaattggcatggcagtaggttccagtagtcccagctacttgggaggcagagcctgggaggttgagactgcagtgagccgtgattgctcc

SEQ ID NO: 115379 - DNA, 2085 bp, Homo sapiens
ttcaatttttaaaatttaaatggaactgccatgtattcttgagtgttgtagctatacagcagtggtccccaacctttttggcaccagggactggcttcatggaagacaatttttccatggatggtggggagaggggttggttttgggatgaaaccacctcagatcatcaggcattagattctcataaggagtgcacaacctagatgcctcgcatgcacagttcacaataggattcacagtcccactgatctgacaggagataaagctcaggtggtaatgctcgcttgcctgctgctcacttcctgctgtgccaccaggttcctaacaggccatggaccggaagcagtctgtggcttggaggttggggatccctgctatatgggccagaaatgtgaaagaggtgttcagtggggagtatacttctaacttgaatacattcttttcagcatttctacttattttatcaaaaggtaattttttttctcaggaaataaagcaataggcaattgttttttatagtttttctgtacagagccttattcaattatactaccaatgtaatcctattgcactgctcaacagaatcagaataagaagaacttccaagtacaatttgaaaataaaagtatctttcaagaatttgcactgtactgcattatttgatttggaaaaaaaaaaaaatcagaccacttccatttcttgatgaaacaactaactcatttgctaactttcaactggctctcttcagtggctttgagaatgtggcacttccatcataccttgcctgtagtaccaccctagaactttttttaattgaaaatattttaaaagataattgattcgtatgcttcaaaattcaaaacgtgccctagaaaggatcgattattaacagcttcttgtgtattatgtaaacaaatcttatgcatatacaagcaaaatacatattggctagcactcttaaaaacataggaagggttgaatctgaccaagttaatatttcaaaggtgtctatcagaaaggaaaaggaaagcttcctacagttatgtgtatatttttttttagtttaaaaagaataagaacaagatattgggtgtgtatgtatatatgtatctatttatttattggagacggaatcttgctctgtcacccaggctggagtgcagtggcaggatctcagctcactgcaacctccacctcccaggttcaagcgattctcctgccttagcctcccgagtagctgggactacaggcgtatgtcatcacgcccagctaatttttgtatttttagtagggacagggtttcaccatgttggccaggctggtttcaaactcctgaactcgggtgatccacccacctcagcctcacaaagtgctgggattacaggcatgagccactgcgcccagccagattttgggtttttaaacctattgaacttatctttggatacatattttaagttttccttaactgtaaatgtgtttatgttcactagaaacaccacatgatttcgcagacatggaattatgtaggtgaaatcagcggctttcaattagggctcgataatattagatatagtataacttttatggcattcacacatactcttcagggataccctttgcaattccggaatagtgtttttcttgcttacttcagtcgatttcttatatctttaggaaagatctgcacattcattctaggtgaatgtaaaattgcattttaaatccattcattgggaatctcacttcttaaaaatcatgcggaaagatagatgtacatttttagtaaccgagctgttcagtaaatttcttaagattattttctcataacctctgtacatcaaaagtgaaaagaacctgtccccttctctctgtatgcaaaattccagagaagcaccaagaaccagaagaagatgaaagattcggaagagcacacattttccagcctgccagcctgggtttaatttcactttcccaaatatttacttggtaaattcagaaaaatcactggacctccaggaacctcatttccattactgtcatgtgggatagtgataacactatggatcattacaaatattaaat

SEQ ID NO: 115380 - DNA, 1092 bp, Homo sapiens
atgctccctcattcctcactgcagcatcacccagtccaactctgtcccatctgtgattcctcacttctgctttcgcaccatctctctccctaaggtagaagtggtgcccagctttaaacacaaggcaaagtgagggtatgttccactaggacagcgtgtgtcactctgctgccatacacagggagtaccatcagtgattataaagaggaatttcattcctgccagagagctcacaaattaggttattgttgatgttcatatagtttttagtgactggaaaaagataatgcctccttctatggtcactaccaggaagtgagctccatgcagcagacagaaaccaaccagataactgtgagatcccagccaagcacaatttctacatgttagtcaattgcaagaaacactgagatgtaatgtagtactttggactcatattactcaggtgactatgttttcaagcagccagtacaggacagaagagattcatttccttgaatcaaagctatttggtgacttttcctggaaacactctgaggcttacaggaagggattccagattcccaagctactggcacagagtaagcatcttttctttacatagtaattcacaaacgtccctcatcaccatatgacaatatcctcactggatcagctcggttaccagaaataactagatcaaaataaatgtcattctcacatggacacaggtggactagggtttagaagttttgggaaccatcacagttctaggcacctgaaacttcttcttttgcttgtagtaaatatggtgtctttctcaggactctgccctttgtttatttatatatctggtctggtttttgttttctagagatagttctctactctccatagtgtctgctttctcattgcctgagtttgtacatggcttgccatagcttctctaggcccaattttaggccatcagtagatttaaaaatttttttttctcttgacaccaattaccttagttgcaatttcccatttataattgcaacttgagcctacaaatttacaaatacaatgaggtaactttccactgtggttaaatattatagattattggctgct

SEQ ID NO: 115381 - DNA, 1332 bp, Homo sapiens
aacagtagaaaccagcatggaaaactttttctcctatttgagaaagtgggatgaaaatgtgtctcttaatccctttggcagaagggagtaacttgaaagaagtggatgatggatgatcttctccactctgtcagccctctgagcagaatgaggaaaatgtgagaagcgataccattgctatatttgtttcattgaccattattttaaataacttacatggtcctgaacaaggacatgtttttgtgaaaaggacaacatttcttttggtgtgtccgagtagcatttaagaaaagccttatagtggtcaatgaaggttggcctttcacccgctgctactggagagtctgtgagaacactatttattcagcctcatggaaacactagggagtcatgcctgggatctgacaactgtgcagcaccatgccaggtgcacagagagttgttgtgatgaatgtcgagagaggtggtgggggatttttgttgtttttgctccttccattttctttccctctgacttgggctgtggtttcattcattctacctccccacccctatgcaagaatagatctctgatctctttctcatactttatctgccctaacttccactttccttttcttgagaggagaagaacaactccacagtgctttccttttatgttttgggctaattttgttgtgttgttttatggtcttgaactgagagctgcctcagcactcaacaccagcccctggactgtgagactaatgagaaaagcaaaatgacttcaagtaaaaggaagtggtttgtgttgtggagagaaacttggaaagaaacaccaccaagaacactaggggctttattttccctaaagcctacagttgggttaacacatttcaaaataaccggtcaatttagttaatcccatcaaacgacctagtcaatacagtaaagaggtagggcaaataaacaaaccgttttttggatgaccggtttagcttcatgtatccttcgtcttactcatttctagggaataatttcaactcaaggaaatgtgaacatctgttttgcaaactattacaggctggtttaatacaaaaatacctttaaaaaaggtatgttcatactcaacatgtttttccagctgttattaaagcaggtagaaacaatatagtaggcatagaaatcttgattataatgtggaaaaactaaggttaaaattattagcagaaatacatttcttttccatccttccactgtctgaacatctctctttcctacttcctccattttattattttctttgctttgtttctctcttttaacctcaataataacaattctgtgtgccaa

SEQ ID NO: 115382 - DNA, 1099 bp, Homo sapiens
acaccatcacacccagctaatttttgtatttttagtagagacagcgtttcactatgttggccaggctggtctcgaattcttggcctcaagtgatcctcctgccttggcctccaaagtgctgaggttacaggtgtgagccaccatgctcggccccaaatgaatacaatttttattttattttataactattgatcaaatccatgctctcttctctaacctgctaatatttccctagttcaagcactcaccaactctcccctgaattatagtactagtacctgaaatagtgtttttgaaactgtcagttgcatttagcattttattttaaaaatatgatacagaattgcgtaaaaaataagagtataaaaccacatctataatatcaaagataaatatggttttataaaattattgatacacccacagacatgcaaacacacacagacattttgccatgaaaatgtatttcttactataatttttaaaattagagaactactttcttaaatggtcgatctctgttgcacctcttcttagctctggccttccatgatgccagcaaatttatgtagttgaaaaattaatctgcaaatgtcactcttcttaaaaccttttcaagccttcccatcatccatgataaaatcagatctctttcgtgtggtacccaaagcccctatccagatatgtattgtacctcctctccagcccagcccctggctgactctttcagcagcaaactttttccacccacgtgcaccatgtttcacaactgtcttcatttacttgtactcttctcaccatctaaaactcgcttctctctcataattgcctggttcactttatctcattttagaggacacctaaaattcaagcccagtccccttcctcaggccgagtcaggctcttctcccaaacctacctctagcataacctaatgaaattgctctaaaaattatggtctatgcctctttattaaaaaaaaacaacaacaacaaaaaaaaaaaccctgcccaccagtatagcaattcttttgttataaccacacatagtactagtgtgtggttctggggcactgtcatgccaacttacctgtgttcaa

SEQ ID NO: 115383 - DNA, 2246 bp, Homo sapiens
aattgcctttatcttctttagtcatatttccctaagaagtgaataaaagataccaaggcaatgtgtgaattccactttttccaatctggatgtttaggggatatccttgacaccatttgctattttgagttttcaacaaagagttaaaagaaaattctggcactcctatctagtcatcctctccagttggcagaagtcttcatgtggacttgatggttgcccagagcaacaaaatattagggacagaaacatgttcagggactcgattgtataagtgactcagagctgagagaccttttccagcttgactgcagcccatacttagctaaagtgggtatttgtctattcctgtctgcatactgtgacttggagatgcctattattttgcttgctaaaatatggaagccaaccttgaaactggcagagaagagttaaatgatcagaaggcaatcgtcttcattcagcacgtctgacacatgaaagatcattaggactagcaaatataaacaagatcagggagtggtcttgggctttgaagagcacataccaagaacatcaagagaactcaatataaattcaatataaaagctactattcaaggccaattatctcttttgagttagaagagcccaatggagagccactcacgcaaatcaataccctttccttctctcagttggagccagacatctctaactatcctctgaattaaactggatttttaaaatgtttttctgtccctaaactctttaaatcctgaggtcatcctttctttgttccatcagtctggctccatgataccaattactccagcttgttaaagcagttattggcatatggtagtcatgtcttttgtttctatgcaatgtttcctggagcaagaattggagggagaagtattagccaagtcttgttgctttaagtctcctctcttcaactgtttaactaggttccatcctaattatgtgtttggttggttttattttgatacccaatatacattcttctcatttgtacatgaacaatgtcattatggtaataataacaattatacaatattactttctgtcctcattgaatgtcattatgatcaggagctggtcctcttggtttggacattataatttgaaatgaatattctttttaaatgattggaaacttagtcgtaaattcaagtggtttacaatagtaactcttatcccagtaaccacagcacctgtttagaaaaatgtcttcggatcacttgtttgcaaatgtctttttccttaggatcctggatggaattgaacccatatacgttacttgacatgtgaaacacgtgtgaccctggcagatgatttggctgaccttgaaaactacagctgtttagtcactttgaaaacaatgcaatacaagtgatttactaggcttcagttttaaccattttatgctgactggtggaaattctaacccttcagaaagaaaaaaaaattgtgaagcaatggaaatgtaccatcctgggtattaatgtcattaattttcaatacattttctcacaaaaagtataaagaagtctttgcttgaccttacgggaaaaaacaacatacatgtggctttattttgcctttttttttttttaattaatgaagaaatccaagatttgacttttgtttcttctctacccaaatcaaaagcagtctataatctcctgcaaagatcaaagctttttgcttactataaagtatgtgccctgcttaggcattacatggtagaaagatagcattctgttccaagaaatctctattcgttctctagttgctgtgtatatattctcttttagctagaatatggttagtaaatgagtcctgaaaatttcgctgtatataccaaaacatgttgtataccataaatatataaaatatttttatttcaattttttaaaattgtgcttcaatcaagacagaagttgatttctttttccagaaattcagagtgagcagtccagggctgctgtggctgctctaaaatcaccaagggcccagagcttctttcagataatttttttaacatttctagattataggctttgtcttcatggtctgagatgactacaagagccctagccatcacaactaagtggccagcagcaagaaggaggaaaaaagaaggaatagtacacccactccttttagaaaaggcttctgagaaatcccacataatgcttctacttacatctccttggctcaaatttagtgtctgccacaaaa

SEQ ID NO: 115384 - DNA, 1120 bp, Homo sapiens
atccacccatctcggcctcccaaagtgctgggattacaggcgtgagccaccacacccggccaaaaacaactatttttaaagagcatctaagctcagaaatcacaggcatattacgcctgccactaagggagttagttccattgaaggatataattaagagtgaaatgaatggtgtgctaagcacttagggatagtggttcacaaatttgtctgttccttaaaatcaccttggggggcaggcgtggtgcctcacacctgtaatcccagcactttagcaggtcaaggccagaggatcacttgaggccaagagttccagactagcctgggcagcgcagtgagatcctgtttctacagaagataataataatcacctggaaatttcttttttttaatgcagctaatgaaggaaaaaaaaatccgaggttttgaaaccaactcaaagacaacagcgatattcaagcataagatgtaataaaggttgtacactagatagctagatagccagaataaaaaggaagagatagttacaaaaaatataaggaggataaatgtataggatttcataactgctaatcatatgattttactgagtaggtgtaaaatgcttctgataatgtgtgaaaatttataatccttcgtattatatgtaggataaacataggttaagacctggattctaaggctgaatttaaggctagtttatctccatccttagatttcctacatttcatttaagagaaaatgtcctgtatattgaatattcatgaaaatctctgaaaggtgttatgcttattcttaacctcttaaaggtgtacactgaatgtaattaaatcatttttgctggctctggttcctcatgaacatctgcttttgtacttccctgtcattcacaaatgcacttaggagctaatgatctatgaggacttttttttcccctacagtaacgagcagcaaatctggctgcactttaatttctcatctgctgtcccatattgtctggtggtcagttcatgatgttactaagcttggctttattggcatcttttgtgagctgctgctgctttttccttggcaaacctgattaccaagctattgcattgagcataaaataaaggtaaat

SEQ ID NO: 115385 - DNA, 1541 bp, Homo sapiens
tatgcttggttctatacaagacgccgtgacgtgtggcccctgtaggaagtcctggcctctgtctctaaatctgtcatctcagcccaacccctattcagattatctgtgccctctgcgtagccattcacttcgcctgggtgcaatcatgccttccttacccaacgtttaacaagtccagcctagcaacctacatcatgccatccaacagaaggaaggcattattgactcagaacaaagtataggcgctcttagaataagtttattaaatcatttttttaaaaaaaagatatgtgctttttcccaggggagcagtgaggcattgtcagagggtggattcattaaatcaatacagagaatcctggctgcactatttgttagctatttgactttgggaaagttattctctgagccttgatttctcattagaagacgggaataatagcaaacctatctcagagcattaagtaagaattaaatgaagtgaattaagcacgaaacctagcatctgacgcatagtaggaactaaaaaagaaatactagttcttgaataaacatttttttcttgactgtactgtgatacttccatcagtgagtttccaaggcaaatgaatcatctttagaattggaagctcaatgtaagcaacaatgaagtaaagaaaacaactgaatttctcttgaaattattttcctttactgacttgtctttattgtctgtgttcacaagaaactagctctgactgcaaaaatgtctgcctgtttctatggccagttcttttctacatgtttaaattcctaattgtgcacacaatcttagtcacaatattttcatgtgcaagcaattaagactcatttaacagccctccctctggaaggttttgttctccatctgccacaaatcagattccttaggaagatatttgattttgaaacaatgttaaagtactgttcattttgttcaaatttcatttatgtaccattttttaaagtgatgtaaatggacagccacaaaaagctcagcagctggtcaaaacaaaacatcaaagtcaccattgaaatggggcaaaaaaattaaaaactaatatgctgggacaatgccaaataaaaacgatagtctgataaacattcctcagacacattttgctcataacaactatttcctttacagcagatttaaaatatgggaaaataggaatataccccagttgccactctgaatcttagctgtcctgagttcactgcaatgtatataataaggaagtcagaaggtggaaaagaggaaaagattaaatttgtaagttttttgaaagatatatggtaaaaagtagaggtatccaacagatttgtacgatagattgttcatttaaggaccaggagcggtggctcacgcctgttatccagcattttgggaggccaaggaggggcggatcacctgaggtcaggagttcgagaccagcctggccaacatggagaaaccccgtctctattaaaaatacaaaattagccaggcgtggtggcacatgcctgtaatcccggctactcgg

SEQ ID NO: 115386 - DNA, 1434 bp, Homo sapiens
atgagtggagggtaggacaagaggagggataagatctgtggatgcacagaaactctttgggaaaccctaaaaactctctatagttatataagctaaggaaaggattcctgccagggggtataggattcttcaattcccacacttctcttcctgactcttctgaagtgcccgttgtcaccagagtgcccaggggcagagcattgacaaggaaaggcccaggtgtgtgtgagaagtcaggcagatggggtgtttcggaggaaccagggtaacgcagtgcttcagcgttagcactcaccttgcttctgggaccacttaccacgaaggcctgaaagggcaggccccaactactgggaatattaatcttctctttgggtgaagtctcttcatgccattatcatctcttagctaccattgctaggcaaaagtttcctagctcaccatgtcctgaatgcacttccttgagatatttctgatgcttaaatatccagtgctttctagtgtgccgtcttccttctgtatttttgttttgttttgttttgtttttttgtggttccttttcagcactgttggtcctgtggaagtatttctaattgactgtattctatatgccacacaaaacagatgggtgtttatgacattcttttctggatatgtttctgatgtttgcatattgaacacagaactgtccacatagagaacttgatttctgcctcttcctggctttgcttttactcatttagtccctagtatgtgaaaggctatgcttaggctccaaggacccaaggatgaataaaatacctccagtaagcttcaggaccattactctagaggtttgtggaacttaaaaagctaaaatgtgttctgttgaatgacaaaaagcattaagttaatagaaaacagagggcttataagtgaatggataaatgaataagtaaaataaagaagagagaaaggaagggagagaggaagaatggagcagatgcaggtgagattgtttttctaaagagctaagaagctgcctacagtgttagcttagagactgaaaatggtttgggaaaataattcagaaatttagggaatacttcacagcatgagaaagtggagggctgagattggtaaaagaagacatgtttcaaaatagccaaaaggaaaatagaaaagaactggtcgtgaaaccgagacctcagagttgaatgacaagtaagatacctctgaagtcactgacagtggactgactgttatttgactaatattgcttctacagagacagacctaggttttatcctcccatagaaaaaaatctcaaacattggtaggttttgtttttgtgttttgacatacaagtcaaaatctatgtgaaggaggaggaacaagactcaggggtcagaaaattggggtttcgtggctggctgtcctgctcacccactttacgtg

SEQ ID NO: 115387 - DNA, 1045 bp, Homo sapiens
ctgtagttctttttttcctttaatagaataaagattgtggccacactttaataattgccagaaatatgtgttcattaagctttttaagaaatgtgatcgaaaaatgctgatgatacattgtgtttaatagctttaataaaaaactgataaagcatctaatacatctaatgactgtcggatttcctaaatcttttaagctgaaggagtttacttttacaaaaatcctcattgaaaaagaatcttccggtaaaaacattgaactgaaagatttgcataaatgcatggagtattactatttattagttaaacttatgatcttttagagcagtaaaagtcagttctctttcttacaaatgaatttgttttggccttttatgcttttatttaatgagtagagccatacctattaatatataaaaagatcagatctgacaccgtggctttttgaccaggaattgattgaagttagacttgttttaagaatagtgaaaacaagggctatgtcctaattatgaggggaaataatttaattgtgtctctcttgtctgaatatctgatttggatgctttgttataactttaattgaaataattaaatggggctcatgttcatttagcctagcaaaaaggtgatgagctagcatatatgttaaaaacccagctttcctcttagtagttgtctaattttggtcaatgtacttaaattctccaagttttgggggtattctttatcagtaaattctaattcagtgcttaacatagtacttggtactcagaatgtattcaacaaatgttacttatcattattgctataatattattattattattatctgcttggtcaacagtattttccatgcaccttatatatggcatgcatacgctctggaggtaaaatgtgactactggttcaagaaatttacaaagtaagggagaaggaattataaatagttaagtactagctaaatgccatgattgaagcctttatattttttattttaattaattaattaatttttagaaatagggcctcactctgttgccca

SEQ ID NO: 115388 - DNA, 1040 bp, Homo sapiens
aattgtctatcaaccttttctggtgtacaaaccagcaatttcatagggtttaaacaaaacataacctggaaagaggttttcttttcataaaaatgacctttctattttgtaaataagcataacttgactccagctttttccggaggtaaaaccgaagtaatgaatctctcccagtgcgggtcgccgcttcctccgccgccagtggcacctcaacctcatggtctgtgttttaccgccatctagtggtaacaagtgtatatggttatgaaaaacaatcctcgaaaccatttattttcctctttttttttaggctatgatgttcagctgtttaagtgttaaatgataaccgtattttcctgctattttcagtgattcttattgtttaataaatgtttagaagcacctaagaagatccgagagtagtgtacgtaaataacattgaatccttccccatgggctaatacatgaaccatctttgtctaaaatttttctgtaaaactaccagtatttccttcctaaggaatatatatttctcatcattcccaatgtaattttgacattgactggctatacttctgcttggtggggcagaagagaaagaaatgaccttaattttctaaccattgagctctgtggaagaaacgtcagggatctttttggttagcaagcattaaggagtaaggacaactgtaaaaggagccttaaagctttgactacagttcttaaagagtcgaattcaggggaagtgagggctgccctgaacaaaagcaaagaacaatggaactttaacttaggggcttcagtaaaactgtttatagttctccccacagcctgcagtaacagatgctccctctttgtgccctgcaatgcaaagtgaaagcttaaaagactaacacagtgataacagtgatgacgacaccaagagtcagtcagcgaggcccaagacaacacccccttataagatttgtctagaaatgttatttacacttctgccaatagcatacatgtcatactgtagaagataatagttaacaccaaac

SEQ ID NO: 115389 - DNA, 1027 bp, Homo sapiens
ttgattaagaataaaataaaagctcaaggaggtacaaagtaaatatgcagccaactcttagagaatgtatacaagtatatagcactaggctaaattcagaatctaaaaaattagctcatataaggcagaagagaagttcctgaccacttctgctcagagaccgtcacacaatttgttaaatatagatgatgcagtagcaacttaattcttaagaaaagtaagaaaaagaaaaatgttaagtattagcatgagtctagtaaataaatacatgaaaataaacttgcattaccattaatagtaaaaattttttataacagtagaaacaactagataacaaaaggctggttgcccaagtggtgtcatgaagtaacatgaagaaaattacagcgtaaatagacaatatttttgtcatcttaatatttcagcatctgaataacaatcacttctgtgttttcacatcatccagtaatatagtatctgtatttggaaacacataaagttatgatacattgcaaagattaagaggagaattagcaatgacaagataagtagaattaagtcacaaaactatgaatttattaagtataagttacctgtcaaactacttaagttttaagaaatactcaattcacctggataactaatcctctattccccatcctctgttaaattaacaccaacacatagaatgcaaagatgatccaatcggctcttcactcacattcatatacattgcttctacacacagaatatggggtggggtgaatgcattcagagggccagtgacgaggaagtgagtagatttgatataccataaaaagctggggcatatttgggaatctagctaagttatccccaggcactatacagatatctcagacctcactgatcaggccttcggggtgccccattggggcattttctcagctagtagataatactctccctacctcccatgtcaaactactgtcctttctttagcaattaacaagtccctcaccacttcttgggcctctaatgtgtgttt

SEQ ID NO: 115390 - DNA, 1002 bp, Homo sapiens
gtgcagtgacacgatcagtcactgtaaccttgaactcctggtctgaagcgatcctcccacgtgtgcctctaaagtgtcgggattacaggcatgagctactgtgctcagcctctactctgttttctaccttttatttgttgcaaaagcaacatgtttattttaacaaatactggtcttcctcatcttactcccctgagatttcaatgttaaaagttgatttgtgtgtttccacgtaagtctttataacaagcttctgctgacactccttggcccagctttccataaacacatccatccctacctattaggttgaactgtacaaaattgccatttttataggtccccactattctttaataccaagcctcaaatttagccagacactaaatgtcctgttttatatacacgccttattcattccttcttggttttgtttttgtggcttcacttttgctggatggcctccacccccaaccccagctctactctggctggacattttttaactctccttcaaaggtgtacatcctgcaacttcttaaattccctttacattcattgtctacatcacatagtctgattgcctatataatacaatttcgtgttttagtatttatatgctatttaatacagatgccacctgttttgctgcttttattttctctggttgcttgatgttctattaccttaactagactttagtgctttctagaaaaggacaatgtgtagtatatctgtacttattcaagtgctgatctaaggacataggatgtaatgtaaaagtttattcaatgactatttcaaaatacaaagtctctctttgtataaagtcattcactaatactgacattggctgatacttcagactggagattctcggtaatattactttttcttgataattaattttgattataagaggatttaatatcatggaaataaattatgcaaatgaactcagaccctaggttcacttcccagaacaaaccgtattctgagaat

SEQ ID NO: 115391 - DNA, 1034 bp, Homo sapiens
aatttcaggcaagttacttctcttagcaccattgctttatccggcatagtaataaaaatcaaatgagacaatggatatgaaatgctaaaaatagtacattctctgttgttattatctattgtgattattgtgttacccttggaaaaaggcctgtagaatagtggcagctgggtcccctggacagtgaactaccaacctaaaaactgtctgggcaggcttgcctttgggagttcttgtatatcagctctaattctgtccaggaattcagaggcagagagcagggttgaggagaatttcacaggtggtaagatctccggtgaggaggcatttcagcaacgtgatcagtgttgccaaagctatgaaagatgttgaagaacacactttctacctgagatatcaactaaagtttgaagcttcaggagaaggcatagttctatcaacagacagcagtacagcaccaatagttaaaccctatatggtagatttaaatgctgagccttcaaaatcatttgcctgttttactttagctccagcaaagggatagagaaacccttcttctgtcatccctctcccatgtttgctgttgcttaagcagtatttattttggtaacaagaatacctggccttgccacttaatctccaccattccaaagaaaacctttctgagatcatcttaacgttgtctctaggcaataaatatctctggtttctagttattcccaaggacactgacctcacatttcttactgtcttaaagtcaaaagtacctttgtccttaactcacaccaatatgtatgagactaggatatgagagagattgttacatcttgcttgatgttttgacattataggtagtgtaggttttgttattacagtttgacttttgaaatgcgtatgagatttctcaggtgaaatagagcctttgatgtggtactcaaaagggataactatgactcagaggaaccatttctaaaagatggcactctttctccttccagttctttctgttcaatagtagggctggggaaaggcag

SEQ ID NO: 115392 - DNA, 1017 bp, Homo sapiens
aagcctacattctatttccatttttaaaaagttcaccagtaaacaattgtacagcaaattttatcaatgtaaaaagccattgtactctatccagtcaaaccatattcacctctcctaaagtgcccattacggaggctctgggaaattgaagttgcccttaatcttgagttacaatgggcagggcctctttttttctctaaattttactcaataaatgcaggcttcctatgcattaaatggtgcccacaaacattgaaactactagctcacctcctgaaattcagcactttactatgtgtctttcaatgtaagagcattcactaatttaacaagcattacataacatgtgtcattaatgagttcagttagctaggccatggaatagatattcctgtaaatcaactcctttacagttactaactgacttagtttcatggcagaggcatttatttcaattagactgtggttcctgttgagataaaatgagatcaactatgtgacatgattttgaaaaccatattatattggtgcatgaatgtatatgtgtgtgggtgtaggtagtttacagacagaatgtgtaacataggcatgtggcttgtaactgaaacttttacaaaacctagttcattctcattctataaaagtgtgtacacacatgtgcatatacacacacacactgtgataatgtatctgtgtatttgagggttataaatatttagttgtagagttctgacaaagtagtaaaatagtctcacttcatctggataaagatcaccatctggaactataaaaattgcaatgattccaaattgttgaatagttggattgcatatttacttttcagtagtatgttggcatgcatgtagatccagccttcctttcaacaaagaacagtggtggaagattcccttaaatggttactctttcctcaataagagcaaccatataaaaattatagaactattagtcatcatagttgaaagtatcgcataagattaacagagtccccatctggtg

SEQ ID NO: 115393 - DNA, 1024 bp, Homo sapiens
cattttctttttctctctctctacctgcgctcttcgagtgtcagaaacctttaaagctgttactatggaattgcaaaaaagagatcaagtgactctttcactatgctggtttcccttgtgacccagatgaagaatcaattcagaattcagttcctcccttggcattgcaagacacagaagaaactgtcacttcctaacagcctagtactggagtaaattcagtatgaaggaagaaagcgctcctgcgtgttagaaccttgcccatgagctggaccgaggacaggagatggactccaggaaaattggatttcttcaagcagcctcccttggaaatggaatatctttaaaatcttctttgcagaaagacagttagaatgtattaatcagaatagttgaagacttattttcctttttattttttttcaaaatgagcattattatgaagccaagatcccgatctacaagttccctaaggactgcagaggcagtttggtaacgttcttttctctcatgcttttccccttttctcttttaagattgacgtactccttgagtatttagtaagttgtgtgatgtcgaggctttgtgaaagaaggcagtattggcggctcttttattctttattttgttcccaaactcatgtgctttaaccaaatgggtgctgattttttttttaattcctcttggactgtaacaatttatctgatgataatttttaaaggaggaaagaaacttgcagatatgttgggagttttgaaaatgaaaacttgtcatttttcagtgtttgattcagttgcttgttttcttatcttctttgcttgctgcaagcaggctggtggttgacaggctttgcccttgtctttaaaagcaataccctcacttttagcacagatgtgttagaaattaataatgttatttatatttaatcatacacatgaaacaaacttgaatttaactatgtggctaaatgtatatcaagttgcttatcattcattcatctcttatgttttattttattagaaat

SEQ ID NO: 115394 - DNA, 1033 bp, Homo sapiens
aaacctctagaaattgcctcaaaattcccctccagataaggaaaataacacaatatttctcaataatgaggaactgctacaggagttcagtgtcttattctcattaacgttagagtacaatagagaatagcaggaaactgtaaaaactgcagtcccctggtctttttttctaaaaagttagtttgacatatctggagtactgaatttcagcatatttgagaggcctgaatatttagttgatatataatatggctctaagaaatatgctcatgatagattggaaagtatagaatatctattgtaatctgaaaataggaatttagagaacagaagatttgatagtaggcagagtatttgaaaatagtaatacttgagaaaacctgagttgtatagtaaaattactccgtaacacctcattcagttggcttcatttaatgtttaatgtttaatccatggataaatgtcataagtctcacaagtcacgctcaccattggatgataagagaaagggagatcacattttaggtgcgcacaatctacctgtatgcaattgacgctttccatgtaagtgttgccaagttgtatcggggcaccattagtggtatgagacagactttaggagttattttggactcctttttttctattaatatatcttatattttgggggcaaattataccagtatattaaatctatttacagaataaatataaagttaccttttatattcagtttaagtttttttaaaaagtgagtcaattaagaaaaatatcaaatcatggtatagatggaatgctaatatggaaagaattatgaaggtggtgttatgactgaagtttcagaaacatcaaatgacatagtcatttgattcaacaaaacatctacagatggatgacccaatggatgtatacatctatggtacagtctattgaaatgtggtaacaaccagaaagtaaaaggtccatacattatacaattcagtacaacagggaaatactgagaaataatcgcagcttctggatcaaaagcatg

SEQ ID NO: 115395 - DNA, 1035 bp, Homo sapiens
acttaaccctattgcatatattctgtaagtagctgtccttcatgaaacagacaactttttcttttaaaaatcaaggagattgtacagaactttgtgattttaattactgcatggcaaactaattcagtctcatatcctttccatttaatagggatttgtccctagctatgtgacctaagcaagctctttaactgtactccacctcaatttgcttatctgtaaaacatggataatattatttttagtctaaaacttcctctggtatgacagaaaagaccaatgtgaaacaattccctgaatttgtcaataaaccatgttacatttataaaaatgcctccagtgtacccagaccagaggaatctgtggcttatactaaaacgtgtattatgtattcattctcaaggtatatgccaacagttaagttagaaatccatccctttctctgtcacttgtccaaagtcaattactccatgcttcttttacataaggaaaactatcttaaaaggaggaagtaagatcacggacaaacaaaagttcataaggtctttcattttactgcctttcaaaaggttaagatcagagaacttagacatgcataagctttggtttgaggaacaattgagtcaaccatcgtaacagagggcctgaaagtatctgaaggtagaatgaatagtttatagtaagccagtccactctcagctctgagaacatccagctgcataacctcaagggaactgcgtggaaaaaattaagggaaattctttgggctttagagcttttcatttcctatgaacaaggcatctcctgcccttgtctcacccatatctccattgtcctcatgtagtcttctgctggttcactgtgtgcctggcaagtcaggttcttacgcgagggaaagagctgttttaagttgtttatgaatagagaaagcagattcagtcagacgtaatctgactctgtatgcctgcaggggttgtggcctttgttagtttattatgcctgtaatttgggaagtcatgctgcagagatgtaaag

SEQ ID NO: 115396 - DNA, 1057 bp, Homo sapiens
tttaaaagcctagagttattaacaaattatgccctcaatcagattttatataacttttttcaatcttgtcatatattaatgtgctgtattcatgaaatgattttgagattttaaagcaatgattgacaatatagtagttcatttaaagtttttacaagttgctgctgacaaaatatgggtaatgaattacatcaaataagtataaatataagtacacgctttgaagttaaaactcagtaagttgttatgattaaaattgttcactttattttcctcctgtgtatgggtttctcataaatggtaacttatacctatgaaaatacagggttctataaagtctgaaaacatagttattatatatcttaacggaccgaagatgtccttcctgatattatgtatagcctgtgtttccagactaagtgccaggcactattctaagttaggcacgattctaagtgttttactgttcatttaggctgtctggctagtgtttttctcaccttatcagcatcccatttttattaagtgaatttgcctaaacacacctgcacacgcacatgcatgcgcgtgcacacacacacactttttgcatttggaagcctggctattatggaactctagaacatgagagctcagggtcaaccaccaagactcaataaggtatggctggggatgtgaccaagactatcctagcatctatggctgtggactgggtgtcttctccactgacccttgaaggtagttttgcttcactgctttagaaatggtgcagagacttaatcttatttcacttttcggtgtttgtcttggttcctgtagaactggcttgaggcttagaagatgtcctcccacctgcatttggaaaaatacatttctaacacttctcctcatatggaaatttttaagtcattgaaaaactcatactgcagcatttgtagaaacaatttcagaacagagtaccttattgcttttcctaaaagaattttaactgtgcatgtataagtattataaatgcataaaatatatagttaatccaaaagacataactatatcatgc

SEQ ID NO: 115397 - DNA, 2389 bp, Homo sapiens
atgccatgtttacaagataaaaacaagaataaataataattgtttgaaatattttcatcatattgcctctgaaatgattgatgtcatactgcctggatttagtcaactcagtgaatgatttatcagtagccatgctctaaggagctctctattcatagatacttatgatttggtgaactgggaaacccacagagaaaggtaaatgaaataggagagccaggtaaatgggccatggatctaagaaccaggaatcatgattgtttggaagaacatatctcagactgagaaaagctggcgctaaagtaagctagcatttgattagaatgttgaaggataatttcattcttggagacagaaaacctaagtagaagcaaaagaagtaggaaatagaagcctgtgtttgagagattcagagtgactgtgttttattagaattgcaagaaagggaacttgaaaacataaatttaacatggggcaacaggccttggattctgaacagagggactttgtttaaggatggctctgtggctgtggaacagtttttctatagattatcaaaatgattctggaaaagaaatgtcattctggactgagagcacataccatagggaaaacatgaggcttatgggctgaattgtgtcacacccaaagtcatatgctgaagtcctaacctaggacctcagaatgtggctttatttgaagattgagcctgtaaataggtgattttgataaaatgagatcattagggtagacccgaatccaacaaggctggtgtctttataagaaaaggagattaagatgcacgcgcacacgcagagaagactacgtggagatgaggagaagatggccatctacaagccaagaggagaggtctcccgaagaaaccaaccccactgacatcttgacctcagtcctctggcctccggaactgttttaaaacataagtttctattgttaaagccacctaagtctgtggtattttgtaatggcagccctagggaaaaactacaatgagcaagtattatttgtattttaagaaataatattataaactaaattcatggaggggaaaatagaaaaagaggtcatttctgaaaacattgtataggtgtaacatagttgacactatcaactactacaatgggatcaggagacagagggtcagtgataacggagctctcaagactggaaactgggcgatccagaaggacaggcggttgatgaaagaaaatgatgagtgtggttgaggctgcgtttcccttgaggaggtgctggtgctcagggtagaggcatccatcacgatgtcagaaatgtgtgtcagacacgaaggcaggaatgaggctgtcgaggaagccatggcaacataaacagagaagtgccacagcgagacaaccagccaatgagttgtgtagtttcttgtaagtagctgaaacaacataaccaaattgttcaatttagtctacatatgaaatttcaatgtcagagaaaggcctttaatctcaaaacgaaataaactaaaagacattattttcctgacagctaagtcttaaaatttcttttgagaaataaaaaaaatggttttctcttttaacatagaggcaaaccagtaagtcagatacttcaggggaaggtagcttggtgatttgaatgtatgtgagtgtgaatacgtgagattagaatcttacctgagaacaaattttcatgagcatcattggagagtgggagagcatgaagacttttacccttctctctgcaggagagaattgtgcaggaggaggtggggagaatgccaccaagaacaggttgcctggggctagtttagcgatggggtccaaacgatctcactaatgtgaaaggatcatagttaccttaccaagggaaagttggcttcaactatatatttcacttctgtaccaggttttgcttaaatgctactctttggagaatatcaagaaatttagatgagtttaccaaatccaagattgtgttccctgcttttaactcttgttactgaaatagccccctgatccccaagagtaatgcttgactgaggtgtttgcatgaattgtttatatcattcattaattaacgtgatgaacatattaaagataggactcccagttttcatcccaagggcttacatataatagtaacaacctttagaaaagtactgcattgtttatttatagaatggctttgactcacttaataatgctccataattaatttgtaaattactttttgactttgcacaattataatttaatgtcatatatctgcaaaagaaaacacttttatgttgctaatattaatttcccttcataaatttgagactgttttgactatagataaatgtaaaatgtcaatgtggtgagaatgactcagcttc

SEQ ID NO: 115398 - DNA, 1017 bp, Homo sapiens
gctgattttaattgctctgataatgaactggagagagacacactaagcttcctggatttctgttggaaatgaatgggattcttgccaactatggatcacagttatgaggtattctgcacagggaaaatcaaaagaaagcagatggaccttgacatgctatgccatcctatgccttcttccttcccaagaagcatgttacaataactttaagtgaaggttgtcacaactttaagtgaaaagtctcccctttctgtctaatttttaatgtaacttcccccttctcgatatatccagaaaatagttaataacaatccctgagggaaaagaaaaatgctgcccttcatattaaaaaaaagaagataacagagatccccttagtggtgagtgatttatagtgaaaacagccaactcattctcttttgcctccttttgacctagagaactggattcgcggatttgtaactggattttgattatagagtatgttctatggctacaaaagagttttcctttgaggaaaactcaaactgccaacagatatgcttggtatatcagttttcaatgctttcaattgtaaataacagaaacctggactcacaatagcttgaacaaataggaattacttttaagtaggtggcaccggaggtgtttcagctgttgcatgatgttatcaccatttgcaaagaggcagcatctccacaattttcttggcctgttcctcttgatggcaaatggctactgcacgtccagatgatcatgtctgtgtcacagatagtgagagggaaggaggaaggatgagagaggatggccagctaaagttgtatctaccccacttataagaaacacaaagcccttccccagagcttacagccctttagccagaactatgacacatggtcatcttgagtgcagaaagatggaagttaacatttggttttctggtctttttaataaagatagcaaggatgaagaagtttggaaaagactgtgggctagccaatcaaattgtcgaccaca

SEQ ID NO: 115399 - DNA, 1372 bp, Homo sapiens
tgagttcacccaggagaggcatcaaactctgcaatcagaacatatcaacacatggcctattagctgattctgccacttggtagctgtatattctctctctgtttagtgtccttatctgtaaattgaaataataataatagctcataaggctttgtggggattaagtgagataatcatgtacagtgcccagcacagtgtctactgcatggtaaatactgcaaaaatgttagctgttgactgctcctatttatgaccttcattattaaaaaggggaacttaggctgacgcaggagaatggcgtgaaccccgggggacggagcctgcagtgagccgagatcacaccactgccctccagcctgggcgacagcgagactccgtgtcaaaaaaaaaaaaaaggtgggggggggggaacttatgaatgcctttcacttataccagcatcattaaaaatttaagttttttaagaaccatgaaaagctaaccattgacaatttaagaagcatgcaagcttggtttacaaaagaactggacaagctcagaatgggctagttcagtggagtgactgctgcaggagctcaggttttgagaccttcctgtcttcttccttcatccttctcctctttttgtgttctctccacacacttttcctcatcaaagccaaaacctttgttcttgctatattctctttttagagcctgctcacagtaaaattttaaaaaaatgaagaagtgctgaaagtgtagataagcaattagacatgagttaatgttttttatttgcaagagcatttgcattctaatatgaactgaacattgagtaaatagattcctgactccctaacagggctatgtcttgtgtcaggaagccagcgcactgggcttcttggtaggcaggagacccaagtcatcatctgctactaaggctgggtcttggaagatggagaaggccgtagaagaaaggaaagccaaaaaaagaaaggaatgagattttgatatattaattagctcatactataagcctggacttttgctaggcattttccatggtaatttggttatacctcaaaacaattctcaacattattatcactgccaccacttctgttagcagctgtgagaacagaggtcatgtgagtaagcagtttgctaagggttgcatagcttaaaaagtagtcaataagctaaagtttgaaccctgagatgcctggccttcacagctaaacttttattaattacacctgcttctaacaacaacaaccatggctaaagtttcattaacctaccagtttctaacaacattaacaaaaacattttcaaaaatataataatagtcatcaataggaataaagggaaacaatccaaaaatagctctg

SEQ ID NO: 115400 - DNA, 1011 bp, Homo sapiens
aagggcagcagccggctgaactagatttccacttttgtcttggctcattaaacaacaatggacaagttaccttaacttcatgggtcctcaaccttctcattcgaaattgagtgtatggactgtatattacaatatccttttaagcttacagaaataacattatggaggtatgagaaaattgtaaatgatccaagatatgtgcctaaatatttcttcatacatcaagcatgcattcatgaaatcaacaccaagcccaggaaatatcaaagaatagctcaatgtccctgtgaacttatatccaattcaataattcatccaacaaatgtatattgagtatataatctgctagacttatgaagccttaaactttatgctgtacattctgatatatgttgttttaaccaggggttggtcagctttcaaaagtgacccttttgctaacattgttcttctggctgaaagctagtaagtataagcaaaaggagagatgtatatgatctcacttctatgtggaatctaaaaaagtcaaactcacagaggcagataatagaagggggttaccagggggtgatgggaacaggagggattggggaaatggtggtcagaggatataaaatttcagttagacaagaggaataagttcaagagatctactgtacaacatggtgactatcattaagaacaatgtattgtaaaccaaatattatatgtggtcacttataagtgtgacctaaataatgagaccacatggatacataggggggaacaacagacacaggagcataccagagaggggagggtgggagaagggagagaatcaggaaaaataactaatggatactaggcttaatacccccatgacacgaatttaccattgtaacaaacctgcacatatatccctgaactttaaataataacaaaaccaaaaaaaaaaaagaaaatttctaagagagtagattttaaatgttctcaccacaaaaaagtatgtgagttaatgcatatgttaattag

SEQ ID NO: 115401 - DNA, 1006 bp, Homo sapiens
tactatgtaactgtgaattaagtgactaaaataagaaacgatctgatatgcagaaatagagttttccctgtttgatccatatgcagcttaaatatgtgatgttattctacattttatccagattcatttttcaaaccaatagtaatcattgttagcaaaaaccaataaataatcttttattctgttttaaaatttccatgtcgtactttgagttcttgctatatatcccgtgctcactttaaatcaggttttccttcccgtacattatttcttggaaaatatgttttggacttttcctaaaccaccttaacctgttgaaaaacactagtaaatgcataggcagtgtaagtcacgctaaaataaatgtgtattgctttttcaagattttgtttacccatgcatttaaagaaggtttttttccctttattttctttcttttttgtcattatagtcattatgtctttttaatgttaagattccggtaatatatattcctcatttttatgtcatctccaaagctccccataactgattgatgatatcaatccggcttctggcatataaagtttgttgacctggttcagtttgtaccatgtcaaaatgtgatcattaattattagatgatgtcaggaaaaatttagtatgtgtgataactgtgggtcccatttcttaaagctttcaaaatccaatcttaaggctctctactttgtggcatatgagggaacataagtaaacattagagcaatatcaaacgtattctaagggtttcatgatgtgaaacaatatatcactttattaccagacagatacttcacatcgtgaaatttgaaaaagcatacgaggtggggcacagtggtttaccctataatcctagtgctttgggagggtgaggtgggaggatcgcctgagtccaagagtttgacaccagcctgtgctacagagtgagaccccatttctacaaaaaatttaaaaattagtagggtgtgatggtgcctgcctgtagtct

SEQ ID NO: 115402 - DNA, 1048 bp, Homo sapiens
acctttacaaagaaattgataatttatttgcatataagttcaagcatatccattccatacatctgtgagtacatttgtagttctaggcctgaaactcagaactgcacaaggtcaatggaaccatataaatattgacctcattactgacttgttttcagtctccagtctcttgagtgaatttacctttgcttctttgttattataaaaatacagtgagggaaagtaaaacaaggaggaagatgaaaagaagatgtagggggaagaggagcagtttacaatatactttctattacattgtttcacactatctcaaaactttttatacgtagaaaatactaaagcaaagaaaaatggaagttaaaaatcggtagcagtagtaatagtcctatagtaggaaccttgttttgtttgaaatatgtgtctgtgtctgcctacaaaacataaacaccttaagctaagaataactgtgagattaattttttattttcaaagaaataatacaaattttaaatcttgcattaaaaggaaagctagctggacgaaacttttctgacacacagattttgagaatagcacccataaatatgcttccaatgcttgtcacttgatccctttttggcaattaacttgcctttaattgatttgtggattacccactggaagttgctatggataaaggaatgtaatggcagagtttgtttatatagggtaacaaaatagactggctgggaggagggatttaactgcaaaatatccttgattttcaggaatttttcttttcacataatggcagtgtttagataaagaatggaaagttaatgaatcagatttgtgttcccatccaaagggaagatttatgtcctgtttaagaatcacattaatttgatgacgttagtacattctctagtgaaagagtggccactttagtggaggaaaaaaacaagcaacaaaactccttctgccatcttcaggttgtacctgacgaaaagcttttatttgtgggttctatgaagtatcactgccctgatctcagatgaactaaaagatg

SEQ ID NO: 115403 - DNA, 1050 bp, Homo sapiens
tgtgggtaaaatacatttttataagaaaagattaatatatagcttattaagtttgattgaggcagaaagaaggattgaaagagaaaagaagagggagagggaaggaaaggcaggggagaggaggggagcagggccgtggaaggaggagtgaggaagagaaaaagagagaaagcagagggttacataataaggaaggtactttttctctgtgagcccagaagagattgccaaccatgttttcagtaatgggatcagtgttagcattagggcaccacttacaaagatgagtactaattttgagggcaaggtgctgatttatctgcctaggttctggcacacatgtttaaagattcacctaattactttagagcaacgcccctcccaagtattatagagaagaaagaggagaatgatgtgctcaagaaaacaatgtggagaagtttatattggttgtttaaacatagtacctaaaaaaaaaaaaatggggaaaaacgatctgggaagtaaagaaagaatcaaggagcaaagatttagcaagcctgtggaccctgacaactccaataagagaacactagggaattttgtgatttaaaatatattattgcttaaaactacagtagtgttcaaggaaactttaaatagaaaattactcttcttgagatgattctgtcttccaaagagaacaaatcacaaggatgttaaaaggaacattttatgtgacaagtttggggtaggtactatgtaaatagaagagaaagtcactcaaggtacatttgaatgtagggcagagattattccatagcattccacaggccagaaacagaaagtgtcttctagttttcttgccctttatagtaataggggtcatgggatagaaattctcagaaaatctccaaatctcatttttgccaattgtttcaacatcttttccttcccagcattttagcagagctgccaaacaggtgattaattaaatacatatgtgcatgcttgtacctcgtgtagaaggtctaatgagtaaatttatttgatatgacatagactgaacag

SEQ ID NO: 115404 - DNA, 1038 bp, Homo sapiens
tctttgttgtcagagtcatgcattgtaattcactctctaaggtgacgcagcatctccttgagggcaaagctgccaaaagttctgaaagtgatctgcctgtttttttttctcacactgacttttagagaggcgctggtattttcaagacgagtaaatcctgtttacatcctgtggaaggttggctaagaattatatccatctctttttaagagaagttgaaataaggaaaattatagttggcagttagctgtgtgaaatttagtaatctttgtcagatgacccagtcataggcatgtattttttaaaattttttaacgaagccctgtgggtttacattttttaaagttcacactgatataaaggtttacccacttcaatcacaccttttgttgtgtgtgcatgcgtgtgtgtgtgttgtgcttttcaggagtggcatgtgactatgctgtttaatcagggctatatttaaaaacaaattttcgagggagtgtttctcacgttaattatgagataaggcctgagtgaagcaaactctgtcgcaaaggccaagtgtcatgcagcaggaagtcctggccatcccttccagccctgcctcagccagcctgccatctctctgtcagcgcataccactgcacaaaggaaatgccctcactcagctacaagtgcctcctgctccgtgcggggcctcagggccccagagccccgcaccagctctgacttctcgtggttcctggggatcttggcatcgtccttaaaaatggcttttgtttgggatcctctgggagccacggtgccaggaccatctacaagagccaaatcaagattgcgtttctcaaagtcctacaggtattactcttttccttttgtagctaggaagaattgtttaactgccttaggccccttgcaaataagcctttgccctatgttgaccttctaactcctaatgcttgttaaattgacaatatattaaataagagccaagaagatgatgtaaaccttgaaataggggtatgtaggtacgtgcagaagttgaaggaa

SEQ ID NO: 115405 - DNA, 1031 bp, Homo sapiens
tgtatactgtgtattttaggtataaataactactagctatacctattttttgcctagagttccattctctcctcattttgtgatgaatcccatcattccacagatctttcctagaagacctttcataattttctatttccaaatggaagtgcctccttaactagctgtttttcttttcttctgtgtctgttactgcactatcataataaatcttaatttatatattttctatctttcctcctccctaagagtggcatgatggaaagagttgtttcagaaaaaatttggcaatggaatgctgcattaattggaatggaaaagaatgaatccctacaccaacagaaggaagcagtgtgaaatcctgacagggacaatttcattacaattacaaaatacataaatatgtgattacaattgtgagaactgctcaaaaggaaacaaggacccagtgagagtataaaaataagtacctaacatagtctgagtgtttggagaatgcttccctggggatgatgaggcctgaggatgagtaacaacatactctgctgagaaccacatgaatgaagccctgatgtgttaaactaaaaggataaggtgtctgaagtgtaatgaggcagagaggagagtggcaaaaataaactggagaagatgagtaggggagactactgttttcttacatgctaattaacccaataattctttatttcattttggagagaaacaagtgattatttattaatttattcattggcaatgcaatttaaaaacatattctttgtgtcttatttatcattgaggtttttaaaacattgaaataaacaataggtaatattttccaactgagatttaaaaaagaaaaaggtcagttttcaaatctattcccaactgctagagtttaataaaaactgtcataaatgttgacctttgttctgcaatcagttcagcatttatccatcacccaaccatgcagcctctcgcttgccaaaaggagtggaatgagaattgttagagtacttggaatgtttactgtc

SEQ ID NO: 115406 - DNA, 1107 bp, Homo sapiens
atcagagaaggctgtcattggtttatttgttatattcctagctcatggtgattgtatgttagccaaatatcttgcatttgattttaaaacaaatcagaagtagatgactcagaaatgttgacaataaaattatggacaagccccttgctacagcagctcttattaattaaatatctgagacagcagaattaaaagagaagaaagtgatatacaatttggaaggtttggaaagctggccataaaattatttctttcagctggagataccttacctacttataatatataaaatttttgaagaaataagaataggtcttattttactttgcagtgaaggcttgaaatatttgaaagttcactttattgcaataggattaagtacatcaaacttcatccattcttatctctctcaaatattaggagtataactttcaactgaacttctttgcctgctgtaatatactgttctatagtgatattttaaaatgaatactttgtgaacatagtactagaaaaaggatagtgttttgaatattttaatagccttacagggttaaaaaaggatcttataaaaagtatgtttagtaccattcaatttttacaaatttatgcatttgcttattcatatatgtaaatttaaaatttacatataagcttatactcagaaaaagataaatgttgtaaacacacttgcatgcacacacacaccataacaaccaccatgccattcagtggttatttcagggtaagtaggattgcagaaacttttacatattcacgttttgcctatattttctgttataagcttttattttggcatgagaagaaaaaaattttaaaatttcccaaaaacattctttgtaatagtcaaaaattaaaatgaacagtgtctatcaataggagaatggctacaccaacaaaaaaagtcaagtaagaaataaaattggccaggcctggtggctcatgcctgtaatcccagcactttgggaggccaaggctggtggattgcttgagcccaggagtttgagaccagcctgggcaatatggcaaaacaccatatgtacaaaaaatacaaaaaaaatagccaagcatggtggcatgcacatg

SEQ ID NO: 115407 - DNA, 1066 bp, Homo sapiens
ctatttctgtttgcccagtgaaacagaacaaatatgcccagttccctcagagagctagcagaaaaaagttctagtggggtgtcatgggagtttctctcttgtgtaactaggtgaactcctgtaaggaaaatttgccatgcaccctgcagagctgagacttactattctctgttgtaggacccatactttccccagtaaggaactccattttttttcaggcctttgctcaaatatcactttcttaataagacctttcatgaccatctgtttttaaaaacaactaatcaaaacctatcctcaagtgcagactttctgtatcctcattcctgcattatttttctctgtagcacatgtagctattcagcacacttagatttttatttatttattaattaagggttgactccatcccaccagatcgtaagctttatgaaggtagaacatttgtctattctgttgagttatgaatctttagaacctaggtgggtgcctggtacctaatgggtgtgaaataagcatttgttgaatgaatgagcgaaggaatgaatgaataaataaattttccccagtggagcaacaagcaacagttggagtcccttgttgtcaatcaaatataaagatagcaaagagtaagtaagcaagagtgaacttgcatcatatcaagatttcttttatattccttaacattgaaaatattcatgtggtgaaatacagtattagagttttctcctttagttgcaaataatagaaactgaatttaagccgacttaaacaaaatagcagtttgcaggatcttgaaactcaaaaattcaaaggatacagctagttttaatggttgtgaggattgctgcaggccctctcatgatttgattgagcgtttgtctctgtctttctctttctctccttctgtctcactgtgtttctaagactttctctatgtggtagcaaagaaagctcagacagcacaaggctgcctgtagtaattcttgtgacatgagagcatacatctcccagtagttccaaggaaaacccagggctgacttgaaacgtgtgcacttggattaca

SEQ ID NO: 115408 - DNA, 1050 bp, Homo sapiens
gtcctgttttgcttaaaaacaaactctaaggaatttttctaaaacatgactcaacctaactaggtatatatactgtactttaaagtgaacatatttgaaataattgtgagtgacaaagagacggaaaaacatagattttgaaactagcattattctaatgatttttatcccagtggtttatttggaaatgaatttccattcacaacatcttcatttgtcttctaattttcatgcaatttgaaagggttagtttccttacccacaggatcatcctggtcaaatctcaaaagattggctagggcattctgattttacaggcaaatttatattttgccgtttcaggaaataattccttcatggttatcttttataaagagcttatttgtataatatatacacatagtatatatcaaataaaagatctggtgttataaacataagaataagcaatttcccttttgtgataggaatatgaaattccttctggtagaggacgtttaagagcatgtccaaagaatggctaatcaatgaattctctcattttgtaaggagacacttagatgcatttctgaaaaaaacaaaacaaaacaaaacaaaacaaaaaacactttgggctttctctgtattcttcaagcatttctaaacatttattgacatatgcagtagagaaaaactggtatcaggaggaaggcagtaagtagccagcagtcacaaggtacaaagaataaaatgcatgcaaacatgtacagtattcactttcaggagttaatctacattttatttaatttttttttttttttttgacagcgtttcactcttgttgcccaggctggagtgcagtggtgcgatctcagctcactgcaacatctgcctcccgggttcaagcaattctccggcctcagcctcccaaatagctgggattacaggcatatgccaccatgcctggctaatttttttgaatttttagtagagacgggtttttgccatgttggtcaggctggtctcaaactcctgaccacaggtgatctgcctgcctcggctgcccaaagt

SEQ ID NO: 115409 - DNA, 1034 bp, Homo sapiens
ccccacaagcaaacatgttttttttttcttagtccagaaagaagaaatacagtgtgaacataatacttagggtagacaaaatggccaaaatagattaagttggcatcctttttagctgcagcttccttaaccttgtaccacaccctgacatcatcttcctacatggccacacctcatccccccatagccaaacattatttgcattcatcactcattcgtagatgccaaatcagacatggttcttgcccctatggagtttatgattaactggggaagacatgcattaatcaaattctctttctctctctctctcattctctcacacacacacacacacacacacacacacacacacacacacacacacacatgaaactgtgactggatcagatgctacgggagaaagacacacagggttcaaaaatctgtgaagggtttttttatctgttcagggaaaatcaggaatgtcttctctgaggatgagtagttcaggctgtgatttgcaggatcagtaagaattaaccaggaaaagaaggcaagagagagaaccttatgtggtgaatgaacaaatgtttaatataaaggcagcagaagagccagggtggaggcaggcacagaggtgggagataaggctctggtggccatgctaaagatccttacttcaccctgacagtgatggatcatcacaacatttccaagatcaagaatgcacttcccatctgtgtttcctctaaagtcaaaatatggcccatctttcaaaaggaaaattcaaatgttacccattcagtcttctaacactttcatttcctaatctaattagaaaagatcattctggctaagaggtggtatagtagtttaacccacccactcatatgcatgtgtttgtatttatatataaaattttattttcacatttctttttcctagtggcattagcaaaagcactcccagtttcattgagtctcttttaagttttgcttcccctctcctcctctcttcactatgctctgctgtcttggtgtctccccactact

SEQ ID NO: 115410 - DNA, 1031 bp, Homo sapiens
cacctgtcactcagtaagtatccaataaatattgttatagtacagattaggcaactagctgtgaatggttaaccaggttgcctagggtaatcagtggcaggccacttccaacctagatcttacccattaactataggttgcttggaggtctaaactgcctcttctatatcacattcttgttcagtaaatacagggacaataccttgggttaagtttgaattatgagggataatttatacctcctcatctctcaagcctcagcaagaatcgactgatgtgccctcccatgttgagtcagtgcctaccttatacaggatggattttctgtttatgactgtcttactcaggccctgcttcattagattctctgttcttagcacagtgcctgacacatagtaggtgctcaataaaatgattttagagtaaacattacttttccagaattgtgtcctgggaatttacggcttttaatattaatttcaggtttttaggatatagcccatgtttttggggggatagatactgtttctataaaaattgtcatcttgagcataaataattcccacatatcttgatttctgtcacttgggagagtttaactggatttgtagaagcaaccatcctgccgaactgggtgtatctgtaaaatctaaatgctattgctacaaatcaccttatctaagacaccatttcttcaaaactaataactagctcattcactttcatataggaatctttctttccttgaagatatgtatgttttatcttgctggtgagataaaagtctgtaaattatctccacagctggctctgatgcttgattatgcccctttctgcatctataacattgatgtttcattttaattacttttcatcacagtacatgatgtggtcttcagacatagaccagcctctacgtgtggctcttcgttctttttatacatctttcactgtcaaactaagctctaaaaatcatctccctaatatctcttcacttgccaagaaaatgtactagctttgtattatatgta

SEQ ID NO: 115411 - DNA, 1035 bp, Homo sapiens
aaggtctcgccaaattgctcttttcatctccaaagactccccctatcctcattctcacatttagagccttttcttcgtgaagggaccgatcagaagttggcaacaggccagtgctaaggaataataaacattgtaaaagacatatgtgctttggtttcacgagccctagctcatctctagaaaggctctgtaccctttggagaggcgggacttggcatgtgctggtcctctttctgtcctgctttttgagaagcaagaatgagaaaaagctgagacacaggaggtctagggtagtcttcaaattttaccagaagtagtaattgaaatagaagcctgtgcacagagttcctacttgtactctcatccacctgccctagggctggtgtgttgattattgagcaatagtattacaaattcactctttatcagttatgagttaaagttaataagtggtcctattacttggtttaatagaacactaccccttccgtgctaaaagagtggtatgaagaatgtgtgtttcttctttgaagctacattagaaatattagctggaggattttattgcgaaggcttctttccattacacttttcagtctttttactgccaagccaaacaaagataagggtttgcctcactggatagataagtactatatagctcttcttatttttccttctggctagttgttagaatggagagatagcctggcattcaggaacaagtatggcatggttgaaagaagggaaatgcaagtcagctttctaggaatttaaatttcatgtagcagcagttaagaggacctttagaagcattatgacctggaatcacatgccagggtctaacatgaatgacctaacacagtgtgactaacatgttcagctttttgcctgacttaaaagatatataacaactttttataatcttatttgtaaaaatactataatttcatgccagaaacatcaaggctatgttgaatgcaattgaatttcatagctaaacaatttaggagggcattttatttaaataccttt

SEQ ID NO: 115412 - DNA, 1013 bp, Homo sapiens
aatgctaaaatgtgttggtgcctcacagttaaggatattttagctattcaagaaatatttctaccagaatgaaccagtagaattctagtagaattctaacatatgaatcaggaagtgctcaggctctcatagaacttgcttagtgccttgatatttggtcatctattaaggttcaatgcaatgcattcaggtccctggacatgtgatatcatgtgccatttcttgctggagtttatgactaaatgtgtgtaggaactcattgctgagggtatttataagagcaaaaggtcattattttaaaattgcttgtttttgccatacctttagggtcagctggattctgactttcatagcagaaactttgtgaatgcataataaaggcacatgttaaggcttagtgtctgctaacatgggttgttttggaaatgcagtttgtctgattttgaaagtatatctttcaggtaaatgttctggctggactctggatgaataatagatacctaaatataggtttcggagggctttccagctgcttttatgacaatgtctcaaatgaaagctccctgagagcttaaggtaccaccaaaatcacctgctggtttgttacagagttttcggctttcagctaaaaaatccattgcagagaaggatgggaggcatcctctcccactctaggcaggtgcttattttctaacaacaccagatccatccagagtcgatgctgtggcgtatctaccttttttgctgaccagagctactatccccagtctctagaatgcttgggtgacatgcctgcaaacctcggtggcccacttccaactgcatcaccagagtttcctagtcagggggagccttggtgccattgccttgcttgttctgttggtgagggtcaggcatcagcaataaggtcctcattattcttacagacaaatttacatcaatagtctttaatcttgagattaaaagatcctggaaacagttcctggcacgtagtaggcatttgtcaattattt

SEQ ID NO: 115413 - DNA, 1039 bp, Homo sapiens
aaatattctcaagattcttttatgctgtagtggcatctttctgaacctacaagttcacattgcttttaaggaatcacccagttcttcttcctcctaggaatcctccttttaggatcatcttttgatcaaaatgaaaattctccaaattatggtggtttttaagattagttttctttatactaggttttgaatttatgggacatgccctccacccaatcttgggtaatattttctgcaatgacaggacctcactggggaaatcctaaatgaagataatagcatgttatattaaatgttgccggtattccatttaatatcaagcaattgcgtaaaagcctttttaaatacctaagttaaaagtggtatattaatgttgagtgtacttctactgcaaagtccattctcccactgatttcaaacaaataccatttaagtgccaacctactattacaagagtttactattttattcttgctccaaaatggcatcaacagtgatggggtgcttttgggggattattgaacagaatttttgcaacaaaggagcaagcatgaagaaatgcaaaacatcagtgatagggattgcaacgttttatctcagcattcctcatatctacacaccccctaatcaaacaagcagttttatggcatgcgcaattgcaattgaagtacaactgacttctgcagaaccggcttccataggatttcctgtccaaaaatcaccatgtggtcatctgcagctaaatggttacaaatcatcaagtaaacaaggcttccccaccccggtgctttttttttaaggagtgaaatccaccaaactctatcatttgcaaattatctctggacttcttttatttctttttttttcactgggtaagaaggaaaacgagcaaacaaaaaatcctccctccgtatttgtttaaggcgtaatttccctgtgaggtgttttacaggcttctccttgtttagcttttcttgcctggtaattactgaaagaagtctgctcttccagggcgagctattcctttaaccccttttgc

SEQ ID NO: 115414 - DNA, 1044 bp, Homo sapiens
aagttttggttgagcacgaaaggagagggagtgagactaatgataagaaggttaaagtaatcactggattgatttgggatgggcagtctcaaaagtgctgaggattcagttcctatttcagtgagctggaacacacaaacatagaggaaaaagaaagacagttcaagtataaatttgaatatacctaaatgtgtgtaaattacggaagaaacaacttcaaaagaaaataacaacaatgacatgggctacagaacagttaagattaatgatccctcattatagggtgccattcagacataggagttaaaaaaaaaaaaagcaaaccagaaccacacactgcagcagctccccagttgcaagcacactgaaataacagaggcctgccttcacgggaagaggattagttctactgtgacctgtttatataaaaacaatgttgtgggtagcaagattactagaaatgacttcttggattataaaggacaattatgatagcttaggccactagctttcagtacattccatctggtacgttacaaattagctcattattctgctgttcttacgaatgtgttagtctgcaaacatatcattgtcacaaattagtcacctagtgtttctctgaaagtgatttaatataagcacacccacatcataggatggaacagtaaaatgggtccttgctagatcctccaaacagaattcagcataaagcacaattcaatttccaaaggtttttggcacatacatcatcttctgattttctaagatgaaatgtgattgttgccctggatattggtaatacattgtaatattagaaacctcttgggtctccccatgaactctagagatccaagcctactgagaaatgatgggtccacaaattgagcatagcttttatttgtttttatttacatttgttatcgcaggtgctatcacaactgttgtttcaataatagcaatttcaatttgaaaattaacttaaagatcttattttgaagtgtgttttgtagcagatgagctcacccaccagctacttggaaa

SEQ ID NO: 115415 - DNA, 1026 bp, Homo sapiens
gaattagaaatagaggcaaagtggcagaaaccccacattaaaatccatccttgtcagcactctctgatttcacataccagggttcttttcggattaatcaaaaaattgttgaaacgtgttaaaggagaaatgcaattctgtaaggggaacacagttcctatttggagggaaggaatatgtatggccactataataacaaattaggggaaggcatgtgtgaatttttatgcactcatcgtcctattgagcacaagtagagaggtttattttcttttcttcattaattgttcttacagaaataaaccacactgtgtaggaaactaggcactcttccctacctactcctgctattgaaagagccttatctatggaaatcctcaaatcagcttcttcttattgtaccagtgatgtctcttggattaattcagacaaactgtgcagtgtaaccaatgcagacagtatgttagaagcgcatggatagcttgcttccttttcattccttcttccttcctttattgtttccgcattgtggttccttgtatcctaccatcttgaatctcttgtacctctaattatagtatgctcactatatgcaaggtttctcctcccacctaccccctgctgcctcctctactgacatctcacttcattcccaagaaaaacattgccctcccctccaagctcactgtgtttgcatttctctgctcttttccgctctcctccttggcatgctggtttaatcaattttaccaaatgactttcctggcagctgtaaaaagaaaaccccagagcaagttaatagcaatctaatactgcactttctgtcatttctctaaaacgtacagaactatttggtcattggattgatttttaatgatctaaatgatcagatgtttcaacgctgcactgcagcagcctgataataaataggaaaggggaggggcatggatgctgggcactcagtcagtgctagatgaataatcctaaaacagcagccaaggagacaagataaaatgtcagcctttg

SEQ ID NO: 115416 - DNA, 1107 bp, Homo sapiens
ttatggaaaatacgtttactttttctagactcctagaaggccattttgaggacttctgtaataattcactaaatagatagaaaactgcctagacctatacttcgctgtaagatagtcctcttttggtctaaccctcatttctatttagctaactagctagtcaggagtgtaaggtaggcagtataaagaattttaaacttactagggtcacattcaaagtaagcctagagtaaaatcaggagatcagattaccccagctactgagactgaaatgtgaactgtattgttgaagagcttttcttcctcacaattgaagaagacataaagactggtgatataagagcaaatgcagacacttttggtcactgttagcttgttttgaatgtgctgactgtgtctgtgtccatcttgaaaatattgaggagtcagcaaaacatatttgactctttacccactttttcttaaatgtttcatagtcatgagtatttcgtgggggaatttaatctatgtgcctatgattcatttacactagtctcatcaaaatggcatagggagatattgaatggctaagaatccttaaagtttaagaggccatttaaggcttttatctctgaaccagaaagtcatagtgtaccaggactactcccaattcaaacataccagggttcaattttgttttgtctaatatatcccaggaaaccttactgtttgattcatgatttctaacctcaaaatgctggtctaacatatgtatatatatattaatgaagtccaggtaagaagcgcatggctagaatgggaatgttcaacataaaaatatcccagccaggcgtggtggctcatgcctgtaatcccagcagtttgggaggtcgaggcctgcagatcgcttgagctcaagagtttgagaccagcctgagcaacatggcaaaaccctgtctctacaaaaaatacaaaaattagctgggtgtggtagtgcgtgcctgtagtctcagctactcaggaggctgaggcctgagaattgcttgagcctgagaggtggaggttgcagaaccgagactgtgccactgcactcaggtctagatgatagagagagaccctaccaccaaa

SEQ ID NO: 115417 - DNA, 1019 bp, Homo sapiens
tctgaagtccatggtgccagggccctacttgtcttggaggttgttctattctgggcttggagaacagtgcctggtacaaaatagatccttaacctctggcttgaggttagggctcaataagtaataggtggtataagtatctaaaaaagaatctcattctctatccaaattggtattcactagccatatgtgaaagaaactaaattttcaattttattttaataaatctaaatttaaatatccattagtggctattatattggacagcacagatatagaacatttctgctactgcaggaagttctatgggacatttctagacatagaagcatagatgaggatataatagtgataattcagttcagacccggtgctgcctgccaaattccacaacactgccctgcattgctgccctctcatgacaccacacagctcccagttgatttgttcttctttatggtaccaggtgtattgggtgtattgcaagcattttcttcttccattattaagttaaaaataccccttgaagttttgaaaagctgtaaaggggttgtcttgagagtcccattaacatttatagtgaattctgtggcagcaattttttattttaattgttgttgtctttgctattcagataagtaagcagtaggcatagataattaatgtacagattctgttttacacaactttaagaatgactctttgagaaacatgtctttaaggacaatgaactgagatatcccttacttgaggataaaatatgggtgcaggtacaaggagtcagcaggtgtcacgtgtgggctcatttcttccctcaaccctggaaagtatatagattctcaccatccttgttcagcctctgccttagggataagcagtgctggggtgattttatgctcaggaagtaaccaaaggctagcaaacatctctcattgttggcagtaaaaaccattgctatgaataacaatctatattttataaaactattttggcttcacataaaaatctgatgcttcaag

SEQ ID NO: 115418 - DNA, 1019 bp, Homo sapiens
aacatttttgccaattgaagtgtttcttttcactaattgagcaaacaaatcatgggctatccactcacaagggctttccaccacccatattttcaggaaggcaggtgttgagcttatattttcagaatatatttccagcttcatacactcttaagagaacattgaagcctctttgatgaaggtgagggtctataaacatgcttgtattcattataaggggattgtgattgtcctcatagaaaaatgactttaagaaatagatgtatcctgaagcaagataatatgagtgtcaggctggacacgtaaaatacaagggaaggtagtggggaaaaggctgagaaaagagtactgtagactttacatcacaatgcttaaattaatctaaaatgtaagctataaaatagactaaaattatatatagacgtatgtgcgtatgtgtgcatatgcataaaagtgtatgtatctccatacttcaaaggctaatattcacagatagattcaacaatcaaatacggagttagttttgaaggaaaagccaaataagacacctttgctagactttaaaattttattttaactgaaactacggtatagacataaccatataaactaatctatttacttgtaaaattaattgtttcattgtcattgaatcagatgtgagtgtatttagataagtcaaggtagtaaaagagtataataagaaacactgagacccagggatcatgctaactcagacttctgtcttgagtctgccacataagagcaatatttcctcaggcaaattattttcatagttttgaacttgaaattctcatctgataaatggacacaccaatgcctaacacatagggtagctgtgaggattaaatgacatgcgcaatttgcatggcttcctcatcaagttgccacttgtattagtcggctagggctgctatagaaaataccacaagcttggtgccttaagcaacagaaatttattatctcaccgttctggaggctaggagtctgagatcaag

SEQ ID NO: 115419 - DNA, 1081 bp, Homo sapiens
tccttatcttgaaggccattcaccactctgccctgctgacgtgtttttcttatcacccaagattcctcccccggctcacacttctgcatgcaagcacgttcccaaagtatgaaaatgctttggatttatatcatgctgttgccttgaagagttttattctcttcctcatatcttctcagagaagaaagtaatttggctgtggttcaaaattcaccaaggcagtaaaatcttgtgttttgtacacaacttcctttctaatgacctctccctttcttcacctcacattgggcattcactcataactatttaagggccttctcttaggcggctgccctgttttcaggttgtgccctatgtggtcacaagtggctattcttaataaatcatagaatcgtagaatttaagtactgacagggatttcctatatataagaatccaacttcctactctgcagaaatccatctcagaacattctcaatgcttaaaattgccttttcgggagagaacatcaactcgtaagacaagctctttccttgttgcctaggactcatttttagaaaaatattctttgtaatgaattgtttccctgccacttcctccctttggtatgaggcatgttgccagaaagatacaaaataattctaataatctttcttagccttgataatgcaagagaatacagcaataatttcctccattaaaccttatttttttttttttttgaggttagatgcctaaattacttcaaggattcttcttgtggaagcatttttgagaattttcttgtctttctgcacctctgatttggtaacttgaccagcagacttcacaagaagcttgctgtcagtgttagtccaaacacaacctatcagttagtgtgtttagtcattaatatttaagagtgttttcataacctttaaattaataattagtcatctttattctttaatgactacagaagctcacattcatagtattttggtaactaaggtatccataggctcaaaaactcttcaaaattattgtgtaatgaaaatgttaaccatatttaagagagtgacttggaaaaaggccttgtttt

SEQ ID NO: 115420 - DNA, 1220 bp, Homo sapiens
aaactgggcaaatgcagaattgggacaaatcctatgtgcaataattgctaataggaagtgttctgaagtatgaattctctcctcctttcttgtttgacttgtcactgaatctccagtcctacagagtactatgtcctgcttattgtttatttataccacaccccacttctacgtataaacatcactttcactacggtggattcaaatgatctcttaggaatttagttacattacagtctcacataaaattactgcccttaaaaacatttgtttgctgggcagggagtggcgaaaccccatctctactaaaaatacaaaaattagccaggcgtggtggcgggcgcctgtagtcccagctactctggaggctaaggcataattgctttaacctgggaggtgcagcttgcagtgagcagagattgtgccactgcactccagccttggcaacagagtgaaactctgtctaaaaaaaaaaaaaaaaatttttttttttgctaacattatttgaagaatagtcagttcagtatgcatctatgtagacctaaccaatagttgtattttacaagtttcagttttgaaatgttggatgatatctttcagtttaaaaaattagtatttctataaagtgtctttttttggatggaaatgtttctggaatgtgacacttaaattttaattactattattaaatatcaatggatttgttttgcataaccaaacagttggataagttcagtttatgtgctgtgcaatactaagatatttacttggcatggagagaatcactggcttactaaataaaagaattcagcattttgtttgtcaatcctatgttaattgcatttatatttctgacagtttccttgatggaattaaaaaaaaaaaacatgcaataagatctgaattgagtgttgaaatgagtgtttcctgagctccaattagtgaaagtattgagatttgaagaatggttgaggagacaaggttttataattgcccttctgggaaaaagaatgagtaaacaataaagtcttgagatctctcaaacaaatatacagtcataaggaaagtttaaaagccacagtgaaatgcacacctcttaattatgttaacattgatatctattttaaattgatatcaatattagctgtgaaagtttcgtatattttgcagggacaaattctcttagtgtactccaaatgcttattgttacacatcctgag

SEQ ID NO: 115421 - DNA, 1071 bp, Homo sapiens
ggtgagggccaggtttctggttcattaatggtgtcttcttgctgtgtcctcacttggaagaaggggcaagggagctataacttggaagaaggggcctctttaatatgtgcattaatcctgttcacaaggctggaggcctaatgacctaattacctcccaaaggccctacctcctaacactattgcattggtgattagatttcaacatttgaattttgggagggtgccaatgttcagatcatagctggtcatttcagcttatttgtactctctaagttatgctgcaataattgttggcttctgtacatgggcaatatggaaattaaagcaatcataacattttggtagaggacctgaggagagattattctgaatgtgatgaagttatagtctttttcctcaggtggattagatcactttttggatagaaattttatgttgggaaaaataaaaatggttcagtgacctgaggcagaaaaagtctgttcacaggaatataagataattactccatcaactcacagttgtttggaatgtcaggatcaataatagtcctcagaacattgtaaccttactccagcaactatgctaacataaagcagagaagtctgaagtctgtccattagtattggtgacaaggtcatggttgcttttaaactttgcttgccaaaatacctggagggaactcaatgtgcatactcaagtttctgctgtggcaaattgactgttgctaccccaggagaccctaggaagacaatcagttcatgtctgactggagacattgcaactttatttgtatgaactatttgggtcaaatttcagggggacatgtcactacagaggggcagagggtcatgataatgaaaagaatcattacgttatattggtaattagatgtatgactctacaaacttgtttttccttgggtgttagtaacattctttttggagatagatggcattttacaaagtctatccacagaaaactggaagtatctaaagataatgataatgacgagaatatattcattgtaatctggcatacagaattttctctgccatttaagaagctg

SEQ ID NO: 115422 - DNA, 1235 bp, Homo sapiens
tcatatataaatgtgtgcatatatatgcatacccacacatacctatatccatgggtatattcagatatttgtatacattaaacctaggatttcacaatgataatccatcattgcagtgctcattctgttcttctccattttcgtatctgtaactctgtgagaagttacggtgagaagcctggctcccattattcacaatatattatatattgcataggattttcttacctgtggaatgtggtttcaaaaattactttcagaattacccactcacgcctctatggaaaaagagaagtaaggcaaagaaaagtatttcagtaagtagacttttagcattatttatgttttatatgcctaattctgtactcaaaattcacttggttagttcttttctcacagccacttccactcacttcacggttctgttacttattttaaatatggatcagttaatttgttttaatatataaatttgttttcatctagagttgaatcgattaatctggaatgatattttctgtttctatgtttaaaatatcaactaataatttcctttccttaataataagaaatctctagcaccatttaagactcagttaactgaggtgtaggtatccatgttttcctagagtatagagctgtgatctaaatcagaaaatctgaacaagtttgtcttggaccaaacttcaggataatctggaaacaacgggacaaatgttagtgcatgagtattttcaaacatagttctgagtaaattccaaatgcatatgtgggtttgtggctcttcatatctggttatttgtacatgatcacatctttattgtagataataaaagttgggtataaaagcaatgccattaattatgtattttttatgctttttgtttcaaaaaaggaattaagcaatcctaactttaaaaatggataaaatgcctatgtaaagctaagttagaaacacaaatgtaaaagtgtatttcgtacttggagttaagtttaggtcttaaaatattaatagcttcctcaaagatacagcaaatagagaaacctgataatatttatgtcttgagagaaaattatctttctataattaattataagacttttcattagggtctttgtgtaaagtaaagcaataatatgtttaatagtatttttatgtgagttacatacatgtacattattaatcatgaataaatagtgatgttcttatacttagtcttgttataagtcaaaat

SEQ ID NO: 115423 - DNA, 1093 bp, Homo sapiens
ttatcgtggtcagaaaatgcctttattttattcaagcagagatctggaaaggtaacagaatttcccacacatgctttccatctctgtttcaaatctttggcagaaaaaaaaaatctgttatttttaattagataaaatgctatgttaaataattgaagatttaatttcttactctgtcaatagaaggcagagtagtttaaaagacttgagaaaagaaaaacaattgtttgcttcctattagaaatcacaaaatcctctctgaagtaaacatacaaatctttgtttttctgctttcaaacagggaaaattttttcagtgcctaacaaacaggtgtttcatgattagattattaatgagaaataattttgtatcaaatagaaaaagtgacaaatggccctgcaagaccatgtgtgcataatattgtagaaggaattcctgttatgactaagagttgatgtagttaatttagtatgtctaaagttggctgtaatctatcaccacagaagagctggaagaaatgatcttaaatcacaaaggatttagtaaagacctacgtgagctgtgaaagatgattaaactatgaaatagttctcaaaaggaagttataaattccttgccacttgtgaaatctaaaaactacatagacagttatgttcgtattagaaaataaagatttatcctgccttggcacaatgtattgaattggcatgttgttctcagtaacaaagtcccaatttgcttcatcagctttaattccctatttactccatacatactctatactctatgtgttagtctgagtcttgcaagaagcccatgccaaaatgggattagaaatgcaagaattttaggaaatgcccttgtagaggaatataaggagggagccagttaaggctgagggaaacgtcaaagcatgatccaagtttgactctgagtaaagaagggagagagaattggtgagagcatccttgattgggctagccaaaggcatatgggagtcctcaagccaaaatcagccatcagaggaatcctgtttcccaggaatgtgtctgccacaacatgccctctgtgctcagtaaataccaggaagcag

SEQ ID NO: 115424 - DNA, 1037 bp, Homo sapiens
tgttatgttgattatatatagtatgtatgtgaatgtgcataactatatggattcatatatgcacatatatacacattcatttatactcatgaaaatggtaaaaatccagctaatgatttaaacattgggtcaatagcaatatataaaaataatattaaacattcagatctttgcaaaatctaaatgggcttgtttttaattttcatgtggacatttgaaattttatagataagactaacaatatgttttactgtactgtgagaatttaagattaatgaaatattatgttattaatttcttacatttgtaaagttgtttttcacaataccgtggcctattagattgctaagaaattatgtatgtcaactctttctttatacaaatattgaaaatgatagtaagattaaggaacttgcccaggtcacaatttttttctttcaaatttcatggctgatttctaggcaaaaatttcaggggcctgtccaatacgcatgaattaccctactataaacaaagctagggaatttaatacataccgaaaggcattttgtaatatatcagaaactatacaaaaccaagaatagtcataaaataacattttaacatttttaaaaaaagattattccaaatgccctcacttccaggaatgcgactttaaaagcctaggctttatgttatgtcatcaaagtcattgtactcaattagacaatagtgctataattaattaaatgttattatgtaaatgcagaattaccaaagagaatttcaaagagtataacagtattaagtcgtttccttagtaatttctcattgctgtgaaaaacatctgtaacctaatacatttatattcatttttcatattatattatgcacatattatttttaaatatttgttaacaggtaattttctgattaccaaagtaatacttttgtattaaatgtttgaagactgcctccaaaaattgcaaagaagaaaattttaaaaccgttataatcctacctttgaaataattattcttcaaatgttagatatttgg

SEQ ID NO: 115425 - DNA, 1866 bp, Homo sapiens
ctcaggccagtagttacaaattcaaagtcatcatggttgtgtttttcctcaactatcattgactgcttaggccacaacaagcacggtttgaaaaaggttggtttaacagagatgagatatttcagtgaagtctgagttttaaaaggatatgcaaagaagtgattatgctgccatatttactctaagctcactaaggaaaaggggacataagtttggtgagggtcagaacaacttctaaggtcaatgcactggaggactcattgggtttggaagatttttggagtcagaatactggaggggatgagctagaaagagagaaggtagggagagacgcttaacagtggttatggggcaccgttatctgtcatggcaaggccttgcttatggtaaggaaaggaggtttcaggtaagattatctgaagggagatccagaaactgggagaccgtgggaggaaaagataattatgagttatgtaagagtttgcgctggagagagacagggctaaaatgtttaaagactgagaggagagacctttaggtcagtagaaaactggattaggaggggagcagattaatgatgtgagttacaaagacattttagggcaaggaagagatcatggtctggaagcagcagagaagaatgagaaagactcctacttcactaggggcagaggtacaaacatgtggaaggaaaaatagccactgcatcagagggctgaagtaaatccgtattctcggtgggcagccagtagtgtcagagcaagatggtgcaggaaagtcagagaacatgctgaagatacaggagcataaggagattttgctgatgacagactgaacgctaggagtcacgctggcgagtttgcaggaattggggaaggctggggatttcaaagtaggggatttacagagccatctggtgatgagcaatgacctggcagtcttggactttgtgtggtgacggttgtgtattcaagacaaggaccttggttttaagaccatgtagtcagacaagcacaaactcctctgctgggatggccggtttctttggtctatttaattagttccagaaacagtaattcatcctcactgcatttatagaaattgaggggagaggtggtgggtaccagactggccaggtctgcccagtcatcttcacttcaacattcctgtctggtaaagtcatattattctcacatcttggccgtgtgtgtatgctccaagaatgagacagatgacagaagatacagaaaaacaattgggaaattgctagtttgcagatgtatagccctggcacagattttctaatatgaaattgccattttttccatgatttggacacaaaatcctgttcttgaatatgatgttcagcctagatattgaagaactgaaaaatatttttgaaaaaatatatatattgcatttgtcacaacagtttatacacataattatcacaatgatattgcttttcttaaataaataggttttatgtgttggcatgaaatacttttacaagatgatgccaggttttaacatttatacaggaatattttcattatcataattgttaataaaacaaatatgaaatgtatagctttctctttggagtttgaattgttggttcttactgcctgcttgcatatttatattagttgtactggctggcagttattaggaaatacgatcttctgtgtcttaggagtgcgccctgcaagcaacatgtgcaaacatttttttctttctttctttttttttgccctaaggaaaagggtaagctctggcaccttttaacctgtaaggattatgtggctcttgctgtgattgattggttggcttctcctcaagaaatgctcctggtgcgtattttat

SEQ ID NO: 115426 - DNA, 1673 bp, Homo sapiens
ggaggttaagaacatccctggccactgcccactagatgacattaatttccaccatgaggtgaaaattcaaaatgtctccaagcactgccagttttcccttgtaggggacgagggattgttttcagttaagaactactgccctagggagtaaattttgtgaaggggagaaccagttctacctcattcacaggtgtatccctagcacctagcacagtcttgtgatatacaaagaggttcaggaatctattgcatagtccaactctgctactcactgtgggatcctagggttatttaaattccacaaatcacaattaagttcatctgtaagtggaactattactaattcatacatgtttcataaaattatttagaagttcaaatgatatatttaacaaaaagacctcttgaaagacagtagtactttcaaataaaaggtaaacatacaattgatagaacactgaaggtgatctgagcctattgaaatctagaagcttaatttgactcacatactctgtctacactgtacaaattactatatgggatgttattggggcattgtctttgttctcaaggattatgacctaacaggtgttagaatatgattactcaaccataaaacaatagttgccataactaagcataaagagtggttggaatttatgggagggagacattgtatctggtactaggaatcacttaagacctcatgagtgagatgaaatagtcacagagaagtcccaggcaccctactgagcattgtcttagatgatctcattgaatattcactgcaacttgattaggtttaggttttattatcacatttcacaaagagagaggggcctaggaaggaatttgatatgaatgtgaagcatgggagatttcagcagggagagaactgcagtgaagtgtggaaggaggggaagtgacaggaggtgttttctcaccaagggaatagtgtgaacaaatatggggattacatggggtttaggtgagtttgagtgcctctagggaaggtaggttggaatcagattttgaaggattgctaacatctctctctctcttgctctcgcttgctcgctcgctcgctctcacatcacacacacacacacacacacacacacacacacacaccagggatttatatgtataaaagaaacatgatgatgttatctttcctaacagcttcactccacataacaggaagtgacattttgagttcttaccccatgctaagcttgctaagccacaagtatgtgcactgaacactttcaatagttggactttgagactcagttcaattagaccaatctataccatctttcagctagctactgctcttctacttttcccaagataatccttctgaaatagatacacaatgctgttttcattcaaatcagatgtgttaattctactagtggcacttgtgttctgatgcatagaacagaggcattatttacgtgaggactgtgccttccttcttactgaattgcaaaagtatacaattcttagaacacatctagcagttctgaggggctggacacagaaaaccatcttactctgaaggtaattttctctattttatcactagctcaccaaggtgagagtcaggagtgaaatatcctattttcttttcatccattcaaaaaatagtttgagtgtttcctgtgtac

SEQ ID NO: 115427 - DNA, 1049 bp, Homo sapiens
ggaatgatggccggctagttcaagtcactaagcaacagaacagcaaactgcttggtaacaagatctggcctgactcacaggctctctttgagtgacctaggtggccagatagaggaggaccaagacccatcttacctcaaaacaatatccttccatttccactttgccagccttcatgccaaattccacattatagaatagtctctttgacttgagatatttccttttagaatggaaatatctctgggactagaagctaatattgttgtctttcttctcagaaatagtgtttcagagattgttttctgtgattcaatatattatttaaaaagtgtaagctttaataagagcaaacaaagtggaaacatttgagttggtggtctgacttttggttttcgtaagcaaatgtatacagggccaaaactacctaccttcattgggtgcaatctttctttccttgggctctcagactgaatgtgttgacatttatttgtcattttctatgttatgctgtcttctagttcatgtttgtatttcaagtatgtagctggactgtaagttcctaaaaagtaagaaccggccgggtgcggtagttcatgcctgtaatcccagcactttgggaggctgaggcacgtggatcacttgaggtcaggagttttagaccagcctgttcaacatggtgaaacctcgtctctactaaaaatataaaaattagctgggcatggtggtgcatgcctgtaatccgagctactcgggaggctgaggcaggagaatcgctggaacctaggaggcggaggttgctttgagccgagattgcaccattgcacaacagaggagataccatttcaaaaaaaaaaaaaaaaaagtaagaacctccacattcatcaatcattgtatccactgtgaaggtacaagtgccacctgtataatatacattcaataaatagttgttttttgatcgattgagaaacataccttctgttgctgtgtcttttatgctgaacacccagggggatccatacccttccagactagaagtcctggtgatg

SEQ ID NO: 115428 - DNA, 1084 bp, Homo sapiens
taaaagccatgtcacacccaaagacatgaccaacctcaaaaatttggttttaagtagctagatctctgactgggaaagtgttattgtccccaggattttaacacctagatggcatttctgagtttggtagatgtaatggccataagaggagtgagacaaacattgactttttctgtcttaaagcagttattgggaaatgatggcttctctttgaggaagattttctttttggaaaaaattgtgagcaacaaacagtgaataaaagaaaggcatgaataaacactgggagatgcactgaaggagaaggttggctcaaggccaggcatcgggtgccagagcaggagagctggcatgagttcctacggagccaggaccagaatttccgtgtccagtgtcccttttggttgcgctgctttatcactgcagttcctaaattgcacccattgctgaatgagtggccctcaactcagctgtttgatttcagtctgagtggagcaacctagagttcagctggaggttatctgaactatttagacatgtcgggatgtaaggaaggcaggaaatcccatgaaaataggctttcttctgacatttctggcacttccttttctggtgctgtttggaaaaacttcatgagcacaatttctatcaatatttcattttagtgtatcaggtcacagcccagtaagaaaagcataaagagagcaatggaaaccagaaataaaaatcatggtatcgattttcagtaactcagaaggaagcagtttcccctatggactaaaactatcaggcaagggagttggaaagagtatctcaagttttccatattggttgaatgagccccaagacgttcataatatccacaggcatcttttgacaaaaatctcatttgtgctttcacagtttgtgctaagcactatggagaattttgaaaatatgtttcaaattgttctgacataaatataaatatatttgtatctaatttgttgctagtacagtgttctgcctcacagtttcctgctcctggtattcccctccattcgctatgcatacacttaatacctactgagtctaacatgtttat

SEQ ID NO: 115429 - DNA, 1036 bp, Homo sapiens
ggatttatggccaagtgatctcccttaaccataaatcccacaaatgtccaagtcagggcaagaatcctggagactggtactaggagtggttgaggtgggtggttctcaaagttcaattcctattgcaagttcctacaagaaaattggatgccagatgtcaaataagaatgcagttttattcccatacgtacgtagtggcgtttctttgattccttaaaccaatttccctgccagcttccccaacagctgaggaaagaaaggaccagaaatgaggggaggaaaatcatagtttgctctgttttctgcatgatccccacttggacagagacacatacagtgtgtgtgtaatggtggtgtgtcttcataaagcccttcctcactcctgactttgatatacagtattcataatcttaaacatgcctttccaaaggaaagaagaaagggattaggaattctacgcagaaagttgcaggctggtacttggtagtattgttgtgttctttgaatttggattgttagaacattttgccaatctttttattttctttgtgaatatttttatcttctttataatgggtgaatttgtttcatgcatatgcttccatgtatttttctggaggattcctcatcttttcctgctcttggaaaaaaaaaaaagaagaaaaacccaaatattaaaacagaccatcatgtgagcttatttggagtatttggagtttctgcctgagtagaggccattccaaactctgatcagtgagtccaagtactagggtctatgttacacacttagataatttcaggtagtagtaggttctatacattacatctacattttgataagatgagtataaattatgataaagaaaacataacaaaaaagaatgagtgtgttagttgagaaactgtatgactaaataattttttacagttttgccataactaactaaacagtatgtacgttagcaatgggagggaaaaaaaaagcagaaacaaggcttttaggaggaaagcagcaaaaagtaaaaggaattaaaac

SEQ ID NO: 115430 - DNA, 1034 bp, Homo sapiens
actgggttgtttaaaagcatgcccagatactgctgggtgcggtggctcacgcctgtaatcccagcactttgggaggccaaggtgggcagatcatgaggtcaggagatcgagaccattgtggctaacacggtgaaaccctgtctctactaaaaatacaaaaaattagccgggcgtggtggtgggggcgtgtaatcccagctactcgggaggtgaggcaggagaatggcgtcaaccccggaggcggagcttgcagttagccgagatggcgccactgcactacagactgggcgacagagcgagactccgtctcaaaacaacaaacaaacaaacgaacaaaaacaaaaaaaaagcatgcccagatacaatcctaaagtatgcccagatacaatcctaatgcaaaattttatcagatggaaaagtatcaaaagctggaataaatagaaaaaggagttcatgaaatgtattcaaagaaattttaaaaatagctcaggtacagaatctgttaaagcaacaaagcagacacatgactcttcttaatcttccacacttgactccacggcattaagttaacacttccttagtctcctctgagttgagacaaatttcctgaaaggaaggttgacattccctggacactttaaggatctgtttgtgcctcatgggtataggttgtaaaagttctttgcatagatatgtcagcattttagtgcattgtttggctccaagtgacctttcctccctgcatttcctcatttgccattcatcttcttgcttcccttcgtctgccataatagtccctggggtatagtataagtgcttctagggcactcctctaactgcacggttattgttactgcacaattaaaggacttagatattgaaaaatggtagtgtttggaattctgcaatctcattccttaggggcagggaacaattggaacacctaaaaaagggtcagagtccagaaccagattcaggagagagttcagctttcaattgggttggtccatttttcagtgctgcccgcacgagct

SEQ ID NO: 115431 - DNA, 1260 bp, Homo sapiens
agtttcagaaatcctatcctgaagtctatcaagaacgatttcctacaccagaaagtgcagcacttctgtttcctgaaaaacccaaaccgaaaccacagctgctaatgtgggcactaaagaagcctttccaaccatttcaaagaactagaagttttcgaatgtaataatacttccacagcaacaggtgctagagaccactgttgttgttttgagtgaatggtggttaggagaaagactttggtggtggaagaaagaaaagcataaaacaaagactactgaaatatagataaagattgccttagtttttaaaaatgtttggccattagtatttttataaaactcaatgctagttttaaagtgtataaattggttaaaatttatgagtcaaatatatagtgataatgttaacatgtttgtaattgctacagaatttaagggtatttttatctctgtgctttctttttcatggtgtttattaaataattgtgtatatacatcctagctactgatatctttattatagccttaagacttaattttaagtcttaaaaatagcgtgtatacttgaataagaaagacactgggtactgttactgtgatgctattgacttagtagccaattatcatttctcctgtataaattccagtttttattgctgcacataaattttttaatgtcttatattgtgatagctatgtcttttattgcagatttattggatgttatgacagattttactaaagctagtgtttttataacatatatattagttgatgtttacctataagtggagtagattttcatctgcctgcaatggtataatttcagtcttagctaaaaatggaaagttgaactggataaattctttgggtacccttagacctctgattctaagtcaaatgcaaatgggttaaataaaatgagactacttcctttataaatatattttcatccttttgaaagtaagtgaaatgtaaataaacttattttttttaaaaatgccatacctcgtgtttcttttttggcatttatttagatcagttagagagcatcctcaaatgcctttgccaatggtcttcatcagtcatttatttctatgagaaaatgaaaagtaagatttgggcttttgtactgactggtctttaggtgagcactttgccaattttttagcattgctttgtccttttgtaaaattgtggtgcacttggattatggagcatctgaaagtcttcctctgagcgcaattacccagaaagctg

SEQ ID NO: 115432 - DNA, 1004 bp, Homo sapiens
aaataataatattttgaagttatggaaatacttttacttttcaatatagagtttcccccaatcaaattttgaggactaacatggcattgctacggtacaaggagatatcctgtatttgatctaaactaattcttataatttatttgaaaatatgctatattctttcactactaatccttttgcctcagataaaatacccaggagctgatatggatatcactttatctgctccatcattttgccgtcaaattagtccagaggaatttgaatatcaaagatcatatggctctcaggaacctctggcagccttgttggaggaagtcataacagatgccaaactctccaacaaagagaaaaagaagaaactgaagcaggtaaaaggatattctttataagccattttttctcctccctactgtttttatgtttttttttttattttaataggcttcatgtaaatctcatcttctgagccatagcagttttctaagtatattagttcatacattctagaagtctcactgatttacacacttgtggtcagtatcctagatctttattcttcagtgtaaatctgttaccattgccaaactcttcatttttggagctattctctaatatttgtcctttgttttggtatgtggcatgatgtgaattagcagagcatctgctttaatctcagagaagctatcagtgagggtggatttcttttcatgttttcaaaaggcaaatcagatggaattcacaggtgtaaaatgtttagagtttaaaagccgttggttttagatagccactatcaaattagtttcttgcctcaggtatcagtacaagtttttagttcctcttatgttagggaacacagcttagggttccagcgaatcgtttttaactcacaatatgttacttttgactattcataaaggttgatccatgatcaggtgagtggtttttgtttttaaagactgaactctacatagttggattcagggaacaccgtacatgtg

SEQ ID NO: 115433 - DNA, 6789 bp, Homo sapiens
ttcttaagggaaaacaatttttttttgttttgtttttttgcagagagtgcctagtttgtgtgcttgaccagacagagggcttttgcccatgttagtccaaagttcttgccaatggtgctatctgctctcagagcccagggcttatggccggagtttttttttttttttttctcttgagatggagtttcgctcttgttgcccaggctggagtgcaatggcgcaatctcagctcaccgcaacctccatcttctgggttcaagtgattcttttgcctcagcctcctgagtagctgggattacaggcatgcaccaccatgcccagctaattttgtattggctggagcttttaaagatgcagatgggccaaggtaaggatgttgaattacctcaaaacataatgactgttgctgcctaccaagattgtcagaataaagtggagttaggtactcattaaaggtggaaatttagggaaatgcctaggtattacctggctgtaactaaatacacaagctatttatttatttatttttatatttatttatttatttatttatttatttttttgagacagagtctcactgtgttgcccaggctggagtgcagtggcatgatctcggctcactgcaagctccctctcctgggttcacaccattctcctgcctcagcctctcgagtagctgggactacaggcacccaccaccatgcccagctaattttttgtatttttagtagaggcggggtttcaccgtgttagccaggatggtctcgatctcctaatctcgtgatccgcccgcctcggcctcccaaaatgctgggattacaggcatgagccactgtgcccggcctatttgtttttattttttaagagcatttggaatgatttatttccaagattcacgattgcagataatgtatggtcagcaagtggttgcaaaggaagtctgctgtatgtgtctgacttggaaggaaaaaacactgataagacagtgggttctttggcttcctcattcagaccatgcatgccagtgcttctgtttcctccttcttggcccttgcttggtgtctaggcagattaaattcttagaagggtactggtcacccagagattgcagatgtgcaaaagttggcttttaaagtttagcgtcccataattggatttttcactgctgcagactctactgcatgccactctctgccatttgcctatacctgtccatggttgcctcttctgcattttccttggtagtagctttaagtctctgtctcacacacccaacattgtgcttcctggatttgtgggtataatttgcgaatgtaaaggggtgccctgtactatctatttctgaggcatagtttcaaataaaatggtattttatagcctgcattaatgtgaaattactttcaattaggattctgagtaatttacacataatgtttgtaaagtgaaggaaaaatgtcaagcatttcactaacaaatgaaagcaaagctcacaagtctctgccagaaatgaattccaagaacactttctttatcatttctcttttcagctcacaaatctacaggctggtgatttagcctgggcagctcttcaggtctcagctgggctcactcccaggactgcaggctattggtaggggcctcccaggtctggaggttggctggggtgactcagttctgctccacatgtctccctccagcaggccaaccctggcatgttctcacggtgaaggcagagcttctattggagtacttgcctacagctactcttttttcccaagcctccagcatagctttcttgtgtgcttcccaagtctacttcacagtttctccacaagaatccagtcattttacatggagtagagagagagtcttgcagatcctctccttggccagaggaagtcaccagagtaaggaaggagagaagaggcaaggaaggcagcagggccagctcctcttgttaaagtgtgaacactaactgaacagtacctaccatagagaaggcaggagagtaacttcaggggtaaggagtccaggctctagagagaagcagacatggattccagtcctggcttctgcactcactgtgggcaagttatcccctagcctcagattcttcagaagtgaaatggcataatgctattaactattgccttaaggcctttgtgaagttcagatacacacaaagagcttggcacagcagctggcacacagcaggcactcaaggaaatgattgtggtagtacttaggtgagggcataatgcaggttttaaaaggaatctcccagcctgtggcttattctgctggcgtcaggacaaggacagggacagacatttcccctgacttctcttcacttccagaagtccactggcaacttgcctcagtctcctgtccccaacaccaccacagccacctaaaatcccagacctggatgctgcattatccccacagctgtggaggtctccattccccaggctggcttatataaagtggtaccagggacccagcctagagggacccctgctagtttgccagtggtccctggtggtcacatgtccaaggccctgggtgctgagcacttcggaggccatgggcccttgaagcaaggcctgtgctgggcactgcagaaggcagaggccaggtcggagtagccactgctgtccagctttggtcttgtgggggcagatgcacccatggctcttaggcaggagctggatattctgggcaaagttccgtgtggccgctgggcctgacttcgcagagggggcgctctggccagatgggtggaggttgcaggatttggggctgagtgggaccaggctccaatcaaggcaggtggcctggcttgctgctcagtttgcagcagccgcctttccccagcgtgcctgtggtggtggcatcaatgatcctagcacctgggatgatgcctggcagccgatttggggtgaggagtggcttccaggacacgggcatggagtgctccagccaagcattgccatcgccgtggccctgtgtgctctgagtggcctgggctgccccgacagatggccttttagtgcccctggtgccccaggttcaggcagagggcacagtgcccaggcatgcagtctcatagtgaattaatgaaacagcaacaaaatagacaaattgttccactggtcctttatataggttatttccaacagctttggagagtgagggtgtctcttcatcctcatcagcacaggacatcattcatgttgaacagttttgacattacgtacaccaggaatgggtttagtgtatggggagattcccaggatagccagaatggttagaaaaatggcaaagttcagatagtgtgccccacttattaacttaggacagccactagccaccaaccagttttctgttctgtggatgaactctgtgatcctatgaataaggctgaccacaatttcagtgagaccctagaaccctgtgttgattgactattttatagtagatggcaaggaggaaaatagctataattggaggccctgtactgagcaatttattctatgtaatagaagagtggcccatttggagatatctgtgctaataggacccatatgatgcaaatgagacttatcaggatgagaaataacctggagagtcctcctcatcacttatcctttccagaatccacttgctttccctggcagttgatgatatattgccagtgccttcttccttttcagatctggtttccacatggtccttgcagggagctggagagtcctccccatcacttatgctctccagaatccactctgggtcacatgaagttgacaacgtgtgggaacatgtcatttccctgagaagaaatcttcctcatttctgctgagaagatcctcaggagcagctgatgagtcttcgtcgttacagctgccctcatagatgatgtccaggggctaatcatattcattgattcttgaggctgccattgtctttcatgggaccttttccaatgcccagtaatgaggaagctgttccaatatttcctcaatgggaaggttttcacttgcttttgagtctaccttgacctcaaataaggtctcctcctctgacctgtcatctggaggctcctccaccaggtcttcagcctgagcttcaatgaattgttccccagggtgtattctgttatgtgaccagatgtggatttttttcacccactgcttggcgtgggcagcggatcttctggaccactgaagacacattctcatattctcaaggcaaaattctgaagaaatcataaaactgttcccaccacaaaatgttctttgtaggtggttcatgtctgatgcattcttctaacattatccacaatgtagaggtatttctggaggttcacaccctttcaataacaggagcacaatattctgctaggtacagatgtcttcagcagtaggagttcttgcgctcatttgtcttctgagaatattgttgaaaatttgaacatgtctttttgattctcaaagtcagcaagctgtggatcagctcctaagtgctaaagagcccacagttgcagagttcctgagtgggttgagtgcagtttcagtctgtggctggtttttatttgtgcttgcagaatttctttcatggcaaccagagttttggaaacttctaaaggcttttctgcttctttgttttgttttgttttggtttttggttagaaatgcctttctttccagaacagccatgcttttcagggcctgcacagtgcctgttgcagatgtgcaaggcatcccaagaggaagcaaagccctcactgcttggtggggccaggttgcctgctcttggtctccatgtcctccctttccccgtccaaggccgtcactggcttgggctgctccgttggtccttgcagccgtgccgagcgcacatctcctgatagctcctactctgggcaaggagctgactcggcagtggacaaattgaggcaaccaaataataaacacaaatggatagtcaacacattttttgaaagaacatctgaaagacaaaatggggaatggcgagtctgtctaataaaccattttgagaaaactggatattcatataaagaagtataaagaggactgttatgttgcacaatacacaaaaatcaactcaaaataaattaatgacctaaacttaatatcagaaatgatgaaacttttaaaagaaaacatagggtgaatgtatgtttagggaaactcaaatttatgttcacaggttgcaaaaagaaaaatatgagaaaaacatagaggaaaatgattctgccaataaagtgagttggaaataatttttctgttttcacaaaaatcattgctaacaaaagcaaaaacaagtgtgggactatagaaaactgatgagcttctgcataggaaagaaaagaatgaaccaatacagaaggcatccagtagattgggacaaaattatgggggattatatatctgaaagggttgttatctaacatgtataagaaattaccactactaagtaggaaaaacaacaacacaaaacaacaaataaccagatggaaattgggcaaagaacctgaatagatgtttctgaatagaagacatgaatttgactaccaggtaaaagaaaaggttctcaacatacctaatcatcaagaaaatgtacattaaaactcactgagatatcttctccactctaattggaattaatgttacaaaaaagaaacaaattttttacaatgaaatgatcagtgtggagttggatgaaggggtactattacactactacacagtgtagggtggaatttaagtcagtatacacactatgaaaaatagttggagtttgctcaaaaaataaaatacaactatcatttgctgtagtaatcccaccactgaatatacattttaagaaaatgaaatcagtatattgaagagatacgtgaaatcctacatttcttgacacattattcacagcactcaagatgtggaatcaacctacctgtccaggaacagatgaagagataaagaaaatgcagtgtgtatacacagtggaatgctcttcaccataaaaaattcacggaatcatgtcattgcagcaacatggtggacaatgtaagaaaagctccccggagaagctgtacagaagctgcctcctcagcagtcagggccaggtaccggagctgtttttaccccaggacagggccggccccaagtcatcccagagctgccatggcaccccctcagtcgggtcctgaggaatcctacacaagctacttatatcagtgatcactaggataatccatagaacttttgggaaagaagtttaagacctttctcccaccatttcagcaggataaattccaactggattagaaaatgaaatgttaataatgcaaataagtacatatttatatctgtatataaaatacagttgatatttgcctggtgtttaggtgtctaaaggactttctaagcataaaagcaaaaaaaagtcataaaaatgctatagcagtttgagactctatgcaggaaagggcatcatcacgtgcatggatgaatctgtatctaattttaaacaatttccaatggtgcctgtttccttttctttgaaaatctctggagaaatagttcctcttgctgtgtctttctttaggcaagaatttttactaattgatgtgtagtctgaatcctggctaagtataaaccttttattttttatacctgttcttagtgaaaatgaaactgtgactttttttttaattccttttgttggtcaaaaactacaattaactcttctgagtttcttctc

SEQ ID NO: 115434 - DNA, 1506 bp, Homo sapiens
ggattaggggaggtgctacacactttaaaataactagatcttgggagaactcacagttgcaacagtgtcaccaagggggatggtgctaagccattagaaactgcccccatgatccaatcacctcccaccatgccccacctcgaacactggagattacctttcaacatgagatttgggcggggatgcagatccaaaccataccagccacttactgcctttatgccactggcaaaataagagttttaaagattgtattaaaaataacttcttagatttcattctcattttctatttttataatgttctatagtaaaagtatctgttttggaaactttttcaaaaacaaattccaatttgtatcagttatatttacgatgtcactgctctattttatcacaattattcattttgatctcagctaggcatgaaagctgcttctaaattagtatcggagtcagctgccctctaatatatcatctttagtggcttcagggtggaaaaggatgggcagattgggggaatttattgcctttaggtatcagcaggaatgcactaatgcatatggatggtaatacattaaccttgcctcatccagtcctgttcaagtgaatatatttgagatatcttacatcgaaaactattttcttagatcctttcatagtggaagaagaaagaagaaggccttctagatacggaagaccacagtttatctgtttaacaaagtatctaacatagcaatcctgttagattctgtgggaaaaggtaaatatctacatatgtaggttggatcccagtggggctgacccatcctttaaaccttttacttactttgattggaataggatatcattaaagtattttaaagtaaataataagtctactttgcggagaagctaaaaattctacagtgttttcaatggaagtgatgttcagcttagttaataaacttcttttgaggtttcttcctttgcttgtggcacggttgggcttggtggcaaagctgtatgagagcagttagtcatcactgatacatgagataggacatctaaagattctttaaaaaagacttggcagttttggagatgaaagacttatttgttacttatattaaaaaaattatttaatttggcccagctgtctgacctgcaagtatgactccattgtagttgatcttcatttccaaaatagcaattccttgtagtgagatcagagctcagctgactcttgaatgtggtgattgagatagagtagcattctttactcacactccatacccaacctagagtctgttgagatgtgtagcatgcaataatttggcatattgaggaaaggagggaggcagataggaagcagaaaaggctacaggagcagggtagactgttttggaaaattgagtgacttgtaggctgtataatctgagaacccacactgttcatctgtaggccaaatatggcccacataaattcaccatgaaaacgtctgatttgacctgtgtttttaaaaaga

SEQ ID NO: 115435 - DNA, 1266 bp, Homo sapiens
aggatggtttggaaggagaagaacctgccatgtagagaaatgagaaagactgtttcagtaatttggatgttagatgagagggcctggaccagggtggtccctgtgaggatttttataggtatatgaaatccatttcataggcatgtgatttccatatcattgaatatcataggcactgtgaaggcattagttgttatagtatctcagaaacactaccattcttctgggaattttcacaagggttaacccaaagaagggattctaatgattaatggcttaacccaaacaaataattttgatggaaagagttctagttattttggctgactgataatagtgatatttggtctggagtgccttttgagtctcacagataccacaaggtagtagttcattttcatttcttttgtacggaactagcactacagatataggtgaaaattccctttaaattcgtgaattagtaaaccctaaaacatgggtttaactgaaattagttttgtttgattatagaatgaaactaaaataactcttaagcttaatgtggggaatcttagtagtagtatatggaacatgatcctatgattttgaatagccttttgaagatgaatgctattcattcattctatactatccttctgtatatgaatagtaaccattggtttgtgtgaagcccaaggttctctgagtttaactgttaacattttcattggtttttggttaaaatttggagcctctgagatgcagagtactatggtcttagcttggggaagtgcttttttttcttcctgctcaggcatttgaagtcaatgaaatttaaattacatccttgtctagggttgacaatgatgagatagagagtataaatgagaagttaaacttcccatttctgaactggcaaatcaaggttttagaagttcatcaggccaggtgcggtggctcacgcctgtaatcccggcactttgggaggtcgaggtgggtggatcacaaggtcaggagatggagaccatcctggctaacatggtgaaactccgtctctactaaaaatacaaaaaaaattagctgggcttggtggcgggcgcctgtagtcccagctacttgggaggctgaggcaggagaatggcatgaacccgagattgtgccactgcactccagcctgggtgacagagcaagactccgtctcaaaaaaaaaaaaaaaaagaagttgatcagctaggaatgaacataggaagctagtataaccaatctagtctgtaatatgttgta

SEQ ID NO: 115436 - DNA, 1026 bp, Homo sapiens
gagtggtaacttgccttgagatgttggttgttaagactagatttataaaagttgttgaaagctggggtatactattccctgaatttgtggagttgacaagctctcaaactaggaatgggagaggcccaccaaatgtttcctgtgaacataaggaagcacagtcagcttaagcattttatgcagctagtgcccagtcagcatttccccagtcacttgattaacacttcttttccggcttcttagctcagttttgtgtttttgggtctctgttaattagatcctcacatatgctgcttcttccagtgccccccgctcctcctcctctcctttctcaggcatcatggagttcctgttgtatgccaggcatggtgctaaacacttttgatgcatgcccctatctatagtttagttagaaagacaaacagataaattcgaatttattgtttcacatgctgcaatgtatgtgaattcattgttataggagggctgaggaattaactctgcttgaatcagtcagagaatagtttgctgtagaggtgacacttgagtcttgatgcatcaacaggtgtgtgtcagggaaggaagggagacaggttggtcagggtgatcaagggcgcgggaacccagtaaacaagttaggtattattacacaggcagttgtgggagataaggctgtgaaagaatttgccttttatctctgtgtcctcaacacccagcataatgcccagtatttattgacaaagaagttcaaaggttagtcagtgagttccctttcttactgtgaaggagttaaacaataatcaccctacctctgttccccagttaaggtcgctcagtcctccccatatcaggtgaactgcagttaagtataatgtgagcttagtatggaaggactataacaaacacaggtttagaatgaggcaggcctggggtctaatctcagctttcagttactaccattcatgtgatcttaagcaaaatgctgacactctctgaatctctgtgacctcatctacaaagtaagac

SEQ ID NO: 115437 - DNA, 1095 bp, Homo sapiens
tttttgtttttgtttttgtttttttagctgcttttaaacctaatccaaaggttttgtttaaaacattttgttgcagtgaaaaaaagatatgaagcaatacagtactcttcaaagaagtccaataaagatgaaaaatatcattaggtattttgagcacagacggagatccatgtgataaaatagattccttctgctgggtctggaaagtctggaaaccacctgtaggccctggctttgtcatttattgactgtattcagaagatactatatttgctctagagttaactcccattttagcaagctagcacaggtgaaaattgagtgagtttttgataacttgtcatttaaaatcattaatgataattttcaatggatcttttcagtagccatcaccagttttgctgataagacttcctcacaacccatttgttgtacaaactgtttcaaagtagcaatcctttgggttagtacacttgataccaagtttcattcagttgattattttcaaaacaaggtgatttgttttaatgggttaatgaatactttgctattactgttttacaattaactttgtatatctctggaaagaggtgaatttgtcaatgaaaaaagtattgtgtagttcagtgggaaaaacctgttgtctgttatagtatcacatcactttcttacattgtcatggtttaaattattatcttggtgaaatatataggttagatacttaaatgttcatattattagcacactacaggtactacccttaaatcataaataatattacccattgtacacagtttccagatatgagttagagtggctgtgaagcaactagaggcaaattgtggcacagagaatatccaggggaaaattgattatgtaagcaagggctgttctactttgagagagagacagacagactacataatagtaatatattatataattaatgttatagatacactgaacaataaaacattttctggaattatgaattaattaacaacctggatttctgtttccagacctataaaccatgtaatgaaggactgaaattcgtttggcatacactttgtttctttaaaattgctagtttct

SEQ ID NO: 115438 - DNA, 1057 bp, Homo sapiens
tacaaagcaaacacctctaccaatgatgttaggccaaatctgaagaagttgaaagggaaggacatcagactcaagaaactcagatgccttcttgtgtagtgattgtttgaaagtgctagttacttggcagcagtcagacactagcagagaccacttaagacccaacagaaggccaagtctcacaactttcattcgacacagtgcttgtttggggtagggtaaggtggagaattattcatcacaattccagtaaatagctcctggccacagagcgttacattagtcaaaaatgagtctgagcacaagagaatatgaggacactcactgacagtaggattttataaaacagaattagccatttctatgtcacgtgcccttattcatttggcaaaatctattgatttgttgttgttaactatttttctcattcgtgaaatatcttgtgcttttctgagtcttaattttcaagattttataacttaccaagttaacagtgtgattaagttatcttataagtcaagctagaggctagtctcagaaaagaatgttgcattttataatactatagtgtctaataattgttcttctcctttgtttcttttctttacacaatcagaatattattctgacaatgcctcataagcttttgtttttagaatttaattaattgtaaagttctaattttagctttaatagtaattaaaactagaaatttaaaatatggttcaatggcagaaaaggatataaccattatactgagagagaagatctcccagggggtatttggcatgtatgagaagaactgatcatattgtcagtgccctaaattaagccaacaatttcatatatgtgttaagttaaaatcagagcccttggcttttccttttcagatactgttttaaaagaagaccttcccaccatcagactgaaagaatgtcagtataatctttataatctttgaattacacttcagatttatcaacaataggctctttcttgtcacatcagccttggatcactttgtgggtgtgttggaattaaggcctgccagattgca

SEQ ID NO: 115439 - DNA, 1040 bp, Homo sapiens
atgactttatgaggcctgaagatgagctctaagtctaggatcagtttatcttctctgaaagtttgtgtatctcttgactttcttctccagggtttctgctttagctttgccacttcaagtgcagtccgttcctgaattatgttgtcagcataaaagggagctgctcctatgaaagttcttagagtcatttactgcttttgagtcttgtacatagaatattagtctttttcagtgatgttagcagtgtctctagaaggatggaaaacccgaaatgtctgcaactgcatcagggtttaaagtaatttacttatgcatttgccttcagtgggagtttgttgtcttgccagttattcatattaaatttttagcattttaaataatgtattactataagcttgactttatttgcatttatagattataaactcatttctgttttattttactgaagaacccattaaaagagccagtaaatcctgtggaaaatggccttcagtgatcttacatcgaggactgtgcatctttatgataattggatcaaagatgctggtgagtaaccacatttcctaattgaggttcatccttcctttttatgtcagattctcatatttaataggatttcactggaacagaatgagagactttgcaacttaacagtcccttattactagttaacgaagaggaagtgcacaggtttcattacagatatgtacaaagatggagctacacagatgttcattacaatgtttacagtaaggaaaatagcctagatatccagtgaagggaactgatcaataaatgatgactcattctaacttagtagccattaaaagtgattttggaaggacagtgctcttcagcctgattcttccctaatgctcctgagggaaattacagttaatgccaactcttttttttttttttaagacagagtctcactctgtcgcccaagctggagtgcagtggtgcaatctcggctcactgcaacctccgcctccctgcaacctccgcctccctggttcacgccattcttctgcctg

SEQ ID NO: 115440 - DNA, 1032 bp, Homo sapiens
ttcagcaacacttgaactggtctatgccttgttcaacaagcatcacatacttggatgtcacagcaatgtcaaattgctataaacatttctaaatgcttacacttgatttctggagttagctggtaccaatctagtaagaaaccatttgtgcgtcagcaccagtcacaggccactgtcctagagtgtttgctatagatgccatggtagaagaggggacagcttatgtcaggggctcagaagagactggacagtttgcctgggtggtttagctgtaaggggaacagaaagcatgttagaggaaggcagaattatgaaaagtgagctaggcttcccagccagccgaacaaggatttttagtcatgaagagaaactggagcatagatagagggggaaggaggagcacttgggcttgctgagttggaggatagaggggacatagtggaaaaggttgctgttaggcaagagatgaagctagagagtcacgtggggttgagatcattcgttcagcgaatactgtttggaagtcaaccatgtgccagaccctgcctaggaattggggttagaagtccagcagggacagttttgctctgctagagattagaagggtgctaagcgtcaccacagagttagactttttagtaactgtaggcagactttgaaggattttgaagtagagcatggtgtgactgctttaatccttgggaagatgactctggtggccttgtgtacagtggatggctgttcatttaggaaagttagttgaaaggtgatttcagtaatcttggccacacaaagacggaagtgaactaggcagtaattataattattactcaaatttaccgagaactttgtatagggcttaaagctacagcatactaaaaacagataattcactaggcagacaagagaacatcaacacaagacagacttatcagtagacaaacttattagttcacttccttctgtgtgtggccaagagatgataaagctcaggaagtagcagtcaggggttgaggggaggaagtggagttg

SEQ ID NO: 115441 - DNA, 1048 bp, Homo sapiens
taggctctggagaaggcttcctcccctttactaactcatctatttcacgcccttctttcccgttttccttctcggaggaggtatcacccttgctccagtggagggagaatgctgccttgcagggcttctgaccatccccctcattttctcctctagaccttcatgggttgttccttcttgtttctctctattacttcatcccctcactgtaaaaatactccaacagttatcaccttaagactaataaagcttgattttgcctctccttcttctcttctagacttcaccaccaggcttcgtgaacaagacctgttcaatgcctgctattaatcacctgcctttgcattttggcttcagccttatcattgcttaatttcttcttccttccagtcacagaggcttccaggttggctgaatttgctgaagaccattccactctatgcactgaacctctctgatgcatttgaccctattcatccctgcctccctcttcagaatttttcccacttttgttttcatgatcctgcacgtactgagttctcctcatgtctttttgactctttctttttttgtctcctttgtgagattccatcttttggccttccccttaagtgatggtattctccaggcgtttgtctttagaccactattgttctcatgcatctattactgtggttttcatcaccaactagatgtgaagttccaaaagctgtatccttagccttgaccttcctcccaagtgcctgctaaacatctccacctgaatgtcccctgggcttgtcacattgggatttactttaccaaactatctctgcccttgttcaggcctataatgatttctcattgggatgatggaattaaaccccactcggtcttcttgctcttaggctcacccatcacattcatcctttgcatagctgatttgcctatagctaaagcttgcactaaggggattcttctggtacaggcttggggttttcagtgggtagcactctggtgacctgtgtggttgagctcttttacatatcgagcttatgaataatatttc

SEQ ID NO: 115442 - DNA, 1036 bp, Homo sapiens
gatttatagacaactgggttcatgtgttcattaatatttttcatggtaaatataaaagatagagggatttatgatatagacagattttctgtacttgacatgcaaaaatcttccatgtaatgagaaaattcactcattttttgactatattaataatatatgctgactttagaaatatagagaacttctaacagaaaataacaaataaaaaaacttataacatcaaagaaaacagatatcccttataatcttaccaaccagaaataacaattgctaacattttgataaactgctttgcggcttcttgtagccttttaaaaaaggttgttaaagtttttctctaggaaaagaattgggaaatatttagatgaggaacaagaaccatctcctagtatgctttttttttgaaagctctaaacataaaatataaacctttccaacatgaacattttatttctttcttaaaaaactcttattatagaaatttctaaacatttataaaagtagaatgatgtaatgaactgatatactcatcactcagaattatggctaatcttatttcatctgtaaatattccagtatacctctaaaaataaggactttaaaaaattacagccataccattatcatgcctaagaagttaaaaataataacttaatgtcatcaaatagccaatcaatctgaacatttttaaaaaccaccactttgttatgactaaaagtagtgagagattcttgggtaataggatgatacggagtctaagtagcaaattatataaatatcacaagaaaagttttaaaacaatacgagtaacttatttagctgtgcttattgcttatagataactattaatacattagtaaacaatctgtcattttatattttaataactttgctatttctttattctcatggtttaaattcaaaatgcagtgttcacctatgcctaatgatttttttaaaactctcctatgcatttttgggcttagcgcagggaaaaagtatgatctggatacataaaagtcagcagtgtgac

SEQ ID NO: 115443 - DNA, 1014 bp, Homo sapiens
aaaagtattaaattcagggaagaaaactaacgaagtttaatcataaacattttttcttctttgcaaagaatatgtgtgtagttcttaatgtgctacctagaatcactgttgtaaacctcctgggtgcttagaattattacaaatcatttattataatacaaatttttctatcttgctagctctatcagcaacatcctcagatacagaaggcatacttcttttgctgccatgtggcttcttgttttttgtttttattaaaagtaatcacaaaaactgcaattacttttgcaccaacctaataattagacaattaaaatttcaaaggaagggggtaaaattaaagaactatgttgcgacctctcttagttctctgtgtgtaggacttttcaggtgcccaatgtcctcttgactgaccactcctcatgaagatactggtaaactttgtgctagtggattgataaccgctctccgagttcatgctcttctgaggtctagaaagaaatgggtgtctctgtcccaacctggttagttattctgtctctaaaaacacaattaagtcaatgttaagactaagttcattaagctgctcgtgtttttatgccttgacagtttgttaatggtggttgcataagttttacagaactagtttcgtcttgttgcccaggctggagggcaatggtgtgacctcagctcaccgcaacctccgcctcctgggttcaagcgattctcctgcctcagcctcccaagtagctgggattacaggcatgcgccaccatgcctggcttattttgtatttttagtagagacagggtttctccatgttggtctggctggtctcgaactcctgacctcaggtgatctgcccgccttgacctcccaaagtgcagggattacaggcatgagccaccgcggccagcctgtagtcagctctttaaggcaacaatttattggctcaggtgactggcacaagccagttttcttttgttcatttcatccattgtggcaaggattagc

SEQ ID NO: 115444 - DNA, 1025 bp, Homo sapiens
ttggataaagtctggtgttgtctgtttcaaatgaagttacattatcttatattgtatatgggttgtttcttatttttgttctgaaattaacagttatacattttcttccaaaataatgtaattgctatttatctgatatatttcataactttattgtgagcctaaaattatgaagtagaaaaaacagaatcttcctttttctttatcttttttttttttagactacaacaaaatcacaattaaatccggcctttgaagatgcctggagcagcagtgatgaagaaggatgaatatcatctttagtacctttttgtctctgctgaaactttttaaatgagactgtgtttttttcaactgtatggtctattcctgacagctaaattagccctaaatgtgggtaatatttttcctcatgttttaaaatgaggttaatatttgcataaaatcctaaaacagacttctgtatagtttatttagtcaaaatgtgttccttgatcccagatgttgtggcctgggaaagccctcattgctacagtacaagtaacacaagtcgttgtacctcagttgtgaccttcagcagattttatgaactataagatgcagtctcagaggatcagcaagtggaggccatcagtattgactttctcttacttgctgtactatcagcctgctcgtttccacctttaagaatgattttgccaagaatgattatatcaaaaatagtagttgaaatggtaacatcaaaattattttattctttcttcttcatgtattcacatttttcagtggtttcatttaattaaccatgctttatgttaaacattttggggctcaatgtctcctactatccaaaatgtgcatcacaggaggcttttaactttgtgaaaatcccatgtttgctttattttattttaatgtcagaaggcagtttgcgctaatgcttgaactctttttctgtgaaactcattaaggtatgaccaaatcctgcctcattaattcaagcagaaaatatcctggcagggaat

SEQ ID NO: 115445 - DNA, 1157 bp, Homo sapiens
tctgtctctagaagcctttaacttgcctttgataactaccaaaaatagccctgggaaaacacacacacacacacacacacacacacacacacatgtctgtaggtggataagccacatgagggccatgcttcctaatcctactatggaagcccagtgtgtaacctattaaaaattttaatttcagttgaaaactcaacagaaaagcaaaattatacttcatcataaattatttttgtatggtaagcaaagaaacaaaaataaatgaaaatcataatcagttgcatacaaattatttcacttttcagtgaaataatgatatatgaatgcattacagtattttagaaatacattttattgccaaaacaatcacaaataaatattatactggtagtatgataaagcagcagtaaaaatgttgtagatggatgtggtacacattaccatttgagacccactgatcaagtgtcactactattatttcagttttctctgcaacatctcctcctagtggacatgcagtctgtgcttgaacatattcatctatatctcaccaggttgtcaattctactgacagatagtgtcaatgttatagaaataatgaagcatgagtttagaggggacctagttatgagtttagagaaggaatagaaccaaacttaacatctacaaggatatttcttgataactttcaaatttctgactggtaattagtggcaactctcaggttgtcagcaagtgattatacattgacacaagtgatatgtaaaacagttatgtattgtgtgaatgtcaaaacaaagtaagattcttagtgagaggtcaggtttaaactggaataaacctgccctatagatctcaggcaggaaaaagtaattaggagttatagataggcttgtcttgaccagaccagcttttagaaaggagggtcaaaaggaagccagattcctcaaaatataataaaacagtctgccaactaaataaaaggatttatagttaaagaccataaatcctgtccctatcatccagtgttcttcctttctttagatagaattaaattcatcttctactttggatatcaggagaaacacccctaagggattacatcttgattgatggggaggtaactctcatctgaagaatgcatttgaaaggaaacc

SEQ ID NO: 115446 - DNA, 1049 bp, Homo sapiens
tgaatctgttactagtgattggaagtatatcattaacttggaaaaactaagctattaaaatacaatgatttgatgtgataaaatggaatagaactgtacatacatacatacacatttaccaatacaaatttcctgggtttgatactgtgttttagttacctcacacataatcgttggggaaacttagtgaagggtacacggttctctttatactagctttgcaactgcttgcaaatctataattatttcagaataaaaaataaatgtaataatagaggtctcttactactaaaatataactgtagttaaaataacttttctaaatgtaaacattaaaaatgacaatgtaattttggcatatatcttcatatttctgcatggatacagtgaaaatgtcatgattactaatgataatgtcttgtttccttttgatgatgacttatgataaaattatcttaaaccggttctgtttttacagttggtactagaggacccaaagtacaactttgtgacttgaagtctggatcctgttctcacattctacagggtatttttattttatttcaaacggcaactactttgagtaaacgattcaataaaaagaaacgttactaacagtgtattctttgtaagtgacatgactaatgtactttgtgctggttgttgagactcagcagggaaataaagatccttctgtgcattattcttataaaactgaaccattgaaaacacatttatatgaacaatgatcattggggaagctcaaacaatatgaaaaatagttctaactcaaaaccttgtgttatttctacattaaaaagactaatgcaactcacatcagtgtacttgtctcatatgtattatttaatattctggctaatgagtaaacattgttcttaatatttaggtacattttttctcagtaaaaatattttagaaaaatatattgaagtaattctttggtaaaggtgtatttaaattattcttgctacttttatcagtattagattgtctaattctaaacaatgaaaagatagaatataatttat

SEQ ID NO: 115447 - DNA, 1050 bp, Homo sapiens
ttaaatataaatgaaaataacagaacatatatagtaacataataaaatatcctattttaaaatttaaacttaaaatataagtgagcttttatttgttatcactacattaaaaatttgtttcatttaaaagtagtatcactggaaaaatctctgtagaagtcaatattcttaggagcaaaaggaaatcaatctgcttatcttaagcgaaatttattggaagaatatttagtatctcacataactgtcaggaagatgggagaatcagacttagaaaatgagcagaaaacaaaagaagtcaggatagagaacacagtcagggtcacaccacaggaacattagtttgggttttgctatatgtcaccaacgcagactctcaactcctcagctttgaataatggctaactctcctaggaaaagagaatgtctagagtcccttgctttctgtaagaagaggtagagctcttattttcagtaaaacaaagggcatttcctctaaataggagtttgaatgctcatcagccaagaaaaaaaggcacatgttccctacaatccacccatttggctgtccagcatgcgtatacacctttcttcccataattactgttttttaaaaaaatgttccagcctaacctaatgcaaatcttcactatacagccaaaaaggtgatcatcctcttccccaaagggtgatgatcctaagttgatttagttaccacacctggctccatttcaaggtcatgttcatttttccactagtttaatttatcctatatcagtattatacaatttgtggactcaatgatatagttaacctataaaaataataaaggtaagagaggaaagagaaaattagttaaaatatatgaatatttacagagaaaaaaaggaaatatgagtaggcactatagttcttgtatttttgcagctgttttaatgccagagctggcacttaagactttccttctttgtgttctcattccttcagatagcaccacaaatgttttaaggtcccaaaccttcatcttaaggaatccaaaagcatcacggttgt

SEQ ID NO: 115448 - DNA, 1040 bp, Homo sapiens
gtaaactctgcgaagacaggaaccatgcctgccttgttgacagttgttttagcagagtgtctaacattgtaggaacttaaagttgaatgaattgagtgaatgcattcataagagaaggaaggaatctaacatttattgagcccctattttttgccaggtactataaaaagaattttgcacttttattatcaacactgtgattcaggtaaaaatgtccccctcctttacaaatgttgagtcttagacaggtggtataacttgcccagagccaaatagcaagtgtcagtaatagttggtttgtctaattccttttttatttagcatagtcataattaggacatttaaaataactttgtaatattttactttcttaagaaatctcttttgccgtcttgtttctgtcaccctttctttttgaagttatggaagtaaacttgaaatgatcacagaatgaatttttttatattcattcttgtattaaatattaagaaattttagtttatgaagtctgtgttattgaggattaacttattataaattaatgtatccttaatacatttgagtgtttgcaaatcagtttttagaaatttgcaatcataaataaatggactaaataataaataaaatgataaattaatgtgaacttttttattatcagcatgttatcaggtggttcagatggtgtgattgtactttatgaccttgagaactccagcagacaatcttattacacatgtaaagcagtgtgttccattggcaggtatgtatttaaaatgtaaaaatttatgaatttgtaaatagttgagtattttttgcatcgaatgcaaaacatgaaaattgcagtcaagtgaatgggtcaagcgaatggttcacataacacatttgcatggctgttccttgacactttcttgaaaatagtaactgacattcaggtatagttttttaacatgtgtcttccccaaagcaacttcagtatcaattttcattagtattttatttttaaaaaacttgtgattatgtccttctttttctttacctac

SEQ ID NO: 115449 - DNA, 1042 bp, Homo sapiens
actaaaggaaacagtttttggtgttatggtatgtttagcatttcccccagaatttttattttatactgaaatattattattaatacattaagtcaagtcagaacagatttgataaacttccactttttacttccagcttccaccatggtctcatctactagtatatgagaaacatcttactttagcatgtggttaaatctaaaagatgagtaataattcttttctttttcctgaccttttccaggctcagtgtaacaccttctattcaaggacagctgggggggcactcacttatgaaacatgcagacatgagcagcaggagatagctgacttttgggtttggatgctggtcaggaaagtaatcaatactgttactccagccagccacttggtgtagtaatcagttgtgtggcctgtgatgtatgagaagccagtagactaccagttggcagagttggtgagaaatatgggaagttacagattatatgtgcatgaaatatatttgagaaatgcagatgaggcatcttttaatacagcacatagagaaaagtctgaagactcttgctacagtgattttccgctttattgcacggtaaaagtctacaactatttcattgtttgctaagacttgtattttgcattaaccccttttgatagcaacaagagatattaaaaggaaagcgtacattctgtggaaaactaaaaaaatcgatgtgtatataacttgttcaaaacacctgttaatatttaccatccaccatgagagctgtaaaggtgtcactgaaaatcagattggaaaccagacagaatacacaaatctggcagagattttcaaagtaaggtgttattttacaaaaagtatctgaaaattacagtttaacaggtgcaactgcagagggtgcatttgcgtatcactctgtgaagcttgaattttcttttataccttttaaattcttctaagttaatttcattcatctttaatactaagttttcttgtctatataaaaacatgaaaccatatctcttcatactctatcagcaa

SEQ ID NO: 115450 - DNA, 1042 bp, Homo sapiens
aaatatgaaacattttaacagaaatggaactaataatggatgagtgactaagctgggttatgtttctaagtgaggttgaaaatatttcatgtaagagaaaaagagttatttgtctccttttgttttgagggttttgtaattgctttatattaagaatagtagtgtcaataataacaataatgagaattagtatttcttaaatactgtgtataggcactatgcctagcatttgttgtgactcgctgtatttgttgaagaatataataaatgagggaaaataatatgtctagtgttgatttgtcaatatcacgtagctatgaaactcaatttgcattctttttgtgtaaaacccagtttctctgcatcagtgtaaatcacatgaaactattacttttcatactccctcacttttcaaagtactactcagttcagcagttcctttctgctgctgtttgaagactttgtaagtgtgacttactctgcaagagttgtaaaagtgagttgacaaggttgcttttgagatttttcaattgaattgggtttggtagagatagtatcttcagaactatatgtcagacttcactgtttgattgtttgaataaatttccattcttataaaatgaattggaaatgtacctgattttttttaaaattaggtttgttatttttacacttaaaaggctgtttttttgcttttatctttatttccgtttaggtgactggtgcctccatcttgtggtccaactcacaaattgcatcctttgctagagattgtgtttacactttttttcccctcagctgaataaatgacagaaaattattttctgttttatttattaaaaatataactccgattaagcatacattaccttcaaagaggacagaaagtgctcaaaagggaccacctaaagcaacctgttcaaggatgaagtcttgtaaaataaattattattgttgatggtagtggtgatggatgatggtggtggtagtggtggtggtggtggtgaatgagagagaggatgaagttcgatttgctctttat

SEQ ID NO: 115451 - DNA, 1030 bp, Homo sapiens
gaacccgggaggcggaggttgcagtgagccaagatcacaccgctgcactccagccaagtgacagagtgagactgcatcttaaaaaaaaaaaaatggagagactgacttataaacaaagagattgtcatttatttatttatttatttatttttgagacagagtcctgctctatagcccaggctggagtgcagtggcgcgatctcggctcactgcaacctgcgccttccaggttcaagtcattctcctgcctcagcttcccgagtagttggaactacaggcacgtgccaccatgcctggctaatttttgtatttttagtagaggcagggtttcaccatgttggtgaagctgggctcaaactcctgacctcgtgatccacctgccctggcctcccaaagtgctgagattacaggtgtgagccactgcacccagccaagattgccttttaaagatgaggtagagattctaatattgagtagatatctaaatgtcccctgatataagttacatagtgaagatttttatttaccttgaaactattgttttcctacacgtactaggaacttcagttactctgttaatgagtacacagtcagtgaggaattcttggatgtaaataagtctgcaacttgccttcccctcactggcaagatttttgaaaagggagtcaacctactgacttcatctctcatctagaattcatctttccataagtgttgtacattgtactgcatttcccatttggattataggcgattgcttgtatagctaggtccctgactctgtgttcttctggacattttctagattgtagcaggtattcagcaaaacttgttcatccatctgactgatatttattgtataccttgtaggccaggcacagttctaggcatttgagatactatattaataagcagaatactgaaaaatccgtggctttactgagcttacattgaagctgaaggaatcagatggttttaaaaactgtcatagttgttacagtgtggtaagtgtcaagagaaaagaaaaact

SEQ ID NO: 115452 - DNA, 1043 bp, Homo sapiens
acctttatctttactttcatcaaccatttgtggcacatattggctggttaatttagttaataagtgacagaacccgaatgtaaacatagatccttctcattccaaatcttatgtttgtttctttctattatctcttccatagaggcagatcattttaagctctgtagaagaaatattgactagggccttgaaggatgaggtttgcttttgtagcatccaaggctttttatgaactaaccgccttccttgtctgtcttatcagtttttcttcttttattatttattttcccaagtgtgtcttctatttgaggttcttaattcctgccgtttttgtctttgtacattatcatttctagggggcatgtaaatcttttactgtggtcttttctactaatccgtatctattattgttatcttcatagtttacagtgatttcctacatttttttaaaaaattgaaaatcgaaagacaacattctgatattttctacattttgtaaaaactctttaacagcgttttcagatcacagaatattttaggtgttataagttaaatgtattctgaagccaaataagttgagggaacaatttgttgaacagagttaaataggttatctaacaaaatgcagaacctattggagcatttaatttgctattgtgcactggaattctccaagagggaaagtagaggtataggggtatagtaggcaggatatggtatgtaacatctcctaatctcaccaaggaatcaaccccctccctcaagagcatctcaagagattaattcattggactgcccagatttatagcaatgatacttagaatactcttgacctgtgacatcagaattaaactaaatcaattaaatttaaagttactttttaaatttcaagattccttggacctaccagtcctactaaaacagaatctttgagaagtgaaataaaatgtcttgtagtttttctttttctatctctttagtaattgggctaattagagctctgttctcagctaattactagtcgtactgtacttcttcaagtc

SEQ ID NO: 115453 - DNA, 2599 bp, Homo sapiens
tgtggcatcattttcagtggtttcctttttcatttcatagcttctgaacctgtttcttcagcctcccaacaattatgtgagccatccaacatctccttttaggtttaaactaagcaaacgtttctattgcatgcagttaaaatcctctactgataacgttatcattggtcttccctggcaggttgtagatgctgtgagggctgtcttactcatcagtatatcctcagtgcctagcatctcgttatacccgaactcaatgcctggcacattaaataggtgtttagtatgttctcttttttaaaaaaaataaattagcagtccatgcctccaatatgaactttcttacctgctctagcatgcttctagctccattaatctactcatactgcttttgataagattactactggtaacctgtttgctgaattcagtgaatatttttcacaactcaattaacgtctttaaagctttgataatgctatttcttccttattctcattttaccattcacactgttttgttttgttttgttttttaggtttctcaaactattccttattatctgtcagctctcacatctttatgttcctccagatttctttcttcagctcacccatccctctggcttcagttgctgtatatgatgatgattttcagaccttatctccacccagacctctctcttgagctttaaatcagtgtatccaactgcctactcagtatttccaccaagatcttctacagaactctcaaattcaacattttttacatgtttaaaattaaatgaattttgttgtttcttcccaacagacaaatattgaagacatagctattacctaaatcatatggcttactctaattttcagccgattcactgaaattaagtaaatatgcatgtgtaaattcacaattaaaatttattctgttattttttccttttccaatctagtactttatgattttttaattagtgtacaattaaaactgcttataatttccaaaattctgcttagtgtcaagactttactattgaatatagacatgttgaataataatatatattagtatttcatgttgagtaaatgtaaattgtagaatacatttggatctatatttctctactttgaaaaatcatttaattaaattttaaacaattttattatttttgtttaatagaatttttagctttttctaactagaatgaatattttagctttcagaaaaatataaaacattttacaaagaaatggggcaaagtaaatgaaaaaatagtcaaacaaagtcacatttatttcttctatagtagtttcacctataatctcatttattcactttgacattttcaattaattgttttgaaaattgtaacaataatttggtttaatcaaatttgtatcttgcttgaactctctaagtagcaattgtgtgaatagcatgacagggcaatttcagttaaaaacttctccaacagtttggttaccttggaataaaaaaaaattatcttcatattggggtactattaagtcacataaacaaataaaaatgattgttagtgttgcaagcattcaaagagagaagttgagaaaattattgaaacttggagagtagcttttttaaaaaaaattaatcagccccagggaacagctgataaataaaaaatatggtagtacaattttgttcatttgaaaccctcaagcttaattaaatttttttttcaacacttaatttatggaagagcaattggagcttttggattttaattttgtttaatgtcttttgttcaaaggtacataaaaagaaatttttccctttataataatttctttcaactctcttaaggtattttaagattttttctgtgttatattgatttaatgctttgtgccttatttggattatattaaagctaatggatttatttctaactagttattcttttttattggacatctgcctgaatgtttgaagattttgaataaagccagttttaaaaaattcactgctctgaattatataacattgaatgtgcttctctagtcatgtattctctgtactgttggttgtgcatcactggagactcagccaagatatcttttggtcctaatgttcctaactttatctcctttttttttttttggtagagttaggaattcctagtttaggtgaaaaagaatgtgtgataataaaataagcattcaacatagtagtttagagaaaacaaagatagaaatttggaaatatactaggaaattcctgagaagtaatttatgtgtaggtcatgtgcaaagcacctttatagacacgctaacttatatacctgaccttggagtaattcctattggagattattgaatttgattgtaggtgtggtaccatgggaaatacatatttaatttttgtctccagtttctggcacacagctcctaaaacccttggaatctctggagtgatgagagtgtttcttgtatgctcatgagatggctggtggcaagtgtcccctagatagtttaagaatggggctggtccccagaaagaccaagacatgattaagatggttgagatttacagccttaccccctcaatctctggagaggggaga

SEQ ID NO: 115454 - DNA, 1067 bp, Homo sapiens
ttcttaaggtggagataaatgcttgagtaattactatgctgtcctccgctattgtggtaggagtctgtgaaacagttctctccccaaagcctgaggatcccagatcaagtgcctctgttttttaatcatctgaatgtcatgtaaagtggtcaaagcttgtagttttaggcatcaacatggcttataaatctcgataataattgagtctcagtttaaaggattggtaggttgttcgtgcctgtgtaaccttgacctctcattgtacccttgatgtatctgggatatccagcacctggtgcctggccacacttggtaagatcaggcctatcccgaagaaagtagtcatccttagtattctcaggggattggttccaggcttcacaaggattccaaaatctgaggatgctcaagtcccttactgtactcgttttctcttcttcatttttaaactcaacatttgcctcaaatcaaaagcatattcctttctctacttttcactcttgcttttttctattcgaatgagatagaggtaggcgtcaaacagcttacaataggtagtaagttctaaaataactgattatgtcctaataagatgattttggaataagacaaattcatactgatgttatgttgacagggtatattagggcaaaataaacacctcagactcagagaattaagcatgggagtcctttctgtattaatctaaatttaaaaatctttgtagaagctttgaactaaaaatgtaaacaaatagattattgattcgggttttctttgggcacacttttttttttaattaattgacttttgctaaattagataactttgtagaatgtttgagacaaaaaaatgaatgtatgattttatgtgaaatttcattatgtaaaatttcagaaagcaaaagtgtgggttttcagtggtgtggtggagccagcttgcaccagcccgttagaactgattggaaattttgtaaactagttgttaaatataaacattagtaaaaattgaagtagctgggcagggtggtatgtgcctatagtctcaactctgtgaaacacacaggc

SEQ ID NO: 115455 - DNA, 1038 bp, Homo sapiens
ttatatcctgttgagagatatccttgattattattatacctctgcttaaaatattttcccactgctttctggataatgtttaaataaacattttattatttaaaaaataaatgtttaaataagtatttaatattctagcctaccttattctatcatactacatatcagccttgttctctgtttccaattgctaacagttttccaaaggccctctatttcatgcttccatgtgtttaattgtattctcccctctgcctagaatgtctctccttctgcttctctcctggctaactcctatacgtccttagaaactacagctctttttgaaagcttctataactgcttattgatatagctgtccctctcttcagcgttcccctaaatttgtcctcccataatgtgtcagcttatagcatttattttactatgttttaatatttttttttctttttgcctctcaactaaactgccttctctgaggtaaaggactgtattctgcacatctccataaccccatgacctcataaacataactggcacataggagatgttcaatatatatttattgaatgaatcgataattgtgatttcattacttgttttacagatcatccgtaagatttgtctactgcattgtcttgttgaatttttaaataggactatgaattattttgttagtaatattaataaaagatgtttataaaaacaagttagtatcttggaatacaagttacttaatgaatttcttaagatatcttttttaaacatataacatttttgcttatttagttgtgaaagaatatggtttctataatagtgtgttatttaaaagcagttctatttagctatttagttgaaaatgattctttggtgaaaaattaactctgtaaatatgtattaagaggaatgcctgctctgttttgattctatgttttaatatttttactcttggcaatatttaatgaaaatgtgtctcattaaccttgaagttactagtcattattttgtgactgcttttgatttatttactgtcttgac

SEQ ID NO: 115456 - DNA, 1042 bp, Homo sapiens
agaacaagttaccttttcaaggaaattatttcattttcaagtgtggtgggttttttatttttagcaaaatgtacaaaaagttctttcttttgtttaatgcatatcttgtggagatttcatattatacatgattttaaaatattcatggattgtaggtgaactgaaggacttaggagtgtgttcattgttcctgcagagttctttgtctctgtgggcagtgtgtacttttaaccataacaggatgccctcagatagctttatttgaaaattagaattttcacaactatatgtaaaaatattatccttattaagaaaaattatatttaatttaatattagtttataaaaagtgagaacattacccagaaaacatgtaaattaaattaagtgttggtctttattttttcacatactcaattaagagtttaagaacatagtgtaactgattacagttgttttgttatgtttaattatatttgagaccatctaatttataaactattgtaattggaaaagaagagtatatatttctgctacctgtgcttaaaaggtacacgtggactttttttttttttttgagtttcagaattttctttaggtgttaaataagcataatcaggctagattacaagaatgtgcttattcttctaggagtctataaatgcttgctttgtcaacatcacttcctattgttttactttctgtatgttaataccaaaatctaccagttaaatatattttgactttttatacattggtttacaaaccaaagcaaaactgttttgtgagagaagtaccactgtgtccaacagataaagtttgtaagtatttggaaaaacgattttctcatttgtgctttcctttcacagcattactcaggcatacacattttaggtcattcatgtaatccagacttccctctctttctttcttccctccttgcccaccccacttgagaatttgctattttcaacattccaaaatatattagcttaactatttaatttactacttattaaaagcctcctttttttcttcttatc

SEQ ID NO: 115457 - DNA, 1080 bp, Homo sapiens
taatttgaggtcatactttagaaggtcataaggagaaatctcagggttcgtgctttttaaaaactgtcctaatgttctgggagaggttacaaggtgccatgtggtaaaagtgttctgcaatgaaataaatgtataaaatgcatactttccaacccttggatgtatgcaatgtgtattcaacatattaaaagctctgaaaaatcttgctataaagaaaccactttttccatttatctatacttggtgaaagaacccatcccctttcccctactcgcttttaaaaatcaaaacatggtgaaaatcatatgaaacttcagtattctataaaacatatctttggaaatggttctataaataatgggaagcctttgaatagttctgaaggatttatgacatgattagaggggtatttttagggtattattctgacaagatggattttagtgcacatgatcatttaagaacaattgttattgcagtaatacaggcacatggtgcaggtctgaagtgaagggtagtagttgagctgcaaaaaatgcagacttctgagggccattaggaaagacatgacagcatgacttggtggttgattgaatatgggtgatgggagggactgaatatgggtgatgagacggggggtgggagggagggaggcgggggaagagagagagagagagagagagagagagggagagagagaaagtcagcaatgttacaaactataactttaaggcctaaatcttccagttctgtgggagtttgttaaactgcaatctataatgtacatagatcatcaaaaataaaatactctaaaagacatttgagaagactaagtgaaagtataaaaaaggcaacataatgcctattctgcaaatgagtgtaaaagaatatatcctgcaaataattgtgcattattaccctggtattaaaattgattgtgattcagagacttagaagagctgtgttctgaccaaacaaggtttatggaccagaccactgggactgtagccagctcaaactgtactcattggtcacacctgtaaatgtagaacttttattaaccccaccccccagaaaaag

SEQ ID NO: 115458 - DNA, 1074 bp, Homo sapiens
tctgtagcccaagctggagtgcagtggctcgatctcggttcactgcagcctctgcctcccgggctcaagtgattctcgtgctttagcctcctgagtagagtagctgggactacaggtgtgtgccaccatgcctggctaattttttgtattttagtagagatggggtttcaccatgttgcccaggttgatcttgaactcctgagctcaggcgatccacccacctcggcctcccaaagtgctgggattacaggcgtgagccactgcggctggcctacctttaatttttgtaggctgtggtaaataattataaatttttacagtagtttagaatttgccttttgtaatatacctaattcaaaatggaaatctattctcgttttcctgttaatttaattcttttactatataaggggttatgcaatattcaaagattaattgtagaactactgtatcataggttcatttaaaaatgtattaatgacttttgtcttataggacaaactattcgagagaaaagaattgtagaagcagcaaataaaaaagaagtagactatgaagcaggggatattccaacagaatgggaaggtaagtttctgcttttagtagaatctcatgggaggtaagttatataacagtatacaaattcaataagagcatatatagttatatactgtttctctttgcaaaaaagttttagtgtctgaatgtttgaaactttgtttttttaacattgcatttctttgaaagttgtgaaggtgctgaattttagtaagcagatgcatgtatagcaaaaagaactattaagcattatcagagctgagactaaggtgaggcaagccaaaatcctaagatgcaaaatttaagcaggcactcactttcatgtagtgacccagcacttgcacaatcctaggatttgaatcctgtttctggcactcattacacacatgaacttgcaaagtaacttaaacttttagttttttcttttataaattatgcataatacttgctgtagataccatttggagtattttttcaactcacaataactctatgataactgactgcctgttaaga

SEQ ID NO: 115459 - DNA, 1018 bp, Homo sapiens
gttaaaagtataataatcaataatgatttttattttaaataatatgaaagtgtttttgcatcaaaatatgtatttttcgctaaagggattatacttaattgtagccctggcacaggagttggcaaactttttctttaaaggtccggatggtaaatattttaggttttttatgggccacttagtcagttacaattactcaactctaatgttgtagcacagaagcagccacaaataatatgtaaacaaatgtttgtctgtgttccaatcaaccttatttctagacactgaaattttgaattctctatgattttcatgtcatgaaatactgttcgtcttttgatgtttttgcaaccattaaaaaaatgtaaaaagtggtaggctaaacttggcttgcaggctatactttgctgacacctgtcctagaagttgatttttctaaagctagaattaacttctactctacattaaaactgaagatatattgctgaaaccttttatagatatatagttcatgttgagttattttaaaaggaagctgttttctagaaaaaaaatcataattatacataagtaactttatttttaaaaaaacttttattttaagttcaggggtacatatgcaggtttgttacataagtaaatgtgtgtctggagattttgatgtgcagattatttaatcacccaagtattcagcctagtaccccattagttatttttcctgatcctctccctcctcccatcctccaccctccaataggcttcagtgtgtgttgttcctctctaggtgtccatgtgttctcataatttagctcccacttataagtgagaacatgcattatttggttttctgttcctgtgttagtttgctaaggataatggcttctggctccatccatgtccctacaaaggcatgatcttgttcttttttatggctgcatgtattccatggtgtatatttaccacattttctttatccagtgtatcgctgatgaacattcaggttgattccatgtctttg

SEQ ID NO: 115460 - DNA, 1099 bp, Homo sapiens
tgaataatagtaataattatactaataacttagacttatgtgccaggcttcaaagtaaacatttatgtatattatcttatataattttcacaacaaccctgaagtgtagatacttttataatttccattttatagatgggaagcctgatgcttagaaaattaaataacttgctccaggtgacacagacagtaagtgatgaagctgggatttgaacccagaaaatctgactttagaatctcataagcactatactatactgtcttccatgtgattctgataacttccctaaaggcagctgccccactcccttcccattgctgcaaagcatccagcacagtacccaggccccagcagccacttaacaaatgtgggctctatctctgcagcccatctgccaagtgttagagctaaggcctgatgatatttttgcttgctggagcaaatcagaaaagaaacctctgtaaatgaaaaacttttctaagtcccttcctttataaattgaacagtaactaattcaaatttccagaataatataattttgatattgtcttgaagtttgctgtattttggtttggcttgtatgccataaatatacccagtcgaatttagatgattaggaggtatgattttaaacatatgaaactgtcccctctttatcttctctacactattatattctcttcatgacacatatcaccaccaaccatatgtttgtgtgtttattttctgcaaccccttcagtagtacatgtgctacagtagagaagggacttaatctgttttattccctgctgtatctccagtacctaaaataatatggagtaggtactcaaaaaaatttgttttatggataaaaatgtttgtgtaaattatgggaaactgacatttaaatattatttttctttctagcttggattagaagaacaagaaagactccacctactatggaggtaagactacacaaggaggatatcatttaggagtatatattcccaaggatatacgaagcttcagaaaaactatgatgtattttctcaaagtgttgattttattccatcacagaaaataacttaaaacattttataataaattaatatat

SEQ ID NO: 115461 - DNA, 1068 bp, Homo sapiens
tgtgttcttcagtgttgtataaggtgaattcacatttcacagagctaatgaggtagacttttcctagtcctaactctattccattagaagccacttatagcaaatactttgaaatattgcttcttttttttatactaacacaataggaaaagtgtaaagttttttgtttgaacaagtggttacatttattgccaatttttgacaaattatatggtttattataggtttacaggcagtagaaaaaagttacaatattagagttcagcctacttcatttttaatatacatactccataaaaaagaaagaggagattctagaaacgaatagagaatggagttggagatggtgctgctgttggagatgatactgctgcggtctaaaaaaaggttgggatggctggataggacaacacatcatagtatcttgtttacttgaccatattctcaaatctgggctgcaggctccaaagacttacttttgttcatgtctaaggttgcttggccctaaaggacatcacagtgactaaatgcatgtgaatttgagatggtggccaatccccatgtattaatttacagtaagaaatgaaattggcacagaaaaaaaaaacaggagactgcttggtaaatatgacattggaataaggggagttaagtaaaataaatgtttaattgcctcaggcttaaaatttcatgttgcattcaccttacaacaaggatagtctgacccctagcaatggaaacatttaaagagaattggctacaattttcaattctatctctgtattagaaatagccttacgaattgtaatagaaaaattgccaggtgctggttaagcctccttttcccatggacagtgtttttatggattgccagcatttgtctctgtgattctatttttttctttgcttctcggttctggttgacatatttcctatgccatgacagtagttatactctggtcagatgttactggccctgcagctatttttttgttttatccttttcctatttctgctctggcttatgatgtgttgatcttatagtttaacattcagagaggaatctta

SEQ ID NO: 115462 - DNA, 1040 bp, Homo sapiens
tcagctgctgctctgcttgggaattctactcccttctcagtatagttgtttcgagtagtaactgcttgttagtgctattcacattgcctgaagtggattttattgttattgctgctgtagtgtttgtggtttatctgactgctgtacttctagttggccacaaggtcacattttccaaattcctgctactgtatcactttatatcctaggttatcctcttaatcccaccttctccaatcccataataagaagggaaaagcttgcactgtcttcataatggtggcgggggtgggggcaatagagtcctgagatccattttaagtaaggggcacttgcctatctgccttcccacagtatccttgcctcttttgagaaacaacaccagtagtccttctgagatgtaagcaacctctttccaagttttggtcagtcacaggcactatggatgatgtattgtaacccatcatatttgtatttgttattgtagttgtgctacgctgtgggtaaattccttaatgtgtactagacagggaatataaccaccattatagcactatttctttggggaaaaaaaagtgttttgggtccaaaatagttggttgactttaactttcttaccttaagctattcctaagttaggaagtccttatatgagtggtgatatattttaagccacatacttggtgattgataggtggcaggtacacaaagaaaaatagagaaatattttttcttacttaattttcaaaagtagtaaaccgagtcattttaccacattgatgtttttaaactagtataaatttccaagaatataaataagtttgtatctatcttttctcaattttcagcgttacaaagggaaggggtataagcaatttaaaaaaaggacttcctttattaatgatggaatatgatatattcttgattagctatttaagtttacatttggatttataatacaactgcactatacaaagtcagattatcagtcaacagtgattgccctctcagatggtctactaaaaaggaaaccaattaac

SEQ ID NO: 115463 - DNA, 1070 bp, Homo sapiens
agcataactcacttgcctcttgttttattctaatagatttcttagcaacccagtactatcatactaacctaagctctgtcacttatttactctttgggtttctactcccatccaggcaagattaaatttatttttgattactgatctagcaggtgttctcttgggcctaaatacagaataccttttggtgatctatgcacctccctcttttttcttctttctttcgtagatgaaaaagggtgatctaataacttatttcatcctggcagttcaacttgtagaactagaaaatgtagtttaattaaacaacttggcaataaaattcgagctgagacatcactatagcatttgctaggcttgaattgtttctcagcatgttacaaaattaacactgtaaaagaatattcaactctgaacgttttgaaacaacaaattcccattataattttataattatattgaggattgggggctgtgtggtatattctgggaggctactttctgggcatgactatctaatagtaaacaaatgttactggtatggggtcccaaaacatacttcatgccaaatttcacttataatctacataaatcgttttgtagtctatgaaaaacattttaattgactcaaaggcaatgtactcatactttaaaaattttaatatttattaaaataaaaattattcactagtatatatggtttaaattatggaaagaaattagtggagctgtcaaggtcaaatttatgtctggtaagcagtaaaaaatgtatgcatttgggtatatttagtaattgaaatacttttacatctttatcttatgtgtactttgaaaagtatgtctagctccaatagatattaaagatatatgtacatttagcttttgtcacaaatgtaccgctaatgtataattttaaattataactttttataaatccggtttctcattttttatatgtaatataacttgaacttcataaataagctatggttttgttcccacagaagactgaaaaagaacccagttacatgggcctaagactgactcctgagccttaacttgctcttgaa

SEQ ID NO: 115464 - DNA, 1136 bp, Homo sapiens
gtccttatgacagagtcacatggcttttttaaatcttctataactttacctctttgaagtgtcactattctggctgtactagatgaattactttttcctaaccagagatactagtccttattacaatagtactaagttgtactttttaaaaaagcaaactgagtgataatggaatcctgagttaactggttgtgtgaggaaactttttcaaaatttgattaaccacatagtcttttctcctgtttttttcctctgtgttctccacccgcctcccccagccccagttttcataagactgctgtgaagatgtttgatataaaggcttgggctgagtatgttgtggaatgggctgcaaaggacccctatggcttccttacaaccgttattttggcccttactccactgttcctagcaagtgctgtactgtcttggaaattggccaagatgattgaggccagggagaaggagcaaaagaagaagcaaaaacgccaagaaaacattgcaaaagctaaacgactaaaaaaggattgaaggactgaacaggctttgcaaccagaggaaaatcatttggaaaattacacagctttggaagaatccactaaagtttcttctttggatttcttgacagtatgatttagtaaatgaaatttgaccaaatggaagaatcatgttagttctgacctcaatactatagtaacttttaggcgtgggtgtagaagtttataggtttctattgacagttattgtaaattagcatttactgtggtacaaattctttataactgacttagtcatttgccgcttagcagtttatatactgaaatgaaaacatcttgtggggaaaagtgactttagattatgaactcaattcaaatgaactctatttaaaatggggtcctattttggacaaaggaaattaagaatgtaaaagtcagaacagtcttgaggtaaaaagtgtgctttggcttaaaagggatacagtatattaattacatcttttattattattgtttatttcttagaatcatttctggctttctcaaaacaaaataatattaatgagtacttctatttgctgcatttttcttattacagcctttgagacagctggtaattataagtcattttccattttt

SEQ ID NO: 115465 - DNA, 1050 bp, Homo sapiens
aagtaaaggacacaaattgtatgatggacccaaaaaaacctttataaagagtaagatgagctgtttgattttgtagtggtgtacctaatccagtaaataaatgagtggcaacatttttagtataaaaattgaaaatctaggaacggatacgctgtgtaagtcagtcagtgagccaacttgtctcccgtatgtcaatgaactaaaaaaattttattattgaaataagtaacttagtaaaatacttgatttccagtaattaggattttcttacagggcatttgcaattgtaaattcaaatgaggaagaaacgtattaagttactataccggataggcaattttagatgtcatataggttgcatatatacaatatagaaattttccatttaaaattttattacaattatcctgaaattgtgacttaaattttgttttattttttgtattctttccaactagccaattgtacagaatttaaaccgtctctcagatgtgtacagtagaactcaagaagacagactaccaagggtcatctgaagtcgtgattgggtcactaataacaccaggacaaagttaagggatcactactcaagcataaggtagatgatttttttaaaaaaattccagttgaaattgtaagtggatgtatatacactcattccctacccaggtattctaattctccactttgaatagcggttgacacaaacatgaaagggagaaaagcctctggggcaaaatagaaaacgtcactcaagtcacataatcctcatttgccagttgccttttccttacactcaaaaaggaacaaaacacatggcatctgttaaggctactttctcatttattaaattaggcttattccaacagaggtcctcaaagctgaaagggcataaaatagcacagtactttttgcttctttggcatattaatgcgatgtcatgactcccttaccctctccttcccattcggggaaatagtcatctctccttctctgcgagcatttcacatgctctgttgcttgtccttttcaaacaccaaatttgctgat

SEQ ID NO: 115466 - DNA, 1039 bp, Homo sapiens
ggcggcggcggcggcggcggctcctcgtcttccccggccgcaacctcggcggccgcaacctcggccgccgccgccgctgccgccgccgccgccgccgccgccgccgccgcgggggccggggccccgtcggtgggggctgccggggcggcggacggcggcgacgagacgcggctgcctttccgccggggcatcgcgctgttggaaagcggctgcgtagacaacgtcctgcaagtcggtgagtcacggggcagccgcgagccgtctgtccgtccgtcagtccctgggtggggggggggtgcccgcctttctcctgcggacagcccctagttccgcgcgcgcccgcacccctgcgggtgtcctcactggcccggacggtcctcctgagcggagcgcccatttcctccctcccttccctgccccccgtcgccccggacgggccagcgcgagtgggaaatgaatcagcaggacgcgcccctccgtgggctccgcgcccccggcccgcgctcccctacccgccctcctccggggagcacatcctggagggctgttcgccggtttcgggggtggatgtggacaaaggcgcgggcggacggccggcctccggcgagggtgtgtgtggcggggctgtgcggggcgggggagggggcgcgggccgcagacaatgccggccgcggcccggccgctcggcgctccccccctctcccactgcctgtcgctcgctcctttttctttctggcccccgccccacgcgatttgaggggaggggaatacacttaaagccgctcggccgccgctcctcccagggctccgacgggcgagcggccgcggcgctcccgggtcgctgtggcgtctggcccgggcgagctccactggccgcccggggtttaaatgtcgttttctttgcgcctcctcagtctccaagcggcgcagaggagaggtggcggcggaccggactccgtctccggagggacatctcgcccgtaggacgcttactaattaaagggcgcgagcctgaggaggagctgctagcgcttccctt

SEQ ID NO: 115467 - DNA, 1109 bp, Homo sapiens
tgggaggccaaagtgggtggatcacctgaggtcaggggttagagaccagcctggccaacagggcgaaacctcatctctactaaaaatacaaaaattagccagagcggttgcgggcgtctgtaatcccgccgctcgggaggctggggcaggagaatcgtttgaacccgggaagcagatgttacagtgagccgagattgcaccactgcgcttcagcctgggtgacagagcgagattccgtctccccccccaaaaaaaacaaaaacaaaaaaaacgagatgcaaataaaaatgagatgccattttcttctaccacattggtgaagactaaaaagacaatacccagaattggttgaagagatttgggaaaaaggattctgcctacgctgctgcttgacaccatctttttctgtctaaggaatttatcctatagataatactgatattagtgtataatgatgttctgtatagtgatgctcattgcagtgtggtttgcaagagtaaaaagctggagttaacctaaatttctacagaagggaagtgcctaagaaatactcagtggaatactatgcaactatgaaaagatgaattagatttatatgtactgacaaggaaagatgaccagaatattttaaaacaagttaaaaacttcatatagtatgctgcaatttgtatttaaaacaaaaatacttgcatatagatgcataaaaacatctgtaagtctacacaagcaatcttggaagtatgggtatttttcgagaaaagcagttaagtgaatggtcaaggtttttgggggggactttaactttttactttatacctattttatggttgggtttttcttaaaactagaggcatatatttttgtaataaagaaacttacaaaaattatccttgagtttttaatttatattgttttggtgtgttcgcatatgtgtgtgtgtgtgtgcttgagtgtgtgtgagggtcctttctgaaggaaggagatacattttaaaaggaatggccttttaaatggcctatttttctatttacttttgggagaaaagaatatcgcccagcattccacataacattctggtaaacacattcttacactcttttcatattcat

SEQ ID NO: 115468 - DNA, 1064 bp, Homo sapiens
ctaagtatgtcctcactgatttttaagatttttatcctgggcctcttttttttccacaaaaatggataatcaattgctgtctcaattctaaccctatgaatgtttcatatggaaagatatggaccagcatctctttctgcttacactcatattcacggttaagaatgtgtgatttcagctagtaatgtgttcagtaataggcagtgtaggaatgacatgttttgttttataagagttgtccctttgaaaaatcacatgagaccagcctgggcaacatggtgaaaccctatctctactaaaatgcaaaaattagccgggcgtagtggtacaccgctgtaatcccagctactcaggaggctgaggcgggagaatcgcttgaacctgggaggtggaggctgcaggctgcagtgagccgagattgtaccactgtactccagcctgggtgacagagcgagaacctgtctcaaaaaaaaaatcacatgactggatctgtactatttccacatgctttatatttttttgtgttagactgtaaattttcttcactgaggcaaaataaatttggtacctttattttaagaagcttacttacatatacatatgataaaacaaactcagtgttagaaatttttataggggcaatcattaaactcaaactgttgttgacttaaactgttatatttaagagcacaaatatcctaaaaatgaaagattataggtaactataaatatcttagaaacaaagcgggttataggcaggtctttttaaaaaggtagtaaacagtatgaaacccacaaaaccgtttttagctacctttcaaattactgtggtataatttttaaaatagtgctttgtcacaacaaaaaggctaatttagtttttgtgatttattaattttttaacatgtaaatatttggggattactttaaattcaaaaccacgaactgtttccctctttaagtgcatgtgctttgaaaaaatcagtatcaaatgataatttggagaaaagtgttactgagtcttgtcttgtgaagagacgttttgtttgtcaatcctacccaga

SEQ ID NO: 115469 - DNA, 1004 bp, Homo sapiens
ttctaaaacccaaatatcatgtttgtaatctagttgttttatgtgagcaaacttttaaatatgtaatatgttagccctgttcctttatgactttgttttttagtgttctgcaagtttccttatccttagcactttggactttttttttttttttggtgagacagagtgtctctcttgtcacccaggctggagtgcagtggtgcaatcttggctcactgcagtctccaatctccacttcctgggctaaagtgattcttctgcctcagcctcctgagaagctgggattacaggcacgtgccaccacgcctggctaattttttgtatttttagtagagacggggtttcaccatgttggccaggctggtctggaactcttgccctcaggtgatccatccaccttggcctcccagagtgttgggattacaggtgtgagccactgtgcctggccaggattttgtattcttgatgccatttttacagttctttttcccttcttcccccaaataccacttgtgtaatttttgtctgatatacgttcagcccagtgaactagccagtcttttcacgattgtggtttatacttttctctagacagtggtgaagctgatgagtgaaatgaccaatggctgctttgtgatgatggcagggtagaatcaagtgagacttgagggcagcaggtgcggaagactgtgaactcaacttgcctcacagctccagtttgttctttctttctttcctttcttccctcattttctttcttcttttcctctgtcctttcctttcttggggatggggtgagggaagggaggagaaaggagtgtgtggtagaaaagaagacaaatcagaagagataagtaatacctactgagagtatattccatttccctcattccctccagttgtccccctcttcctccaatcaccctttagggaaataaagttgaggtcagaaggacctatgtgttacagctgctgcttagctgctatttttagcatggccctac

SEQ ID NO: 115470 - DNA, 1054 bp, Homo sapiens
ctgcctcagcctcccgagtagctgggattacaggcgcccatcaccacgcccagctaatttttgtgttttttttttagtagagacggggtttcaccatgttggccaggctggtctcgaactcctgacctcaggtgatccacccatctctgcctcccaaagtgctggaattataggcggtagccaccgtgcctggcccacattcttaaatcttaaaacagattcttatattttggatgacagcaagttgggtagtttgctgaattattaggaaacatagtgaatatcttggggatagaatatcaagttcattgaactatatcatagtgtaatctttctgtagttagaggttatagtagataattcaaaagtggcctggagatagattgtcagctgacctattgatatcaatgtatctctctagatatgtgtatatgtataatttaatatgatgcatagaacattgtagagtactggatgttagtgggtaagagactaccttttgtatctttaatgcaatttacgttttgtttaggtgagtcatgtaaattgatgtgagctctagcttaacatgccttattaaaaccaaagcccagtaggtagtttgattagtgctgtttagagtttttataagcaaagtgctcagatgactttccttattagaacttgtcagagcagtttctttgcagttttcatggatctcccttagcaacttactaaagaggcattttgtttaagctgtttcataaatagcaggaaattccaaaggcctggattgtattgcatttttgctttcaataatgactactactgtgggggaaaaagccgttaaaatactctattcattttaacaatttgtagcaaagtacttttattttaaaatggatgaattttttaaaaaagtacagattcaagtttcattcaaggttttcactgttttcattaaaattttttgtagtttatattttagatgtgttagacaacaattagtgatataatagctagtaactatgagtttattcaaaatttactgttatgtaattgggtatgaatttgt

SEQ ID NO: 115471 - DNA, 1064 bp, Homo sapiens
aatgagggacagttttttttaatgagaaatcagaatatcctttgtaggattgtagatttctaagcatctttgatgaaggaagcatcagttgtctaatcaaattgaatcaaaatatggagtgctaacagatgtaaaaatactctaccatacactgttatggagtagtcattttgaatttatcattgtttagcaggtatttctagtcttgtttttttggggtgagaattacagagcatttaaatacaaagtctttttttggagtgaaagatgaatctgctagtttgaaaaaaaattctggcaaattttaaatctagaacagccaactactgtattaacagtgccagtgcattatatgcatagtagacattgaaatgtcacttgaatgaatgatagccttagagtatatgccagccctgtgggtgtctgcatgaaattctcttaattgaaaaaaatagctccagtttctaatttctatttgattttctgaatgtgaattgctgtggcatagtctttgagggaggtgaataggaatatgactgctggataagtaggctggttttcagtactgggtttgtcatcaatatatttctccaaataccgtgtagggtttcttttttttttcttctcatttgacgagaccttttctttaagcttgttaacttgctagtagtagcatcaggccaaaagctattctgaaagcaatttatttattagatgattccaacttctaaacagaaagtaacttgaatattcccatatagaacagtacttttgggttacctagaaaaataattttgaattataaatgcctttgtgggattaagtgattgctttttccttctatttgatgtttcatttttaaaagaaattggtataactaagtttagtttttgaaaactctccctctcacagatgatatgcaaaaaaaacacataacttcagaatatcccacaagatcttacacattgtgaaatgacactgtctaattaataggaatggtttgctacactggtctccaaaatgctgatgactttctcttgaggtagaatttgcttaagactcaa

SEQ ID NO: 115472 - DNA, 3600 bp, Homo sapiens
ggacagttgtgggctgacctcatcacttagggtttagtttccaggcttccctgaatatgtaccatggcaagtggaagatggaagaagatagaacaactcttagatttatgtttgtgaattccttatgtcatatgactgcactaagatctacattcccttcttttggaaactttcattaataaatgaagagagttggttagcatttcccccaatttaaagatttacaaataaattattcagaaaaataatttcaaataaaattttaagggcttattatgaactcaaatcttacttgtggttttttcaattgtatttttgggtattctcataaatccttgccttggaaagttgtggtgatatgacccagactacctattccacattctatttttgctatcacagtttaatattttcagtgaagtttagactggattagccatcacatcaagcatttcccccctttctgacctgttagtgtcctttctgcacttctaatttgtaccatagagcgccattaaaaaaattttatatgctatgtttgtacacacatgcatgtgtaagagtggactttgtgtatgtataagagtgttaatcagcttgcaaactttagacaggcagggctcagctcttagaatctatattgcagccaggatggtgttgttcatacctaccctgtgcagaaccttcagtggcgtccctttgttcagaggcctgaagtcattcatgggtgtacaaggcccagcatggtctggcctggaccctcagccaccttctgcacaatgtcctctcctgcctttcagatgtgtctaggctgccctgctacctgcctttgcctatgttcttttttctgtctggaatgctcttctgtgcttggttcatgccctaattgtcatcttggctcagagaaataatcctggcaacaaattacctcctttgaatcctaatcatagttttttgtgtgatttttcttttttggattgtcctctcccatgagattgtaggctccaggagagcagaaactgtaaatatgtgtgtgaatatgtatatgtacatctgtttgtatccatggctatcagtataaccatttgcacatagttgtctctcaataaaagtttgttgaataaatggatgaaggaagtggtgttttactttgggaatattttcataactctccaggaggaggcattgcttttattcagtggttccatctatctattgcttcacacccatcacacaaagaatatgccagtttgaaaaatacagcctagttttgtgtgtttggctactttgggccactcccagattttccaaaggtacacttgcattcacctttatggttagaggcactttcttagaatctgagtttaagaaacggtatgctattttaattacagtaagtactttatcaaggtcagttgtcttagaatgtggatttatatgacatagtctctaatacattctgtttggcatgtattacagggaaaaaccaaacagtcctgtttgcagccaaagattgcaagatggtggtaggtgtgtagttagagcacgagactttcttttgctcacatgcataggtcagttctcttctttcctgtcttgtcagttctcttggatgagcaactgtgtttggtcatgggggcaaggcactgaccttggagctcatgtgcaggtcactgtgggccatagcaagtctgcctgaacttttttttccccgtctgttgatctgtgcattcttgcttatgcttgagctttttttcagtttgtttttaatctttgcttcctcaagttaacataagtagcagggtagaatgatctgccacatgaaagtcatttctgtctcaaagtggtcttggagaaacctgaaatttttcagtgtcttgtttgggatgaggattgggatgagctctcatttgaaacacatttatttgccattttatattgttgcagctcaacatattgaccaccttttgggtagtaccagttctgtgctttacaagcatgatttctagctctcataacaactttgaggagaaggtattctcattctaaggctgaggaaacagatatgttaagtcacttgtcaggagcatctgggaagtctgtgctggacttgaacacctaggcctcccagctctcaagtgggatcatgttgtactttgttttccaagtgttgctagaggcagcttgtctttttgcacatgtgtcattcacagtcctccttggtctgtgataccattcaaatatagtggcctgacctctgagcagtgtttcactacttctgaatgtattatgttttatttttttctctttgataagtagtaatggatgtgtaacccattcacgatatagtaccttcttgttccttggagctgatactacactcagttgagggtgactttttctttgttggacatttacaaataatttcagtcacaacatttagtgacataaatactttgacttgaaacaattaccattttctcgatttttagtgggagactggggcaatgtgtgtaggacatccttcagaaacagatgagtataacaagctgtgtgaggcagtagaggtgcacacacctcagttactggaaggcacaacttcgagttcttgtggattgtgttggcagccctgtagatagattcagcagatgctgtagacattctcttactaccgaattatagcttaaagacctaactcttagagcaagccttaaaatgtgctttccccgctttgttttaggaaactcttctgtttgctgatgaggaaaggttatctttccaggcagcatccaggaatggtcttttgaatgtcttcatgccttcttgtgacctcattcctgctgccatcgtacttatccctgctcagattaactgcctgcgtgttcaactttattccatagttggatctacctgtagcatttgcagctttctgtgtagactgggcacaagttaaaagcttaggaagtctatataactcaccataattttagcactttaacttattaaggtacatgttttggttatctgatttatagaagtaccatgtaaaaatccacctatgctgtacaattgctgaaatactgagtaagctctgcattttatgaccaagttataggatgaataattactctctggagtgaatggttcaaaatgaaataactgtatgccttaggtgtgacgtgacacgagatgtatttaagccccaaaagtatgtaattatcacactactcttgcatagacacacaagtacatttttgcttatggcaagagttttatgtgcaaaagaaaactcactttctggtaagcgaaggaacagtccattatttttgaggggttcataagttgtttggtattagaggctccatttcaatccccctgcatttctttagggtctaatttaaattcatacatcacttgattctagagtaaaccattatcataccctggattttgaatattaaggacagttgagggagtttctcaaagcaccattttatgacttatagtctgcctctgtattcagtgacttattatatattccattcttagactgcattttgatcatcaactgtattaaggcaatatatgttgtactttatt

SEQ ID NO: 115473 - DNA, 1028 bp, Homo sapiens
tgtttttaagcttgctttgcagatgtggaaataggcatggagaaggtaagtagttctcctaaggtcacatagctattatttggtagagttgggatgtgaatccaggcagtgtggtttcagagcctgtgctcttatctcctactttttgatcttgcccccacacatgataattgtttgatttgtctccttactgctgagcacttcaaatgagtggctgtttccattgattttacttatctagcacttatttttattttgacttctgttactggctttagttttttaccctcacctttggaatatctctcttcaaggtcaccactgatttttatagccaatacaatgggttatttaagcttctgtttctctttgatcttttcctggcttttgataacagtagccatttatatggaattacaactttgacttctgtgatgttgaacttgcttgttttcgccttgtctcactgaggcaccttggttttcttctttctctacgcattccttagaccattgccatcttttggattgagtttgaatttaggtgtgttatataagaagccccttaatgttaattttatatttaaatcaggacgaataaaaagatgaaatacatatatattcttgtggtctttttccttgtgtgtgtgtgtttgtgggggaggggggtaaagtcacagaggagtgggagtaggtcccaatgtggacttttccctgggctgaaggagagggacttacttttgaatacctaccatgtgccagcactgtgctaagtgctttaaacacattgcttccttttaattatcctgtgtgagattggtagttacctttattttacaaataaaggtaactgaaactgactttgtgtgatgaaaaagtaatagaagtgggattgaaaccctcatctaactgcttctgacagccaggttctttcctctggatcacctggaaaaatctccagtttcttatctgttaaatgaggaaacttggcaagataatttttaaggcccgtttttcagtatcatcctc

SEQ ID NO: 115474 - DNA, 1007 bp, Homo sapiens
cagcttacatattggagactgtgccctcctttccccaccccacagggggcactgcctgcaaggaaggtgtttgatctgaaccctctgaggccaatcaaatggaaaaggtttagtacaggctaacagcaccagtttacaaggctatccatacaagaatgattacatcaactcgtggaaagtgtcatcatggaatcagagtaacctcttggttatttgaaattgtttgttatatagaattggtaagaataccctgtaatctagtgacatatagaaccagttttgaatagtaacagaactgcctataagattttatagtacttaccttgcacacttctgctgagttcacaaaaggctgactaaacccttgttctcggcaatctcatctctgatcccaaagtgttctcatacttattttagactcaacatattttctaatgaagcttctggaaatagctggtatcatattacggaaacttattattggcacagtgccttaatgattagttggcttggggggtggggagagaccctagctatcaaggatggacgtaaaaatactttgctaatatgagcactgctgaggtttaagtcattcctgaggtaagctaaaatatgtttaaaggttattaaaaaggcacacagtttctcatttaacattttggtattaactttagaggccaagagttttaagtagtctctgtaggatagtttgtttccttccttccttcctcccttccctttccttttccttccttccttccttccctccttccttccttccctccttccctccttccttccttccattcttcctccctccctctttctttctttttctttctctctctccttccttccttcctccctccctccctccctccctttccttctttcttttcttttcttttcttcctttcttctttcctttttttctctcctttctctctttctttcttttctgggtctcactgtttcacccaggttgaaatgcagtggcatgatcacag

SEQ ID NO: 115475 - DNA, 1200 bp, Homo sapiens
acctcagaaactgtcagtctagtaggggagatgttaagatttgcaatattactaaaaatgatttttttatctaatgatgttagttttttagatcaagagttaagtggtgtaaatggttcttcctcttcccacagatatttcactggacatctgagatgtcagattttaccaaaaaacaaactacaaaacagaggctatagcataaatcagattatggaacattccaacttaaaactcaaatggctttccaattgtatttagaattaaataacttctgagataacttctaagaccctaagtgagatcataaccattttttcttttgcatcctctgtacaaaagaacttgaactacatcgaacaaattatgaaacatccttatcattgcactgttatttttgatttttgaaaaagtttcaaagaacactcagatttgtattctattttaaatttgcaaataccctatgaaatcctcccctcccattatttaaaagctgtataaaaataatagaagcaatgaaaccacattttgaaacatgtgcaagatactgggaaatgggaaaagtcattctataccattgtgttaaccaaccatagtcactattttagtgtttttcctccttgtatttcctatgcattaaatgcaggttttcattatttgtacatttttatatctagctctttttggtttgacattgtatgataagcatttttctgttatatacaagttatgtgtaaacataaataattcagtggatttatattttatttgaccattgtcttattttggacatttaaatttgtttccaagttttcattttatgcatgaggctcagatggagtgtctttgtgcatgtggagtaagcactgcccttcactctgcccgtattttctttcgcctttaatatagacttccagaagaggaaatggtgggccaaagggcatgttggatgtttttatggcactttctatgtattgctaaattgcctaccagtttcacacaccaattgccagcaatggatattagcatagttttacaattttttttttgccaattaacagcaaaataaaaaactaaagaacccctacaagttacctgttgttttaatgtgaaaatttaaagttactcacaaagttaagtattttcccatatgtttgcgtattcattgcgtctcctagtttgtgaactttactcctgtcc

SEQ ID NO: 115476 - DNA, 1728 bp, Homo sapiens
catcagttggtaaaggttgtggagggccatagtggtggacagcacgagctctggggacaaactgtcaggtctgcacctgggctctgccccagggtggggaatatgtcctggggacagaggagtggaatattttttatttttaggaattcaatttctttctattattttttttctaaacttagaaaaatcccttgcctttttagatgtttagtcgccagttctgaatttcttcaagtttagaaagttcttttacctccttactccacctagattttgttttatatttcaaactcttaaaattgatgactttatcaactatctacacttattatgaagatgtaacaggcattccttagaaatgaaatttctcactttgaaattataaaattggcactgcatttatagtaaaactagatgttcaaaagtttattgggtaatgatgtttaaataattggctaatttctttacctaaattgcttttattttaaagagaagcacgtcagaattttattaggcatattagctagtgcatggcgtggtgatttgttaggttttgggtattgtaagagagttttatttgtttagaagtagttggcaagatatttatcttttgattttttttcctaaaggtgagttttatataggaatctgtacctcgggatcacgtggctttgtgtaccaggcgtccagggagcaattaggagggcaatctgttaagtcttttgcctcagggcagaaccattaggtgtgctgtgtatgtgcctcaaggggtgtaaataactaagctattcatgtactcatcagtttcctttcaaggcatctgtgaaacctttaatctgtggaagaatcagagaaagttgacctattgtattattatcctccctcacctgaatattttgataaagtatattttagaatttacagattggacattaagcacatgaactttaaattccactttccattttgatgtgaatgttctaaaagttccctatgatttaaatgtaagcagatctttaatgtctacagaagagattttttttttttgttgatttattatctttcggagtgaataaattccatttactgatggctgagatttctcactgtcatactacagaaatgagcagcattccagtttgtttcctatattaattttggggcattattgaaaagaaataatcattcgtttccctttctaccattgcgcataaatgccatttaaatgtggagaaatctcttccaccttaaaaaaaaagccctcctttgacactgagcctttctaccccattcttaccctctgccctattttttttttttcatatccaaatttcttcaaagagtgatcacattcactttatttcttcaccttgtacttcattcttttaactttggtctgccccagcactccactgaacctgctaaagatgccagtgttgctaaattcagtgggctcttcattcttcatcttatttgacaactcagtagcactgaacacagctgaccactctttctcataacagtctttactggactttggtaaatcaagatctgttggtttttctcttacctctttggtaactccagtcttagttaagccaccttcctcttcccgctttttggacccttttcctactctcctatactctcaaaccactatgtaccaggttcaagtgttcacttctcctgagctccagactcctgtagtccacctattcataggacatc

SEQ ID NO: 115477 - DNA, 1089 bp, Homo sapiens
caatacaggattatctgaatcgaccaaggcctacctgggaagaagtaaaagagcaactagaaaaggaaaagaaaggctccaaggctttggctgaatttgaagaaaaaatgaatgagaactggaagaaagaactggaaaaacacagagagaaattgttaagtggaagtgagagctcatccaaaaaaagacagagaaagaaaaaagaaaagaagaaatctggtaggtattcatcttcttcttcatcaagctctgattcttccagcagttcttctgattctgaagatgaggataagaaacaaggaaaacagagaaagaaaaagaagaaccgttcacataaatcttctgaaagctccatgtcagaaactgaatcagacagtaaggatagtttaaaaaagaaaaagaagtcaaaagatggaactgagaaagaaaaggatattaaaggactcagcaaaaagagaaagatgtattctgaagataaacctttatcatctgagtccttgtcagaatcagagtatattgaggaggtgcaagcaaaaaagaagaaaagcagtgaagaacgagaaaaagcaacagaaaaaacaaaaaagaaaaagaagcataagaaacacagtaagaagaagaaaaagaaggctgctagttcaagtcctgactcaccgtaacattaagaaaaatcaggattcccttataaagaaagtgcaatgtctgaggaaatttcaactgtgaaaactacaacatatttactaaaatgcatgaattttcttgtttttagaattattcctggactattcagtagccactcagatgccactgtgtgaaagggccataaatgttgcctgctgcttgaacatctatttttttctcttccagtgcttgataactctgggagataatacactgcagtcgtactagtggttaagatatttgggaataaaattaatacttttgactagaagcgtctaaggataaaccaacagaaattgaatctggatacatctttaagatgtaatcagaaatgaccagatgactctagttagaatttttgaaggagggattacattaatatttcaaaacccttactctgtagataag

SEQ ID NO: 115478 - DNA, 1092 bp, Homo sapiens
tcaggtgctggtggggtgactttgaatgttgatggaatattagaacttttgtgtcccccaaactgcttaaatcttaggtctgttggaccatatgtaaatggccttcttttcatattcactttttttgctctgccatcttgtaaaaatcttggaggaggccgggcgcggtgggtcacacctgtaatcccagcactttgggaggccgaggcaggcggatcacgaggtcaggagatcgagaccatcctggctaacatggtgaaatcccgtctctactaaaaatacaaaaaataattaactgggtgtggcggcaggcacctgtagtcccagctactcaggaggctgaggcaggagaatggcgtgaacccgggaggcggaggttgcagtgagctgagatcgtgccactgcactccaacctgggagacagagtgagactccgtctcaaaaaaaaatcttggaggaaactcctgcagtcctggggtttgactaagtggtctgtgcagccccttccatctctaaggtgcagtgcagtctgtcatttctaatggcagaactccatggacatggacaacacaaatactggttaatggtgtttggtatattctcttcaagaagacaaatattttgagaaatatttttatcaaaagtggtaaaagggaaacattttagagtttaaaggagttctcccaagccagcatgtattcctgggttgtccgggaaattctcggctcactcttgagtttgacatcacctttatagatgaccatagttgaagcttaactatttcagggcggcatgataaatgagaagaataatgaaaggcatccgatttgacagaaagaacacttaatttgtagttagacctgagtttagatcctggttttagccattactaccattgtgacctggggccagtttttaactcctgtgggcctcagttgcattaattgagataatttgtttctagtatcttggcccctgcattggcattctatcaatgttaatgctcttttctctttcattgtttcatactagaatgcacatcctctgtatagcacatactgtctaacataaccaggcagcgtagtttacttg

SEQ ID NO: 115479 - DNA, 1021 bp, Homo sapiens
ggaggttgaggcaggagaattgcttgaacccaggaggtggaggttgcagtgagccgagatcatgccactgcactccagcctgggtgacagagcgagactccctctttgagggggggagaaaagcactttcctactacctaagttttacagaagtgatattttaccctttctctctctctctcttttttttttttttgagatggagtcttgctctgttgcccaggctggagtgcagtggcatgaactctgctcactgcaacctccgcctctcgggctgaagtgattctcatgcctcagtctcctgagtagctgggattccagacacccaccatgatgcccagctaatttttgtatttttagtaaagatggggtttcatcatgttggccagactggtctcaaactcctggcctcatgtgatccacccacctcagcctcacaaagtgctgggatcacaggcatgagccaccgtgcctggctaagtgctgctttttaaatcagttgtgtgtttgtaaaagtctatactctagaactgtaaggcaaagcacttaacacatgaaacactacaagtgtatttaaaattgtttgaattagtggcctgtcaaagctatcctttgaaaaacaaaacaaaaaacctacaaaaccatctctactttctccttttcctcttggaagttggaacagttcacatttcaaaaccttgcttgagctaagttcttaaaaaaccttgaaaagacttacatcaagtgctgcatactgttataaaggctttacatgtattaatttatttaaaacttccaacaaccctgtgagagataaaccaaggcacagatattaagtaatttggctttggccacacaactaataaatggcagagctagtatttgaacacacagtggctcaaaaatatctatactcttaactgctttgctgtgtagtgactgagagctttgagttttcttggatcagaattgtggctttgggcattttgctgcaaggaaaccttaaaatggagatccattc

SEQ ID NO: 115480 - DNA, 1038 bp, Homo sapiens
attagctgggtatggtggcgcacacctgtagtcccagctactcaggaggctgaggcaggagaatcacttgaaccgggaggcagaggttgcagtgagccgacatcgcgccactgcactccagcctggtgacagagtgagactctgtctcaaaaaaaaaaaaaaaaaaagagaattgaatgttttcattcaaatgtgaatacaacattgtatttaacttggaaattctgaacaaatgtaagatggcagtgttggtggcagattcttttttcaatggcatagtgtcatattttagtttcattcatattggcctggtttaaatagtttaccaaggttggtgggttatctacactttaaaattaattaaacattttaaaattaagtttttggttaaaatttttacctgttgctaaataaaaaatatacagaaaacacagatttttttgggagaaaggggagttaaatgaattatccgtctaatgtcttccaaatattccttattaaattgttgaagtggacatagttattctcttaggagtattataaacataataacaataaatttgtttgcccttacagagtttaaaatgactgttaccaatttacaggttaggtagggaactgcttctcagagagggtaatgacttacccatgattgtcccaatattcagcagtaagatgtggtactagaactaagttctgttgccatattgtcaatatttgcctgaatttgtttgttgtatgaaataaccaggtttttcagttttggacattggtttagactcaatctaaaaaccattaaattagttcaggctgtaccttcctgtccgccaaaaacattatcccagttgtgtgtaatactgtatatatatctaaaacatcttatacaaatgtttttatgtaatcaaaatgagttttcttaaatttaaatacattggatttaccactgataaattagattttaatcagattcaccttgagtgttatattagggagtcagtgaagtgcccccagggggtggcaatcatgactataaatcct

SEQ ID NO: 115481 - DNA, 1108 bp, Homo sapiens
acagcccatcagtgacagccaagtagttgtgagtgactttttttttttaagaggcagtttactttgttttaaaaacatgaacctttaaaagaattccaaaagtagcacacacattgaaaattataatcaaacatactaaaggaaaatgttaaatgactcctaaaattttagcatagaagtaatcttcacctaaattttgaattaaatcttttgttgtgagtgacttctgaaggggatggagtccttattgcctttttagctcactaactccaagtgtagagaatgggctttatggtccaaatctacttaatccacgttgagagggaacagaaaaggagtttggtcgcagtgcctagcacagaaagaaatgaaatttacctattaatgtaactattaagagacttcccactttaccttcaaaacaaaaggaatatcattttcatgtctatacttagtcttccctgctgtcctgtaagcctctggttgcaaaatagaatctcaatagtatttcagagaatgggacttcttgccatctgatacctgtgaaactcttaagtgatcttgggccctgctctcttgctgtggttccagttgaagtgtggagtctcacagcaggggtccccaacccctggggccatggaaccctacaggtccctggcgttctaggaactgggccacacagcaggaggtgagtggcaggcaattgagcattactgcctgagctccgcctcctgtcagatcagcagagattctgattcttataggagggtgaaccttattgtgaactgtgtatgcaagggatctaggttgcacactccttatgagaatctaattcctgatgatctgaggtggaacagtttcatcctgaaactatccccctacccctagttcatggaaaaattgtctttcatgaatcggtccctggtgccgaaaaggttggggactgccgcctttatagcatcagctctccttgagcaactagccaggcaatgttgtatagtgtttaagatttgggagccttaagttctgcatttgaatcctggttccagcacttagtaactcttgaccctgggcaagtaacttaatctcttggaacctcgtttttcct

SEQ ID NO: 115482 - DNA, 1762 bp, Homo sapiens
tctacttcccacgtctgaatgaacttgtaagaagaaaatacttcctctgtaggtggcctggtcaggttggcctgatacctggagtgaaaagattggaacagagtaaagagcacaaatctgggaccctggaaaactgccctctggtcctggttttgctgtttaatgattgttataactaaacaaggcagtttgcagatctggctttagttttcctacctgtacactcgggggtatagatgatctccagaattacggaatcacagggttggaagtagctttgtgcaaccttcctgaggggcatggacgtgatctttgaagcagtcttgacaggtcgccattacatctccatttgtctgtgttcagcctttgcttggcgtccactctagaggtggggaaccgttggttttcaaggtagttttgagcaacttaatattaggtagcttttcatagtgtatgcattccttgccctcctgtagtcctaattctatgtttttcattttttatgtgacaaatctttagatattgaacaagaattatgtcagttctctttccagttatgctgcaaaagctctgtctgccctccctccctctttgatgtgatttcagacccttcacaattatgctagctttcctgaaatgttccagtttttcattgccactttaaaaatgtgattctcagaaaagcatataatacttcagataggaagtgagcagcacaaggcatgctaagaaggtttaaaaactgtaatttgatgagtacagcccaagttgattttttgttattggtttcttttatagacagcatctgtctgtgacatacttgatgttttatttcacatggattgattgctcatcagcaaggcctcacgttatagatgggcagcttatttttttgacccttggcagtgctttatattttttcttttgtggattattttatatctgctccttgttctgcctgctgaatccttctgaacctttcatctgctctgggaattagtgatcctgtcaggctgttgtctccttattatccttactgatcatacctttgagtccatcccaagtggttgataaaaatgttgaccagggcaacatgaagtagaggctcttgtggtaaactgctggggtctttctgctgtctttacatttgactggtggggaaccctgacagtgtttccaggctcctattgacaatgtgtttttattcttggttagatgtaatttagatgtaatttgtcttgctctgaagtcttgaactcagtttgttttctcattaatttatcgtcttctgttttgaaaattctgtatttgtttttatgtttatagacgtttggattagtggtgttagctattttccccccgacaattattatgttctcgttagcttttgtgttagtggtctttactaatactgccaccaagccctcacccatcttttctttgctttttttttgcattcctgacctggagtgcctagtactgagtgataaatgggggttgggatggtggtgctggtggagcaacagacggaagaaatttcttacattaagaaggcttccagtcttttttccagaggtactgctacaaatacatgccaagatttttcaaaagactgtaactttaaacagtttaagaatattctgttggaggtaaagtttaaaaagcaattcataaagagaaacatactgaagtcttactccagatatcctgatggatgctgtatgttgaaaaattacattttagaaaataaagggtatataga

SEQ ID NO: 115483 - DNA, 1018 bp, Homo sapiens
gaatttgaagatatatccataaatgcttgaagttctaatgtggtttttagttacagcagatcttttaaaactacaatggaattttgccattatgtcactcattatagttggaattctactttaactagatttgttttctgatttatatgaaaccttaattgcttgaagtatagacttaagttaaaattttgtagcatggattccagagattctagtttgttttttttttccccccaggaagaaaaacaggaagtactatgtccagaaactaaccaaatgaaggtgtttttaatgactaactttcttcagagaataagatactgtatggtttctagattacagtgctttagggctaaatgtggaaactggaactccaatataaggttttgcaccttaaaggttaagtatccatttgtatccaataacaacttaggaaatttaaagttgttattcccacaataattattactttgtccctatgggaatatttagaatttgtatttttgggcataatatcttatttatatttcactgtatttatagttgaaccttatatctaaatgaatgagagaaattaactcatttttgtatgtaatttaattgtgtagcattcactaattgctaatgatttgcacacatgaacaaatcaaacaaaaatctctgctcttatgttgtacacttaggtaataaggtggtaaatgcatgtatctaactctggatctcatggtaaaattaagagagtaattgtgcattacaccaggaataatgtgctgtttacaagtggatgtcacttgccaagtttacacatctgatttagaagaaacaaagatttcagacttaattgaggacacatgtctttgatagctttcttgaggtaactctagtcctttaagactatcttgaaaccatcagcaggatttattttaaaaatcctccagttgaggcagccatttaaaattgagtaattattccctggggcccagttctttattaccaaaattatagcatttttagggtt

SEQ ID NO: 115484 - DNA, 1017 bp, Homo sapiens
caaagatgggattaatcaaaatgtatactttgttcacataagtggaatgtcttaagtagattttttaaataaataggatctacatttttcttctttgtagtggcctgtctaatggagtatagtttctttcatctttttattagtgagaatttaaatatattttgatgacatttctctttcaatttcttcaccacaaccaccatcatcgtcatggagaggctaatagactttatgaggggctaactcctcagaggaggaagaaattacagaggtggcatttgagctgagcctttaaaaataagagaagatttgcattagagattggtattttctgttcttgggagggtattccagatacaggaaaacttgagcaaagacaacaggcatgtttgaaaaacagtaggctttgcttccatgaggccaaagtgtaggctctgtaaaacacaagagtagaagagtagattagagacagagtgtcaagagctctaaagtcatttctgtttggactttattctcagtgtcatagtttctatatggaaaggggctcagagtttaaaagagtaactccataaaaataattgtagcaccacatctttatttggaagattaaagtcttttatttgaattatatttcagaatcttaaaatatgtatatgtatcacacaaagaaaatacctttaaagactttttctttatgtatagtctgtggtcctgtgaggtctggagcttgggactactgtgaaataaatgataaccttgtcattcagtagacagcctgagctgcattagggtcttctgcatctcagggttggaggcttctccctgctttggcagaatttctcttccctccagtcttggccttctccattaacacacaggtactttgaactttatgtctgcaggtctgtgtcattttgctatctctttggggaaccacctgcctaaccttatgaggtcctgttcaaaactgtggttctgctcttttcagcaactgatcattattgcatatcactgtct

SEQ ID NO: 115485 - DNA, 1967 bp, Homo sapiens
gttctggacagagtctaactactggcgagttgtatgaccttgggcaattcacttgacttctatggaccttctgtcatttgataaatgattgaaaatatgaagatgtcttaaatactacttaaaatcttactgtttttgtctttggggagtactaaaggcagtaatggaatttattttaagtatatatttaaaatatgatatttgtttttcccttgaagagttttcatttagccaaatggattgatttaaagtttttgaccacagctgctaaagaaatgtgtgcacagctactgttttggtaaacacagacaagtaaccagatggtagtaatactttaaaaagttggtctatatgggctgggaaccatccaaatggaatttttagtgtttcgcctaggtactttagatttagtacacactaaatgagtttgagtgtgttttactactgcagtggctagaaagaacaaatagagtattatgtggaatacaaataatgcttattaagcttgcagttgattccttctgatagatgttccaaattgctgtcagactatatttacttactcataaacagatgtggttttgctttaaatcaggataactattccaaactgagttatgcatattttaaacaactgttacggattacattttaaaattattgttgattaagaagctgatttattatattttataaggttcatttttggtggtagttttagatgacagagagcttagatttttttttaattttttgaaatctgatttaaggtgggatatcaccagttaaaaattattttctggtctgtagtcaagaattgatatttaagatgagcaatttgttataattttaaaattttagtcactaggctgggcgcagtggctcacgcctataatcccagcactttgggaggccaaggcgagcggatcacctgaagtcgggagttcaagaccagcctgaccaacatggagaaaccccgtctctaccaaaaatacaaaattagccgggcgtggtggtgcatgcctgtaatcccagctacccgggaggctgaggcaggagaattgcttgaacccaggaggcagaaattacagtgagccgagattgcgccattgcacttcagcttgggcaataagagcaagactctgtctaaaaaaaaaaaaaaaaaatgtagtcactaattatcactaaatgagatgttggtagcagcttgaacatcagctggcctgtgctttaactgaacaatacagtagtagtaatcttagtgttaaattttacatattgaaagtattagaaaatatttccttcactttaacttagtttttcctcctggatgtgtttttttagtttatttcttaagatctttgctaggtaggtgtcacactgttcattaaatatacagaacttatatatcctgcagatcctgacattagactgtgaactcacttatttatggaagccctattcactaccagcttttctggtctgatgataggttctggctacttccatgaatttgtatgagattacttacttctagcattcatgctcacatgttttcacaacaaatacttattgagttgttattactaaatattaggcaatgtgctggggcaaatggatgaccctggtcctcagaagtgtaccttctagtggaaaggtaaatgttaagtatctgacaaatgtaaaactgcagctgtgacaaagtatcagaaagtagagcaagatggttcttgctcctcagaaatagagctagttctgttcatcaatatgaaaacaatgaaactggtctgtctttccaggttataatgattttcagcctgaaatattcttgatgattttaattatgtcggcctgcagtcatttccactgcccataatctaatgtgttttgcctgttgacatgttaaagatgggagccacttagagccattcttcgatcttgcccttcctacctcctcaaactgagag

SEQ ID NO: 115486 - DNA, 1019 bp, Homo sapiens
aattgcaggtcagaaacttatatttagttatcagactctgagtcatgagttttagtattctgtgtgctgttcatgtgtgccttctgttacagacaacaccagggaagagacctaataaaaagtctcatgttcttcaaagagaataattgagaataatgctacttaagagcacgtaatatcagagcaaacaggcaatgaacaacatataattctgtatattatgcagagatattaaatatacatattagtaaggtagcagatgctgtggtgctgaaattgacatgtaaaatagtacgctttctctgcagggctctgttccagccagcactcctttacatgtaatgaatagttaattttagtcctatggtccataggagactgatgggggactgtgaggaggaaagcattccaactccaagaacagcaggttgtgctgagatgtgctttttaatggagaaacattttataactcttgggggtaaatttataaagacggttgtgcatgtgtttttgtatttaaattaaggaattattaatacagttagacagccaggagtctggcagctatattgcaaaagggaaaagcagaatttgttgactggactgagctcaggaatatcttgcacttttaagaaaattcctattaaacctatcctttgtccaaatggagcaattcatcagaaacagacatttgagaatgtgtttaggtagttgaaatttcaggctgactttttaaaactaacctttggctatatataggaaaaggcaaatgacttttatttttctgcctcacatggaagttcccttgccatttgagatttccctatgttcataattcattaatcccatctatccaggcaatatctggtgagcatctgttatgtaccattatgttctgggagccaaaaatgaataaaatcaatctacaccctcaagcagtttgtagtctgctggaatgacagacttaaaaatgcttataactaaaatattttatgtgcaggactagggtttttaagcta

SEQ ID NO: 115487 - DNA, 1173 bp, Homo sapiens
tataccacagttttgtttagtgctaggtaggaaaggtgaaaaaaaaagcgcgagagtatattaagtatacaaaaagcttagtggttttaaaatgttaagctcacatttggaagtgtaattctattttaatctctttcctaatggaggaagaaagatgactgatgtggtagggtaatcttgtttgaaaaattgacaactctggcatacggcccagatctcttttcagattttgtgtgaaaaagaaaaatggcagcctcttagtgctattcattggtgtaaaaaaaaaaaaaaaaaaaaaagatatggttgaacctaagggtgaagtgctaactcttcatatagtaggagagtagattaaaagagttagtggatatttcacataatcaatgtctcttaccttcccagacaggagaaagaatgtcatgagtattaaaataattagcagagcattaaagataccagggacatttaacttacttcttggcctccaaattcataagaaatatgaagggttaaataaaccttgcttttaaaaataccttttccccacaggtctatgtgagaactgaatttacagggtgcttggagtttccttttgctattcaaaacatgttagagcatgaatgtttggggcgttcaggccctaagctatgttggttgagtgaaaggggaattttctgttctattcaaccaattcagggaacatttaatgcgtgccagccatgtgcctggtcctggtaggtactggggacacaaagatgaataaaacagcttacagtccactggaacagacaggcatataaacaattcactatagtgttgtgtgctaagggctataatagcgatctgcagaaagtactttggtccacaaaagagacaacaaatacttttttgtgtgtggggctgatgaggttctaggtaacagtggcctttcgctgtgttgagaaacaaacttgaaatagatcatacaggtaactagggacttacagagagaggagaaggggcatatttggcagaggaaattgcatgagctaagagatttatattgttcatctagattagagataatctacatgagattatattatgtataaaaattaaaatctccggcagtttaggcagtgggtcaaagttcgaagttgatagacttgatagcttttcctttttttctct

SEQ ID NO: 115488 - DNA, 1995 bp, Homo sapiens
ggcaaggcattaggaatggttagcgccaaaatgtgaggactcatgttggggtgagggatcaggtgagagctccagagtgtgggtggaagaatttggctgccaaaggcctacatttctcccctcccaggtctgagcatactttccccttcctcttggccctggtaaacagaattagtctcctgtttcctcttcaccaccactcctaaagcaaacagccaagcatttccaaaggttgttttgctgtgagcagcaatgggaaataaataggtaaaaggatcttctgcttcctcctcgtttacacccggtccttgggaggcaagataaagtacgcagagatgccaagagttgccacttgggcaccaaagggctctaataaacttcatctgcacttcagaattttgggacccaggtgagaggccaaagtgagcagtgagaggaagcagcagtgaactgaggtgggggcaatgtggggtgtgcaggtgacaagggatcctagagaggaagggctgcagggctgtccccacctttaagaagggtggaaggccagagctgctttctttgtattagaaaaggttggcatcagagaaagcagcttatgtttaaaagattggggcaaataatttacattcctaagcattttgcagagttacagttgtgaaaataattcaaattccaccaatttttcttttaatcacaaccccctccccaactgcccacccagaatttgaggctagacaatgattgtttcccttaagtatgcaagttaaaatacagaaatacatcttgaaaaattagttgatagtaatttgttgttggtggtagggaacccttatgtgcttcaggatttggtatgacggagtgatatgacttttttttttttttttctagttcaacacttccccttaaactagtggtacttctaggtgcccactgcagatatccaaattagtggatgagagtcttattttcaaaaataattttaaataattatctaatgccactcatatctaacacaggtattctgatcacttggattcttgtaagaaaatggtgtaagaatctacattaatgagaaaacaaccaatactgagcagaatgctgctgggaactcttagttgggcccatccaatgcatgctccgtaaatttttatgttgtttgtatggtatgctgtggtttacagtctggcctttgcattaatttgccattgtttttctctcaaatattaatgaagtgtaggagtgattgagttctaaataggcatttttaaggtagtcttaaaataaagcttttcctttaaaaaatatttttttcagaaagatgaaaaccacttcattagtgattgccggcaaaatctcctaatgtctttctataagctgtttaagcttagcattagaaattagtgctagaggatttaattagccagctcacaggatgcagtccctttaatttaggatttccctttgagaaaattatggagttgaaaaggaatatgatatttcatacaagtttccatcttgggcccttatgttgtttgttctgctgatctggaaattgtacatgatttacattaaaactttttgtttttaatatcgattattgtagtgtggggtgttagattatgtgcaatagttctcagagttgggaaaggtaaaagggtttttttgggcaatgattaactcatctactttaccagggttacataatcaagtattagttactatacatttagctaatgcagtgggtttagttaagcaatgaatacattatcatgggagcattaacacttttgcatttttagacttgcctttaaaaaaattacagaaaaactcctcacaacccttgccaccctttcagccataacattacattgccttggtttctgcctttaatttccctgggggttctttttatttaggaaaagggtgaaagatgtatttgtgtaagtactacaccagtgcttctgttaaattctttttcaacaaagaatatgttac

SEQ ID NO: 115489 - DNA, 1473 bp, Homo sapiens
taaggtttacccatattttttcacatacctgtaatttattcatctggagaagcactgtctaatagaaatataacatgagccttcccatagaaatagaatattaaccacatgcatagttttaaatattttaatagccacattttaagaagtgaaaagaaacaagtaaaattaattttggtagtatgttttctttagctcaatatatctaaaatatcaatccaacacatatcataatattcataaatattcaagaaaaatgttgttattttactttttttcatgttaagtctgtgaaatctggttactgattcacacgtcacaacatagctcaaaacactagtagccacactgcaagtgctcagtagccacatgtggctagtggctgccatattggacagcacagctctagagtcttctgagtatgagaatactgctatttatttgtccttgttcatttttgataggcctagttttgaaaggagctgctgtaaacattcttttataagtctcctggtgctgtgagatacttttaatgtggtttctgtgtcagaggaaatctacatagttgtatttcttctagtactccccatatcaggctcagctttactaaagtagctatcataaggtgtgtaaagcgtttgacttggtagagtctgccaatgttaaataacaggagtgtaaacaacgctgccacagaggtaccttcagccctccaaaagcacatgtattcaaggactttttcaagtaggcttctgctctgtcatatcatctgcctcaaatcttgctgccgtgtgaaaattcgggcagctaatggtcatcccagagatttctctgtttgtggcttcttattaaattgttcagtggaagcagagaacagaatataccatttcttcaaacttttatgcattctctcttttccctccttttttccttaggtcatgtaatctgctagcatcactttgttctcttgagttttagtaaaaccgaaagcctccatcagtaatcagttgcttgttctgcatttgtcttgcttgttttgaaggatagtagcccctaaagtttcttatcagaaagatttttcaatctattttgaaataatggaaccaatgaaacaatgtaaactaaggttggatgagagaatgtgttcacgtgatgtagttctttcatagtttctaaaataggaaagcctatcaaggatagattgtaggttacctttagactcaatatgatttcctaataacttgtgtataggaacagcttctccagagcagcaaacttgagcagtttatcccgccagctttctcttcacttaatttatcatcaaatttgctcccagcctggaaatggaccaattacatgagctgccttcctgccttccattctagtttgacaagtggtaaaaaagaagagaggtaggaagcaagccacggtgaccttaagtgatgaaatgggaaatctgctccctggagggtc

SEQ ID NO: 115490 - DNA, 1737 bp, Homo sapiens
caggcttttctgtttcttctaggttttctagttttggggcatatagttgttcataataggtctctgatcgtcttctgtatttctgtgatatcaattttaatgtctctgttttcatttctgattttatttatttggatcttctctctccttttcttggttagtctatctagcacaaacatcattaattgcctgaaaagtggtacactgtgtatacttttattctccttgattttttttttcaatcaacagtatgtcctggatatctttccattgtaatgcatggagagtctccacattcatttttatggctgcataatatttcatggtaggaatgttgaaattgatgcatatcaggacaaaacatcttttattgtttagagtatttctttcttccactttggataagttgtcatgaattcccattcattactctcagggaaaaaaactaagctctttgccaaccaaggcactcagtctgatcctgcttcttttctccaggattatcttgtattactcttcctctcatcttctattcttgggttgcatagactgccttttatttcttccatgcaccatgttttttcctgcctaagggctatgctcaagttcttctcacatgcagacccttctctcctttcctgacctttacttcatttttaattagcttttaatccacttaaggcagatctcagctcagtgccatttcatcaaggtatgcttaccctagcaatccaaggcccagtcagaattctctgatgatagagtcttccatcacccggccctcttcctctgagcagttattaccatttattatacatttatatatatgattattagattgatatttatctcaaaaacttaaaggagagtttttcaattagtgggtggccacctgttatagcttataaaatcagttttaaaaattgtgacaagccctctttaaaaaatgaaatagagtagaaaatattgagcctttgcttatagtaaggacacttgcatcaaatttttgcagattaatcatatgaacacacagacacataagcatattaggcatgatgtaaaatatatttcttattgtgggtcttgttcagcaaaatttgaaagcccctgaactaagttgtagattcagtgaggacaggaattctgtctagtttgtaccgctattctatctccaagtctagcagagaggctggcactgagtcaggcactcagtaaatatgctgactggctgaatgaatgaatgaacatacactttttcaggcaggctcagggatccactgccttcctctactagggactagtaggccttggttctaagcagatgttagtgattatttctttggttaattgagtctgctttagatcattagaagacaagaaaagtaatacaaaaccacacctacagatgtattttttaagggttgataagcagatgaaacactgaggatgaacagtttttagatctaatttttttttgtattacttatgaatcttagaccttaaaataccattttattttattggcaaataatgaaacaatctttacctccctaaatatctgggtagttttttaatttctaaggtagtctacacacatagggcttattacttagctgctatctttgtgtgtacttcagcaataaaatatttatgcagtttggcaaggtgatactacaacctggtttaatacaacagctgcactgcctgttcccatgtggcttgatttccctttttaat

SEQ ID NO: 115491 - DNA, 1073 bp, Homo sapiens
gtgtgttttgtttatacagaagtttcagtaccatacacacatttgtaaatactggataaaatgctttttgaataatattaaatcattatattttcattgggggtatagtcatcattatgattaatgtattaacattggttttaaaggaacagatagctgttcattgatgcttttgttgaatatcttctctaatatttgttataattaaaagttttttttttagttcaaaagaattagagtaaatcctgttactgggtatggccaggaatagtgtattctgcttaatcaataccatgttcataaagatttttcctgtataccatatgtagattgcaaatttccccagaattagattacaataaaatacatttaactctaatactactttacacatgatttaagcattctttggtgattcacaggcacttcaaactcatgtcatgcctccgtgtcaacagtctgaaaattaattaccattaggctatagatgtacatgagtgctggttaaatagagagttctgttttatatacttaagagtaaagtgtttattttcattgctgttgctgtgtaataggttagaaatctaccagaaaaaataaacattaaatcaaatccataaatactaataatgtaaaaggtttagtatatttagacacacaggaagtatttcatatattcttatgttagaaacagttcaaaagatgtattattagcctggtgtgcagttgttctttttatccctatatattatatacacattatgtatgccatatgaagtaatagcaacctctaattttggaattagcttaacttgaagttaagacagatacgggttctgatccaagctgttccccttgtccattgggtgagttattttacttctctgaggcttggttttataattcataaaatggggattataatctggcctattttacatggttgttgtgaaaattaaatagtaagtatcaatgtaaaactctttaacattgtatccaataaatggcaactccttttcttcctccatcttcacctgttaatgagtttttagtactttgatattgggaacaaa

SEQ ID NO: 115492 - DNA, 1022 bp, Homo sapiens
agctaaaatttagagtctttcttcccccttctccccacactggaattattaaaattagttggatattcattttatttttggctgctatagatttaaatgaactgtcgatcctcagaatggaaaaatacagcaaattctaatatttattgcttcctaaattcctggtggttaaagatacaaatatagcaagtgttcaaaaaaatgagaaatccactagtcatgttcattaaaagaatactgggaattttatttggatgagtcttggtacccaatgttcatcgctagggaaataatgaatgatgtatttattatcttgtctttttattaagaaatctataagtgacacctgaaattttgacaaatatatcagtacctgtattaattttatgagaagtaatgttgtctatatttactagaagatcctagtcttagtgaaatttttcttggctaatgatggaccacatcatgctgattgatcccaggtgtagtctaaaccaaacgatgctgttgtccgtgaagataccaaatgaccatgactggaaggggtatttgagattagccgttttacaaataaggaaacaagtcccgagaggttaggagacttccacaacatgacactgtgtaatctagggttatgcagcaagttggtaaaggatgtgatatcagtattttctttttcctattaataggatatacgttcagaagttggctgtggacaagtttgctacttgtgaactattagatatttgttgactttttccctggcaattttcttaagtatcttgtaataacttaatcttgctgctttctgtgagtctcctgaaataatggtagtgcccttccccctaatcaaaatgtaaatcaatctgtaactacaatagatagtttcgatgtattagaatgatgtttggggggcacagtgtggtggttaaataacacaagtataatgcatggtttaaataagtattttcataaaatcctaaatgttttactttttaagtaaacctttttcaattttgtaa

SEQ ID NO: 115493 - DNA, 1107 bp, Homo sapiens
aatgcaaaacaaccttttattgcttctcatgtgccacgaatgaatcattatacttgtcaaccctaaaccaagccataattggagcagctactgttatcaaagtggggccgctctgtgacagcttaataaagctgaaactgttaaattaaatctcagatgcttaactccttagcactggtggattcgttgggtccatttctggcagtgaccagtacaccaggaaaaaaaaaaaaaaaaaagattcctggcatgaaagccctaatctgatgaaagtgtacaagcgagagtatgctagccaagtaactctgcttcttggcagatggatttggagccatcagattgtcagccagaagattacaaaatctttttcatatggcccagtgtccccctccccaagatttacaatttcctgcttacatgtgatctatgaaaatttaaatgttgatgtttcaaaattaattgtaaaagtaacatttattttaactttttctttctttcaagtgaatatatgaaaacttatttgtggtagccacaggcccaatttcttccccccatgctccagctaacaaagggactgattattctgtttttcttttctaatataagtgcctatgacattcatttggtatgagttaacttttgtgatttactccctgattttcataatgtagtatgaaataggtacagatgcatagtcttaagatcctgtttattgcatctcatttacagatacatttatcttatacatgagtcagtttttcaaatattaattttactttctctacatggtgtttattttcccaaacatacaccagtgttctcaagatgagtaatgttgtatcataatcagctataagaaaaggtatatattaaaatagaaagccccattgcaatggtagaggttgtacgtttgatagaagctacatatttagtagaatctatagaacacacacctcttgaattacattctttattctgtgacatgcaaattttctggaaagcagatcacagaaataacctctggatttccaagaacaacccagtgctgattgggggtgagcacacctattgttagctgtaatggctgtctgttcagcacacttaatt

SEQ ID NO: 115494 - DNA, 1408 bp, Homo sapiens
aactctaacagagccaatctcaaggttttcagagaaaacagatttcttctgacttgaataatcaatcttgaatcataaattgagcttttatttatctactgtttcaatctacaatgaaattacttatttgctttgcctgtcagtcctgaaaaattgcagttttcttttgttaatttaagctatttgtagatggacctgtgtaagtttttgttggatatgctttcatatatatgggagagacatgttctaagtacataagaacatgtggttaaagtacagaatttattagctgtgcatttaaggatacttcataatttcagatgataatatactatttacattatatgctgaaatatgaggaatggaatgatgattctgtcaagactaatatcatttattttggaattcatatatacataactatacatacaaattccaacttacagaagaaccttctgaccacgtagctagatcgaaggttaaacaccatagtgtttaagaatattggttttaggggaacatgaatcttagaccagatcctggctcccttaatagcagcacaattttctacttctctctgcacatcagtttccttatctataaagcgggcttctttttcatgtgagggtgaaatgtgaaaatacgtgtaaagcattcagtacagggttagtgtgaaataaacattcaataaatggcagcaattattgtcaggtggataagtgtagatgccactcacttttagaagtatgttagcggaattaagtggagcaatctttgcaccctaaagacatttaaaattttaaatgtagaatctaattaggaatccaaaatgtgttacccgatattgttaggattttctttgaagtgataaaattagcatacaaaccagcattaaatattgcaaggtatattgagataccttttatactattaaattttcataatgacttctttgtattgcttgacttacagctcttctcatatgatgaatggtttgtttgagtttgattattttaactaatgacattcttatactcatttgcaaataatttagttttctattttgtaatctagcagatttataatcttttttggtaactgtgataggttaaagatggccacagattctttactactgtctcatgaaaatatgaagtctttgttccctcctctagaatctgggtgatttttatacatgtttgatcaacagaatatatcaaaggatatcttgggccacttcctgggcccaaaccttacgtgactggcaacatccacttctcatctcttcaaagatcttggagccctgagtttctatatataagaagtctggctatcctgagtcggccttgctatcagaaagtccatgctatccacatggagaggccatattgacacaggatgaaagggg

SEQ ID NO: 115495 - DNA, 2955 bp, Homo sapiens
taatcagcatgtattactattttgtgtactttatgaaaaattcttacaaatatgtgtatttatcatttaaaaaaattgctcaagataattatttcccttttttcaatcttactgcacaattgaatagccactgacattcaagattttaaaaagttgactaattttgatacctagtcaaaccaaatttttaattgtatatcttctatgtccagctacatacttaattttatgtgtttcccatattattacaggacttgtcatttaaatttcatttcatgagtatttagcctcttttgttgtcattggttttattagagctaaccatgttaaaagcctagtgtgtgtacgcaacatttctctacacttatatagtcacatataaacatgtgaaaggttcaggtatctattaatgttttataaaaatggaatcatgttaacagcttgctatttgagccaaatcaataggcagacctctaactcactcttttaatacatgcataatactaagttgctcttttaaagtctcgttttagttttaaattttgtttctatgatttcagcttaacaaaataaatgaaatgacaaaagatacttacatgaggctaaaaaacacttatgtgaggcttggactttgaaacatttgatcaattgactgtgagaggtcacggaaccaatttcttgctgggcatgggtatgtttattctgctcagcaaaaagccccaatagattcaaaacgtccttaaatgtaggactttgccttctcccttgcagtttcactatccatccacctctagtgaggagtctgggtgggagccataacagatcatcattatttatgcctctcaaatgatctatcacacatgcattttgatatgtctaccattcaggtacagatagctaagttgacctgagaccaaactgaagtaatgtctctttgttaaagacttgtcaaaagcctttccaaaccagctgaagtagctgaattttcagtaaggatatctgtgttttaatctccactgtcactgcctgatggtgtgaccttggcaagtcactttacttcccttgcttttcagttccatcagcagagtaaaggggttggcgtagatgagttctccagtctcttcttctcaattcagttgtcctttgatttttgtgttttcccttatgtctgtgctcagccaaaggtccggtgacaggaaaatgaaatcttaccaattaaggaagctctagattttgcttctcatttaattaagtctcagaacaatgagaggttatatttgaactaggttaagtacacataaataaaaatagtttgttaacctgatttccagttgaggattgctaaagtttgtgccacagttgaaggtaagtttagagtgggaacccaaggggtgggtgtgcaggtagaatttgaaccatataatccttaggaattgaataatcccaggagttgaggtgagaatatcctttattccccaaacatttcttttctccgtcaggtcctgaaacttgaaccctcttcggagtgtatggctctgctcttttgtgatgccctggcatacactatgctggggacatcacaccagtcatggaacctgcccaggagtcaggaggcagcctgtaggggcaaggtaagtgcgctggtttgttttgtagctatgttgtgtggctttgtgaaatgttaaatatatgcatttatgccctttgggatataaagtgatatttaagcattatatcccaagaagcataatagttttaattgtgcaaaaccgcacaatatagttaaaaaatacaaccaaaagcacaacccttatgcatatctttaaaggctgactgcataatcctgaaaggttccatggctggtgtcgcatctcttgcatagtgtttgtgagagctgttgatcccataagggcagcccaccacagcacctcagaagtggggagcagtgagttttcctgtgacttttgtgctgagtggctcctttgagtgtatttggcatggaaactagacttgacaattctttttgcaggacgcctttaaccttagctttaatggctgcagaatgtttgtgtttgataaacaagtgagtgaatggtggctcttgggctgacctgcctcttagtacttaggatgtgagagtattcacccttcacccttctgcttagggggtgcaggacaatgtgtgtgggtgtgttcatgaacatctggccacagaatggtatgactgatttattcacatgtgaataatagctgacacggctttctgaattgtggaaaaaacagattcatcgaacaggccacatcggacagtgttcacccgagccatcgaggcatgcgatctccactggcaggatagccacttgcagcacattatcagcagtgacctatacaccaactactgttaccatgacgacactgaaaactccctcttcgactcccgcgggtggcccctctggcatggtaagtgaccaaaccggaaagacatttccatgacttacttctttgtttagtttctatagcattactggaatgggaggtggagaactgaaggattcaatgggagatggatgaatgcttggcaataggagctgagattttcattcaaatccaagttcaggaatggtttcttgtgtctttttaatagtattttgggagaaacatcttactattaaattctttttttatggatatatctgacagtggcaactttacccccttgactttctgttttagaacatgttcctacagcctgtgcaagagtggacgcattacgttctcatgggtaccccagagaagcactgagactagcaatagctattgttaatacattaagacgacagcagcagaaacagttggaaatgttccgaacccaaaaaaaaggtgaatgtgaaggagtttgtttccattggaatgggattcttagtgatgacattactaggttttgtgttctgggag

SEQ ID NO: 115496 - DNA, 1031 bp, Homo sapiens
tgtgagagccccgattgtcgtgactttgtccagttcatgatgttcttcatatcatcactggtgtgtgcaaaatacattgctaggtactttggaaaatttttctgaaatccttcttccttcaacacatacacagtctatggtgaaaggaatttatttctgaatagtataaaggataatattcaaacaaagagtgcaggacttgttatactgtgcaaaaagagagccagttcgtgatgatcatctgatttttaaaaaaaatcatattatacattttatgaataaatgttgacttttaaaatttgtttaaaatgttgtaataaaaaaggaaagtgtaaaaatgttagttagtttcctaactaactaatgttcctaaacatgtttacatttaggtaagttacagaatatgttaacttagactcctttgattgtctttgagataattctgtaacctttaggtctagaccattcttagacccatttctcttttatcttgcaagctatgaaaacttttatttccaaccattcttaggtattgctaggattacatgtctatacctatgtctttccctactttatttttggtaattgtttttccgtattttaaaaataggcttttccatagctgttacaagtctaaagtaccataacagctacttgttatgggccaagattagtaaatggaatatcttatacattttcaaaattatttggcatgatgtgttagcttattgattctgaaaaaaaacagatttatttgatttatttttgatttctcatatttcctcagtttctatcacttgacaatatatttgtttatataagcacagcatttcctttagccccatccatatatacatacacatatatatacatatatatatgtgtgtgtatatgtatatatgcaaacatatttatttggttgtttccaggagtagtgctcatgtttcttttttcctactaattatgtttatgaaagccagcaacagaaattgaatataaggaccttttcaaggaatctaggactcgactta

SEQ ID NO: 115497 - DNA, 1026 bp, Homo sapiens
tgagcctcaaattctgacaggaagccccagtgaagtagaactcattagcaaaaagccattgtctgaaatggcaagcagcacagtacaaataccagctaccaagaggattggttctttattatagcaagttcatgttcctttcaggcatttcactgaataacaattcataatgaccttattcttaaaggtttctcacaggcacattactttacaggattttctagcctagctcatgtcctatgatggttaacaatgtaaacactggttgtaaaagtcaaaataaggcaggacctctgggcagcctcctcgtcagtaatagagcctgtttgtgttccttgcaggggtttatgccctggacagcatcatgcagacctggtttacactctttactcccaccgaggccacaagtatagttgcaactaccgtgatgtccaacagcaccatcgtccgcctccacctggactgccaccagcaggaaaagctggccagcagcgcccggacacttgcactgcagtgtgccatgaaggatccacagaactgtgccctctctgcgctaaccctttgtgaaaaggatcacatagcttttgagacggcgtaccaaattgttctcgacgctgctacgactggcatgagctatacacagctctttacaatagcacggtacatggagcaccgcgggtaccccatgagggcctacaagctggccaccctggccatgacccatctcaacctgagctacaatcaggacacacaccctgccattaatgatgttttgtgggcctgtgcgcttagccactcccttggtaaaaatgagcttgcagctataatacctctggtggtcaagagtgtcaagtgtgcaacggtactgtcagacattttgcgcagatgcactctgaccactcctggcatggtgggacttcatgggaggaggaactctggtaagctcatgtcactggacaaagcccccttgaggcaactcttggatgccacgatcggggcctacatcaacacaacgcactcacggct

SEQ ID NO: 115498 - DNA, 1998 bp, Homo sapiens
tatattgcgtttgcagactaaattgtcatgttgtgaaagtttgtgtgttttttattttttccctatttctttctttcctttattttattattttttttaattttttttttctggttttgtatgagagagaggttaaaaaggtttggtttacactgagtatatgttgtcaagtggcaaaagtccacatagctctcctgttttctgtatacgttcacagcctcaaaaaaaataattgaaatggctttaaaaaccaaacaaaacacctccatcctgtgataagtacctcgaatggattcagctttactcctttgtaactcatctttacattttcagcatatttaaacaaaccaacaaaatgaaatactaatagtaaaaaggctgacccatgtggctttgcagtgctgttcgtccagaagcatggcacacgatgcttgtgcatgtggaaacttagcgactgtcaacatacattctcagggatttatccaaaaaaattaaaaaaagaatgagagcatttattgtactgtatatatattatagtatatgtctgaatattgaaaatataacattaactaatttataaaaaatattctatgtaatgcaaaatacttgaagctgcagtagcttggttttaaacaaaaacaaaaaaaaaactgagagaaaacctatcagaaggactaaaagtacgccttgcttcagggttggctcaggtggtgaacttcatgctgggcatctatgcagagccaccttttggattgcatggttggactgagatctattgggagaaattatatatgtatatatatttatacaacttatgtatacatatatatatgtatacacacagacacacacacacaccaccaacaaccaccactacaccacacatgcttataacaggcactagaataaagagggacaacaaaatacacagccagagcagcaagccttagcattaagaatatacaatatgccggaattggggttcgtgcctcctagcctaggaaacttaaaagaaatatccttttgacacaaaacacaaaatgttttccaaaacaattgacataatgatacattacgcctttgcagtgagctaataataagctaacctttgtgcacaaataacattatatatattatatatctattctgcataggtattttgactttgtgcaggacagaaagttgtgtaggtatgactgttctacttttcagttttctttttttttaatatattttattttctctagaaattactcaaacaaaagcagccttctatcttgccttgtcttaatgctttaaaataaccaaactggagatctaactaccaaactgttcattatattattaaataccaactttggttacagtatagtgtctttactttagctgatggttctgtaaccttgtgctttttaaagcaatttttatgttttggtgcaaaagttgtccagtgtctcttgttcccttcactagagaacatgcttagaggtatgtttgtaggtatttttgtttagaagaactatttcatgcgctccattttatttattataataggtaaaaagaaaaaaaaaggttgtaattcatcacccatgtaaacatgctcatgaagttgaaagtaattaagatttgatacactgatatcaatttatttatgtaactaaatcactgttttataaacttgttaatgatcaacaatttttgttttgattaaaattagttttttgaaagttgattctgcctcctttatggtatatctcttattgcacctgaatttggtgattatagacttgggtagtactacgcctccaagtgtctaatactatattgactcatccagtaaacgtttatgtgctattttccaggcactgtgctaggccctggaaatgtaatggtgaacaaaatcagaccctggacctcactgtctgcttaatggagaaggcagacataagccaaataatcacaaagataaaatatgaaacagaatagtctgttttctgt

SEQ ID NO: 115499 - DNA, 1045 bp, Homo sapiens
gagaagattagcatggcccctgcacaaggataacatgcaaatttttcccatattttttgtacatttaccaaatgttacttttctttccagggataacatttataggtatacagtcctatagtttgcatttttcttagttagatacatccactgaatatttaggaggacgggggttgaattagatacagaacagggtcccttttaggtctaagcatcatgctcctgatcaggaatgatcttcctgtctacctgtcctcagattagaatgatctgaaagacagaatgatctagtagacagaacactggactgagagtcaaggcccagcatctagtcctggctccaccaactgctaactgtgtaactttgggcgagtttcctctgggttccgttaactcatctgcatgatcaagctgttactaactgacagagttctgaggagtaaatgaaataatgcaaattaaagcaataaaaagctctatgcacaagacttgtcctggaatagcaatgatcttccattctcacatttcagagaaatacggtatctaaagaggtttctggattccattcaaaacacctgcataatgtattatgaataaatttggtagactaaagaaaaaccataccctgaaactagcttatttttaaatgtttttgcaggtgtttgaagaggaggggctcactctaaatcttgaagatgttcagcctcgaaaaagtagaagtcattgtgaccaaagatgatgccaccatgcctttgaaaaagaaaggtgatgagcctcaaatggaaaaatacattcaagaaaggtcaatgctagtgagtatgaatgaacacatagcaaaaatttcaggtagaacagccatgccaagggctggtgggacaggtgaggccgagtgaataaaaagaagtagccccagagacactcaaggtggttccagctgcttttgaaggaggtttctttctaagaggtggctgggcttggtttcagcgtattccaatttgggactcatgaactgcaactaataaagatcaaaaaactgatacagaaa

SEQ ID NO: 115500 - DNA, 1464 bp, Homo sapiens
tcaaacgcgacgccggctagctgtgggccgggccgagcgctcaacgctccagcggctgggtaagccgcggccgccgcccaccccgctgcagagctgggcggggccgcctggaggcagcggggagaggccagccgaaaaggaagaagagacgccggaggcgcgctctgcgcaggcgcgcggcgccccgcctccccagcgtcggctccccggcgggcggtgcgggccctcccactctaccccgcgccgtctcacggccccggccctagcttcaccccgactacccggcgtgcgcgtcctcctgccggcctgcaggcccggggcctccgcctgcttccccacagctgctccttgcggccccgcttgcgttcacgctgtcgcccgggccggcgcggccgcgggcaaccgctccccctcccacacctaccccgccccctccccgccttttccgccctccggtccccctccctcggcccgctgctgctgctccagatgaggtgatggcaacggccaacttcggcaagatccagatcgggatttacgtggagatcaagcgcagcgatggtgagccgcgctgccagccccgctggcccgctcggccccgtgttcgggtgtgcacggaggggacgcgggcgccggccgcctcattgattgcttcgccgggctgtgggggtgggaaggcggcggccgcggcgcttttgtgtgtggcgtgtgtgccagtgaggccggcttggggtccgcccgggcgctgctgcagttctccggatcgggccgcgggggagggaagccgggtggggaaagggcccgggtgtcgagggtcgcgtctccgggggtctctgggcgagggccgctcgctcctcctcccgcaatctccagcccccccccggggacaccagcccgggagggagcgggcttcgttagggatgaccctgcctcgcgcttccccttggtctttgcattttaccggcttggcctctgacggggatggggatgggggtgggggagcgggaagaccagcgatttcacatttagagaaccgactgctggtcggaggccgagatggggggaaagagccagttccgtcgccttaaactgccgtctggttgtcaggcctccccggtttcgtcgtcgaccatgctgctttcttttttgccacttcttgggagaaaaatgtggagaatatcgcgctgagccatgaataagggtgggggagcaatgggaagaaatattcgatgggcttctccaaggtgatgagactgtaaagggaatgataggggatgggcagagtcaatgcgaggcactgctgagagagtgggggtgggcgaccggatgttgatattttcacaccctcgggagaggtaactgagaaaagtgtaaggcgaggtgaagacacatgcttcatttttttttttaagagccttaggcttatgtatctttctctaggtttctcttggggaaaatggttta

SEQ ID NO: 115501 - DNA, 1056 bp, Homo sapiens
cacagtactgtgactgtattgatacatgtaatctgaagagaatcttagaatatttccaccagaaaggtttttggagataaactagttttcatttttataaatgtggaaacttgagtcccagatcaccataagtgacttatctagattcatacaacttgtcaatggcagccaggaacctgacatgcttagcatagaaatcagactatcaagaactatgacagtaaaggaggaattctctgttattttggaaccgtataccgctttttacagcccagtcaagatgtaggaaattgcttcttacttcggagaaaggcaccagcgagcagtgttacagagcttgattagaatgatccctggtaagaagtgctatgttactacaagttcaccaaacctaaaattgtgggaggaaagtattcttgtttcttagttaagtattggtgtaaagagttccttttaacatctgaaatcaagaggcaattgaagatttcaaaggacccatcaggaattttggagttcagggcaggcaaagaaaatctttagaaaagattttaaatggcctaattctttatatgctttgccacatttttcttctgctagttcatctttacacgtcactatataggcttctggagaatagcatgtgtaaatttaagtaataaagatgaaccatgtggcaatacagttgttctttaggtacaattatgtgattgattatgggggtgggatggaataggggcatttgtgacctaatagttcccttttccctgaggactaggacgataatgtttctgtatatggatttgttagggcttaatagttttccaagtgcttcaagacatgttagctaattggatcttcacaggaactctatgaggtaagcaggatagaaaggtggcagattattggtttataggtgaagaatctgaggttggattatttgccaagatcacatggttaataaggagcatagcctgggccaaagcccgaatcccttcactcccagctctctaagtgctgctgacagatgtttgctgattatggtgtgaagttgtatac

SEQ ID NO: 115502 - DNA, 1747 bp, Homo sapiens
tgacgtcatctctttaagggatgaggtgttttatttcttgaaatgcagctgctcttttttactttttctttgctcttacttttggcctattttttctgtcctggcatttgccttctctttttcacccttaggattctaagtgccatttcagtattcagaatctcttaactacagtttgcaatttaggacttaaaaagaggtaagcaagggataaataggcacagcacagaggcagtgaaattattctgtatgatactataaaggtggatacatgtcatgatacatatgccaaattcatagaaggtacaataccaagagtcaaccctaatgtaaactagggactttgggtgataatggtgtgtcaagataggttcatcaattgtaacaagtgtacctggtgcagggcattgatagcgcggagggtgtgtggggttaagaattgtacgggaaatctctgtaccttccactcaattttgctgtgaacctaaaaaaggttggggaggagaggatgcaaactttaggtgttaaaagttaaaaccactcttgaaataatggaccaattaatgacaaaaaaattataatttatgaatgaggattagtcatataggtgtacaattaaggtaaaattttgccattcatttttgtcatgcatagtctattggccaatgttagaagaaaaatttttcaatgagctatagtatagtaaaaaggattcacatatgtatggcaactttagcccttttttttttttttgaatcaaagtttcactcttgttgcccagctggagtgcagtggtgcaatatcggctcactgcaacctctgcctcccgagttcaagcaattctcttgcctcagcctcccaagtagctgggattacaggcatgcgccaccgtgcccagctaattttgtatttttagtagagatggggtttctccgtgttggtcaggctggtttcgaactcctggcctcaggtcatccgcctgtcttggcctcccaaagtgctgggattacaggcgtgagccacagtgcccagccacctataagatttttaagaaatgagaacaaattaggggccctaattagtgaggtacatcttagaatttaaccacagaaagctctttgatgaaatactgctgttggtcaaaacttgcctatattgttataatgaggaagttgacttgtccaaggtcatacataaaataagtagcaaatctgagattagaacatagtttgtctgcccccaaaatcctctacatactaattcattgtagactgtaattcatttttgtgccctattaatgttccgggcattggaagtcacataattaatttcataatgcttttcttttcctttctagggtatactttttattaatcaggtgtttttattaatccaactaatatttgctgtatggccatcatgtgtcccttcatctgatttctttgaagaattagttgaaggacttttctctagaagaagttagtttgccagctacaacaaaataataagtagctattgcactcagtacaaatgctctgtggctctgtaatttgacaaagacattctagttttctccagtctcttttgctattgcctatgtttaaactctcttgctcacaagactttagacaatttaaacaggaacaaatgctatcgtaaggatgtctcatattagatgagcaacaatattgtcaggaaaatagtaacaattatagcaacttgctaaagtgctgacataatagattga

SEQ ID NO: 115503 - DNA, 1658 bp, Homo sapiens
tgtgtttattttttaaattatagctgatactgagagttgcctataacttcgctctaagtatatggtaagtgctttctttatatgctctttggttgcagttttattaagagtaataacattgcttttaagtgtacatgctgttttgggtttccattaagaacaatttcttaattaaaaataagtagagcttcttttccttctattactcagattttttcctttttaatctttacaggtgcttctttccccattctctttaagtattgatgttcttcagggcttgatcctacccctgcagtacttctcacatagtattctctttctgggtaaactaaatgcttctctttagcccacattggctacagacatgtactgttcgtatatgtcatggattactgcatatctccatttggatatctcataaacactcaaattcagcatgtccaaaattgaacccatcaccccttcctcaagtttacttcagtatttctcattcactctattgctccagtcagaaacttggttgtcttccttgactccttattctttcttgaccttatagccttattaccatggtctcttaatttaatgactcaagtaactcttcctgcactttttctgtacctaccgctataacttttggtcatgctagcattatgtcttgcctgtgctgttgcaacaaattcctaataggcctctctacctaggagagtaatttggttaacaacaacaacaacaacaacaacaacaaaaaacccaaaacaataatttggttaattactgtttcagagtaacctttcaggcatgtaggtttgaccctctgatcacaggcttaaaactttgaaagtgttctctacttctgttgccctttttatgaagcccaagtctaacatggcttatggtggaccctgaacaaactaacctgcctcttcagtcttattcttgctgcttatttgaggcacactatactccagacaagctgaactttcttggaacactccacttctaactaacctagctaactgctgtatctccttttgattcctagcctaagatgggtcccctgctttatgagtggcgagtcccctttgtttgctctgtcaaaaaactcattgtattgtattatatgtttgtgtctggtcagactcaagttcctttatattccccactgcctagcacaggcactctgcacactttataaattatctgtttgctgaatcagtgactaaatgaacttccagcttctctttcactgctctgtctattcaagttttgacattctaaaaaattgacttgtgttgttcatcctccaggcatcaagaatatgacatgacaaggtgtgtgtcactgtttttaatgtatacttgtaattttctctttaagtttaattgcctgttttgaatagcaatatagtcccatgactaatgaagttccaaaatgatatatatgtatgtatgtatgtatgtatatatctattagtctccatcctacccctaccccacagctagctacccagttcttctccaagagacaaaaatattactagcttcttatatttgtagagcattacctctttttcatttttcaggaaaatctctgcttatatatctctatctacatgtagtataaatatgtgtaaatatatacctttttcctac

SEQ ID NO: 115504 - DNA, 1035 bp, Homo sapiens
gaggcatattttcaactcatgagtttaatcatattgagagtcaccacttagaggttattagttaccacttatacatggattattttttatattcatcttcaaaatgagggatcttcattggaggatttttgtagtttattcttcctggtatatcattagcaacctttactgtacattagaattacctggaatagattaaatcagtatattttaaaaataaatatttattttaaaaataaggatttattttaattataaataagtatttttaaaagtattaaaaatatttttaaagtattaaaataaatcagtatttttaaaaatactgatttatgggccccactcccagagattcagttttattttacctaaagggagaccctggcatcagtttccttttaatagtactcatctgatttgaatgtgcatccaaggttaagacagctacattatttgatatctttttttgaggtgaataaaaggaagtcttcatgaatgaattagaggaccaaaagtttgctgccttaatctgtacagtgtccaagtcttagaaactcttatgaaacctttttaggataactgacaatgtacattttatagtattctgatatttcagtttaacaaggggttctaagctgtctagaactaatattttataaattaccccctattattcagaaatgatgattaaaacacatattattgtgaagctacttaacctctctttgtttcagtttcctcatcgatgagatgggaatagcagtagtaatgacctcataggttgttgtgaagaaagtccttagatcagtgcctggctcatattaattcctgaatatttttggagggtaggggaaaatatataaaggaacttgaatattgatagcattaatagtaattcattaagattatagtttttcttcattttgttttatattcttacatgtctgcctacttttgtttaattgaaagaagctcagatcatgatacatatgagggagtaaagatagaaaacataatgaacattttttcctttca

SEQ ID NO: 115505 - DNA, 1046 bp, Homo sapiens
tacattggtatctcaaatttttatgccagatttagattttcatacgtaagtttgcaaacattcatttctaataattataacaccagttttagcagtattgttattttggtttatctaggaatattactgtctttgtaattgcttgaatactatatctgattgccctttttcataaaaatgcctagaaaggaaaaaattagagttaatgagactaagaattgaaggtgttacaaaggaaatacttttgagaccaactctttttgtcttcaccaagtgtactgggtagtcagttgtaaaaaaaaaaaggatcaaattaaaggacatatgaatactagatagagatatttgtgaagaatatgtttaaaggggaatcataattgttaattgtagaatttttttttagctttctgaagagtccacttttccttttcattccctctttctactcctgcctcataaaatataagtttgacttttataatagtttttaagaaattattacaaatacaggcatgtttctgtgtgtatgatttagtaaacattgtgtttttaccctatgtttatgtttcttaactttatcaatatttatccttctcctctatctcttatacttaactattatggattgaggagttacatgtttttttgtgggtagggttgggaggtaggggtttgatctacttagcaggctcatccctagttctgtttgaccagaactttttcctgctccttttgttctgtactttcttcagttttgccttttacaaaacaaaacaaagacagcagttatataaaatgttctacttgtagatctgttttccatctttttttttttttgtttttttgaggctgagttttgctcttgtcgcccaggctggagtgcagtggcatgatctcggctcactgcaacctctgcctcccagttcaagcgattctcctgcctcagcctcctgagtagctgggattacaggcgtgtgccaccacgttcagctaattttgtatttttagtagagacggggtttcaccatgttggtcaggccggtctc

SEQ ID NO: 115506 - DNA, 1049 bp, Homo sapiens
ttatcctggctaacatggtgaaaccccgtctctactaaaaatacaaaaaattagccaggcatggtggtgggtgcctgtagtcccagctactcgggaagctgaggcaggagaatggcctgaacccgggaggcagagcttgcagtgagccgagatcacgccactgcactccagcctgggcaacagagtgagactccgtctcaaaaaaaaaaaaaaaattaatatttgatagggtaaatcttactacattgttctttcaattttcaagaaaaaaatgttttgcatattattccttaagatgacaatatagaatcattttgtcaaattctaaaaataagtggaaatgggtaatttgggaagggattgataactttagtaaagttggtctttttatcctagaacaaggtttccatttcactgttttatttcctaatattttactgcatttaaatcatgcaaattcttcttattacattaagactctgaagtaaatgaatgtcaggggccagtttgtatttcttgaattgttttggtatatgttgcatattattcctgataatattaaatgctctatatggggaatctaggatttgagtaagaagtgatagcacagttctttctggtgttttttttgttttttgttttggtttttttttgagacagagtcttgttctgtcactcaggctggagtgcagtggtgtgatctcagctcactgcaacctccacttcctgagttcaagcgattttcctgcctcagccccctgggtagctgggaccataggcgtgtaccaccatacccggctaatttttgtatttttagtagaggcagggtttcactatgttggctaggctggtctcgaactcctgacctcaggtgatccacctgcctcggcctcccaaagtgctaggattacaggcgtgagccaccccgcctggccctttctggtgttctatatgggttacattttgttattcatattaatagtcttataaacattataaacattataactgggtttttacagatagaaggacagaatgcattacagact

SEQ ID NO: 115507 - DNA, 1054 bp, Homo sapiens
tttggatagaggaaaaaatgtgtggatgaagctaatagggtgtctaaattaaaagatttagataagaaatggggtgggagtgaaaatagttgtttgtattagaaatttagatttttcaggccagacgctgtagctcatgcttgtaatcccagtactttgggaggccgaggcaggaggatcacttgagtccaggagtttgagaccagcctgagcaacctaacgagacctcatctctacaaaaaaataaaaaattagccgggggtggtggcacaccagtgatagtcccagctgaggtgggaggatcacttgagcaggaggtcaaggctgcaatgagccatgactgagccactgcagtatagcctgggtgatatggtgagaccttatctcaaaaaggaaaaaaaacatatttagatttttcagcatgtgtggtaaataaactttaaggataaaaggcagatgaatccaatattgaacctttgacagtagatattaaccaataggtcaaagaaagactgttagtagaggaaacatattagtttgatttatatgaagatattgatacttgtttttgacctaaaaagaagggaatttcatttagttcaacctaagagaaatgacaagaaaatcagagaatatggttattatattgaagtgtttaaataacataggctttgtactcagggctaggttttaacctcagttatgccacattctcagtgaatgaccttagagaagatactttatttctgagtcatttttctcatctataaaatcaaagatggttgaaggactaaataatataatgcctaaaaatgactaatcctaatacctgacatacaggaggtacttaataaatattttatatgggtatgaaatagggttggcccaaaagagacataaggaattacatagatggggtgagaaaagtcataatttggttaaatataactattgaagatgttagcaaaagcaatttaaatttcattgctaaaggctgttctcaaccagagttcttcatctgaatcaccaaccactgaaaatagagtgaatattt

SEQ ID NO: 115508 - DNA, 1038 bp, Homo sapiens
cttattccagcgccaaaccttgtatcaattaaactcattgcttcctgcaatacagtattctttgtaaacaatgttagttagttctaatactttgtagcagatacttagcccaaaatattctagagtaacagatacacttactactttttgttaccatgttccaaatcactgttactaaagcagggcttaaagcagtggtccttaactaggagcagtttggcccccaaagcaaaatgtatggatattttgcttgtcacaactaaggtgatgctgctagcatatagtgggtagagccaggaatgctgctgaacatcatacagtgcacaggagtgtccccctcaccttatccccatacaatgtcagtagttccaagactggaaaaacctggttcaaactaagagttctaaactttgaaccataaaaactaaaaatgagattctggcctcagtccatcacttatgtccagaatttttaagagagactgtagttgcttttagactctttaaagtaaaccctgcattgcatctagatatgttacctcccaaagatgtggaaaaccagagcaagataagtactccctatacatatctttccattttattattgcatctattgggcctctgtagagccttaatttggagaggttagatgaccagaactaatccaggggagtatgacatcatgagtttttacagcctccatgtttgagagagtgtgcatttctgtcacctttgccacacccagggaattatcttgccatgactcagcattagcctttagttaagtattggtgcgtgtgtacatattattattgctatattgtcttaacaaagtagattaaaatggaacagcatctaagacacgctctagagatcggagaagttttttttgtttgtttgtttgtttgtttgtttttttgaggtggaatcttgctctgtcacccaggctggagtgcaatggcacgatctcagcttactgcaacctccgcctcccgggttaaagtgattctcctgcctcagcctcccgagtagctgggat

SEQ ID NO: 115509 - DNA, 1040 bp, Homo sapiens
ttcttaccacaaagtaagctagagaaaagaaaatggtattaagaaaatcgtaagaaaggagaattatatttactattaagtagaagtgcatcatcataaaggtcttcatcctcatcatcttcacattgagtaggctgaggaggaagaggcaggctggacctggtgtctcagggctggcagaagtggaggaggtggaagggatggcaggagaggcaggcatactcagcgtaacttacattgaaaaaaatccacataagtggacccaaacagtttaaacccatgttgttccagagtcaactgtatttcttaattatactgtctgtgaataaagatgttttatgtctattgacattttagagaatactatcttaagtatgtttgattatatttaacagaattgtaatttggtttctgttgcacaaagatgcttattggattatcgaatttttgtccttgtaggaatctattcggtggttagaagatgaaaaggccctcttagagatgactgaagaagtagattatgatgtcgattcatatgctacacaacttgaagctattcttgagcaaaaaatagacattttaactgaactgcggggtaattctttttccattttaatgtttgaaatctgattggtattggtatgtatattggtgagagggcttcttcgtattgcaagaggacatacgaagtgaaaattaggggcactgtttagcatctattttccagaggtataaagacaactaaccattgtggtttttctaaaagtcatggcatagcatttcaagttttctctcatattttaagaagacagtcatcttaaagagagaaaatgtatttttaacaaatttataaattttatgtacctattcagatctttagtttggtaggctgatgcttatgagaattatcttctttctgtgccttttttcgggtctcattctgttgcccaggctggagcacaggggcgtgatcatggcttactgcatcctcaacctcctgtgctcaagcagtcctcccacctcagtctcctgagtagctg

SEQ ID NO: 115510 - DNA, 3447 bp, Homo sapiens
tgcactccaacctgggtgacagagtgagactccatctcaaaaaaaacagaacagtaacagtttgagagcaccaaatctagaagttcttaaattcatttcaaaatttcaaaaaagttaactttttaaacatcactgtactttcaaaaaggggaggaaaattgagattccaactttattctgaagtctacagagtagggtttcgtaaccttgacactgttaacatttggggctaggcctttctttgttgaggagtgttatcctgtgccttgtacaatatttaccagcatcgttggtctctgtccactacatgacagtagcaccacaccagttgggataaccaaaaatgtctctagacattaccaaatgcccgctgggggccaaaaatcatatccagttgagagccactgttattgaaagatagcttatcttcacagctgcatgtaatttgtctgacaatttactaacctatttctagtttttacatgactctagagcagtacatgaccagaaaatgcgtaaaatcaagaaatatatcatttagtcatccccccttcacaatcccccttcctcacagtgaggacaaaatgtaaatttctaaaaattcaaatatattttacatgttcatagctttaaaaaggtaaaatagggggtgctgagcacggtggctcatgcctataatcccagcactttgggaggccaaggcgggcagatcacctgaggttgggagttcgagaccagcatggccaacatggtaaaaccccgtatctactaaaaatacaaaaattagctgagcgggtggtgcacgcctgtaatcccagctactcgggaagctgaggtgggagaattgcttgaacccatgaggtggaggttgcagtgagcctagatcgcaccattgcactcaagcttgggtgacagagtgaggactccatctcaaaaaaaaaaaggtagactatgtattttacaatgtgaaacctgcctatactctaggaggaattccaataaattaaaacagagaactgtaaatgtgccaaacagaacagaaagctattgaaagatacagaaaaacaggtatttctggaaatctgtaacaaaaaactttcgcaatagttgagcattctatttagttccgagtttctagacaacaaagaacaaaaggaaaaatactgagttactgttaggaaataacacagctgacttgattgaacccataaagttgtaaactcttactgcgtgtaatacaatacttattccctctttcttttctttttccaagataaagtgaaatctttccgtgcagctctacaagaggaggaacaagccagcaagcaaatcaacccgaagagaccccgtgccctttaaaccggcatttgctgctaaaggatacccagaaccctcactactgtaacatacaacggttcagctgtaagggccatttgaaagtttggaattttaagtgtctgtggaaaatgttttgtccttcacctgaattacatttcaattttgtgaaacactcttttgtctacaaaatgcttctagtccaggaggcacaaccaagaactgggattaatgaagcattttgtttcatttacacaaatagtgatttacttttggagatccttgtcagttttattttctatttgatgaagtaagactgtggactcaatccagagccagatagtagggggaagccacagcatttccttttaactcagttcaatttttgtagtgagactgagcagttttaaatcctttgcgtgcatgcatacctcatcagtgattgtacataccttgcccactcctagagacagctgtgctcaccttttcctgctttgtgccttgattaaggctactgaccctaaatttctgaagcacagccaagaaaaattacattccttgtcattgtaaattacctttgtgtgtacatttttactgtatttgagacattttttgtgtgtgactagttaattttgcaggatgtgccatatcattgaacggaactaaagtctgtgacagtggatatagctgctggaccattccatcttatatgtaaagaaatctggaattattattttaaaaccatataacatgtgattataatttttcttagcattttctttgtaaagaactacaatataaactagttggtgtataataaaaagtaatgaaattctgagaagagttttatcttaggaaaatacatatatatgcagtgtgtgtgccagtgtggtattaacaagactaatagtgcagtttgatccttaccaatatcattacttaatttgaagtgttcattagcaccccaaaatataccttttctatgtactgttaaaagaaattggcttctgatgcatgaacatttacatgtacattgaaagtagtccataatagaagttagtttaagccaagtgtagacagtacattactcccttgaaaaagaattaagttgaaagagttgactttgccttaaaaggcagatctaacccaagctccatccagtaccaaatgtgaaacttcattgttgtttggtgagaatcgccaaattctcactaatacattggtatggtgtagggcatgctactttttaaacagcagcacttatttttacagattgctactccaaggaagaaaactggccacttttcatgtaaatattttgttcaaagatttgtatatctctctaggagttttccctcagttcccaggatggggtccaggagtagattaacagctaaaaatctcccaaggatatcttgttttgatttatttactccagggaactatcagctccttcacaggagccaaaggggagctatgaatagagggtcacatgagccagattctttactgttcataaaacccagagagtagttgtgaaagatcctaatacaattgtgaaaagctctgtaaacatgaaatctaaaacaaatgtagattttcacaatatgcttattaataaatgaagtctatggaataagttttagagataatttacttcagtcacctttgttttggaaaggactcaggttttcttgcagctgtaagatatattctatttgtgtttatttcaaagggaagaggaaggatggagaactgttacaattgaccttgcaaaggatatttaaaaaaaaggtagtttttgagattaaccaactttcaaagggcaataaagacatgtgaatttgctcattttaaagcacaacagatgattagcttcaaatttattatttgcattggatgggtactgtctttggaaagtctccttatagacaaatatgctgccttacactatgatggcttcattctgatcaggtattttaaaaattagtaccagaaaagatactggaggtaatataatacagtccttcagctttacagatagtgaaaactgaaggccagaaaaggaactaaaactcagcagttcataggggtagagggaaataacctgag

SEQ ID NO: 115511 - DNA, 1086 bp, Homo sapiens
gcctctttcattagagcctttatgtcgtaatgaatttgactaaaattatcttagactttcattatcccaggcctaagaactcactggcatttgtttcaaggtaactgaacaagaagctgtttggaattggcagaagtcagatgaaaaaccaatcttacatgccccttcttcctctcttgagctgttgtttatattcaaattaaatacacattgtttctctctgtagatacctatgtacttaatagattctagttagtaaactgcacatgcccaataactttgaggaaatttagtgaaaatgaagaaaaagagaaaatatttctctttagacctgaggttatgtttaggctggcccatagaaacaggtccagataaatttctaaaaaagcaaagtagatatttatgaatagtattcaatgcctaggattaacatctaaaatgactcagtagtactgctagccagccaataaaatataaactccatttgtcttagttatatagaactgtgtttccagcttagaaaaagtcaaaccaatgacttttagaacaatctactctcattttttattcagcctctagaacatggaagctttaaaagtgaattggctaaataggcaagaccttctgaaagttaacatcttaatgattaaaaacagtaagtacaggttagtaattacctgggtaattaattgaagccttattctgttttcataagacttacttgcttaattcaagcaaaacaaattttggtctaaattacctagataattatgacagctttttacttgagaagtgtagaacttgcttcaggctacaaaactgtattattcctaaatggataaccaggtaggattctaactggcattattgtatgcttaagattgatttaacaacagctattcccagtaaggaaattttaaaaatcagatccagttacatgtattatgatttttctaccttatggactattttggagggataagctattaagactaagactatgaatgagagttggggaaggagcaggaagggaggaacctgcacaccacattggaacctgcacaccacattaacacaaaggcaatc

SEQ ID NO: 115512 - DNA, 1660 bp, Homo sapiens
ttgtacattccataagatccttaaaagacaatatataatgtataactagcacaattttgacttgaattctgacaggtcagtgctgctgtgtatcctgtgaaacagatatgagcaactttgattactccaccctgtcctctaactactgacagttgtttttagccataacaagaatcagattcagcagttacaggttcctcaaagctgtagatatgtgtagcttgcacaacttaaaataattgtgtagtttactgtcctctgaattgtgaccacgtcttgtttcttgctcacatagcagttacaaatatagttattactttctttgtatagaaattgaaataaagttcatatggctcaatagcagatttctggttgtgagcctcatgcgtatcatttgtgtaacagtgtgtgcgatgtgatgtttgctatctttttagcttccagtttaattagaacagagagagaaaggccaattttctttttattttttatgactcagaacctatatggtttaatgtatcacaatactatctccattttctcttttatgggcaaaaagtcattagataatctgcctaagtataatagaaaaatattaagctagattaagaaaaatatttggataaaatatgtgaattaagtgtaaaatccttttggataaaatatgtgaattaagtgtaaaatccttaatattcccaaggcttgggcaggtcacctctttgagaaaaatgaggtggttaaggtcaaatctgtaggaagaaaatgcattattttgaaaggagtaacaattgctttaaaatttaatttacagttgtaattatttgtgaagtctgaaactaataactatttcagaattttaaagaagaaaatggctaatatagacaggattactaattcaaggtattccaagtttttgttaataaagatcagccacttttaattagagatccaagtcttaatgtaaaaatcaggctttccaaagtctcattaacagatatattaaaggtgactattttatgacttactgaactaaaaaaaagagtcaaggtgacctcattaaagatatgtcgttcatttattctgaatcttatattgatagataataccagaagatttcagcatagcagataaaatacagcaaatcctaaccagcacaggttttagtgacaaacgggcccgttccatggacatagatgacttcatcaggtaattacatttttgttttcctaagtgtttacatttctttactgtgacaccttcagattggagattttaaaggcttttaagcggtataaggtgctacctgggagagttattgcatagcacttccatggcatggaatagtatttggtgtagaagatggaggctagttagctgcagcagaatgaacattttctttaagaacagtagtaaagaacagtccgagccagaagattgcctttgtgttaatgtggtgtgcaggttccaatgtggtgtgcaggttcctcccttcctgctccttccccaactctcattcatagtcttagtcttaatagcttatccctccaaaatagtccataaggtagaaaaatcataatacatgtaactggatctgatttttaaaatttccttactgggaatagctgttgttaaatcaatcttaagcatacaataatgccag

SEQ ID NO: 115513 - DNA, 1055 bp, Homo sapiens
taactccttcaaggaggtttaggtgtgttacacaggaagtatctgaagtcatgtctgttttgaatcttatttttgaaaatgatacttagatttaaataaacgccatgttctttgttcagatgtgggaccattttgtttttccttccctttctttttttaagatggggtttcactatgttgcctaggctggacttgaacttttggtctcaagcgatcctcccacctcagcctcctgagtagctggtactacaggcatgcagcactgtgcctggctttattttttcaaattaaaaaaaaaaattgtcatgctttgtcaaaaaaaaattctgaggaaaagacatattcagtgaaatgcgccaaagtgcaaaaatcaaatgtatgtcttacttttgcatgtgtgtgccagccagatcaagattacagaacattttcttcacttcagaaagtttccttcaattgtatatattaaaagacaaaataatacctagtgggcatagacaagaacaagaagtttgtaatttgaagaaaatgtctatcttctatttcaggaatgggatggtctagtaaggataacctttgttaggaaaaacaagacactctctgctgcatttaagtaagtattacactaatttctaatgtataaagggccagtgctccagatactatgctagaatttggtccttttcctgagcagctaccctaaagcataaagattatgggtccagacaaacttcaccttttaaactatctttagagcttgggaggctctaaagcaaacttaatgaagaaagtttgctggagttgagagtcagatcacattttttggcaaaacaggaaaacactcccaaactctgaccatatatctgctctagttttttgttggaaaaatgaggtgatgatggaccccttccacacttgtgaaggatatgtgtcatgtaattaacctgggaaaatgcagctcatcaatttggggttcaagggtaaaagagaggtgagacacagttttacagggcttggagatttttttttaggggattttttgtggagagtctaga

SEQ ID NO: 115514 - DNA, 1049 bp, Homo sapiens
tctcaaaaaaaaaaaaaaagtctacatcttttaacccgtcaaatcaaggaaacattgaacgtcacaatctgcctcttcagtctcacctcttccttaaaggtgtttgctaccccataaatatattactgctactgaaacaattttatttcactttgttttcatagaagaggtgatggactagtgctgatttgaaacatctcatccagtcattaaaggcttatatttgcaagctatcttgccatgaggagtacagcaattataaaaacaaagccagctctctcattctgtggcaataaaaaaaaggctgaatgtgttctcctaccttataatcagctgccaatgctttgctatttctctcccaagaaaattcattgcagttaaaattcatttatagttgacaatgaccattttccttattcctttctgctttcttttcaggtgtgctatacttatgtttcaaagagaatttgccctccgactggttgcaaaacctggagataagttatactgcagactctcaattaatacacagctgttggcacgtgtggaccatctaatgaaagtaagtgaattttgttttctttctcttttttctgagatagaatctcactctgtcacccaggctgcagtgcagtggctcactgcgatctctgcctcccatactcaagcaatcttctcgagtcccgagtagctgggactagaggtgtgcgtcaccacgcctgactaattttttggtattttttgtagacacagagttttgctatgttgcccaggttggtcttgaactcctgggctcaatgatccatctgccttggcctcccaaagtgttgggattacaggtgtgagccaaagcacccagccagtgatttttattattgaaataatctagcttaattcatccttgagcatccagttgtgccttctgtgaggatagcatatctggttactaaataaaagttgcctttgtgagtactacttaaatactttttcattaacaggtgggaaagaataacttcagaccaccgcccaaggtggaatccagtgttgta

SEQ ID NO: 115515 - DNA, 1506 bp, Homo sapiens
ggagtttaattaggaaggaaatacccaacgcctcccctttgtaccctataatgctggtgcctttcactggccaattccaaccagaagttgaaaggtaagggagctgaactgcattatctgtaggatgcagagaaaagcggataatagatctgggagggcctttcatggtggctcacacctgtaatcccagcactttgggaggctaaggcgggtggatggcttgagcctaggagttgaagaccagcctgggcaacatggtgaaaccccatctctacaaaaaattggctgggcatggtggtgcctgactgtagccctggctagcagggaggctgaggtgggaggtttacctgagcctgggaagttgaggctccagtgagccatgatcctgccacttcactacagcctgggtgacacagtgagaccctgtctcaaaaaataaaaataaaactaaagatagatctgggagccaaacagagtaagaaacacattgtttaccatgtaaacagggtctatatagaagtagggccaggagctgtggcccacatctgtaatcccagcactttgggaggctgaggcaggaagattgcttaaagctatgagcttgagaccagcctgggcaacaaagcgagacccaatctctataaaaaataaaaaggctgggcatggtgcctcccgcctataatcccagcactttgggaggccaaggtgggaggattgtttgagcccaggagttttgagaccagcccgggcaacatagagagacccgtctctattaaaaataaagaaaggaaattagcctggtgtgctggtacacacctgtggtcccagctgcacaggaaggtgaggtgggaggatcccatgagcccaagacttcgaggcagcagtgagctatgatagcgccacttcactccagcctgggcaacagagtgagaccccatctcttaaaaaaaattattttttaataaaaataaagtcagtgaaacctcagctgaaattgcaataaaatttcaatttcggccttatttgacatccattttcatttacttgagaagttatctatgccatgtattgtgtatctcagtagatgtgacatactaacagtaagagcaattgcattgtacgctcttctctaacaacactgactgcagagacatgtagtgtatttttttcatcatctgttgaattacaaagcatggagacagatgaaacatgattctattgattatatgagtagaactctcacataatctggttgtctacttttctgggtggtggtgtttgtttgtttgtttgtttgtttttgagatggagtctcgctctgttgccaggctggagtgctgtggcgcgatctcggctcactgcaacctctgactccctggttcaaacaattctcctgcttcagcctcctgagtagctgggattacaggcacgtgccgccacgcccagataatttttgaatttgttagtagagacagagttttaccatgttggccaggctggtctcag

SEQ ID NO: 115516 - DNA, 1050 bp, Homo sapiens
tttgagcatctgatgaaagctatggccgtagaatattagagctgtgtgcagacattcaattttgtgtacagtttctgctcttctgcatccttgaaaccatacatgggttgaaaattgaaaaatcttcgcccaacacgtacagtcctttcccatttgaacttgttgatacgaacagagaaggtaacaagaggctattggaatatttccagatagaaagcagaatgccaatcccagaaatgctgttgctgcttttctgactcctaaagttgaacagtattcctccaagttaggagaggtcttagattttcatttgcaccaaatgttattgaggtaattttgttaaccacgtagatcatgaagaaatctaaaaatggagtcagattaagagctcttatcggagcacatatgagtaaagatgttcaggtgtaaattaacttctgtgttctgatgttgccagaagagctaaagtgtttgtgcttgcttttaggctgccttaagaccaactgatgtagtgctggaagttggacctggaactggcaacatgactgtaaagttgttagaaaaggcaaaaaaggtagaaaggggatttaatgtttggtatcacaaatgactatgttagcaagctcagttggtttacaatctaaatatgttttaactaattgctattattttagtagtaactcctgatcccttgttggaaattttgtcttagaaaatatgagatatttcagccaggcgcggtggctcacgcctgtaatcccagcactttgggaggccgaggcaggtggatcatgaggtcaagagattgagaccatcctgggcaatatggtgaaaccccatctcaactaaaaatacaaaaattagccgagtgtggtggcaggtgcctgtagtcccagctacttgggaggctggggcaggagaatcacttgaacccggaaggcagaggttgcagtgagccaggattgcaccactgcactccagcctggtgacagagtgagactctgtctcaaaaaaaaaaaaaaaaaaaaaggaaaatatgagatatttcag

SEQ ID NO: 115517 - DNA, 1493 bp, Homo sapiens
gcacgtgaatacttctttggacctcagcgatcccagaacctaggctactaaaacatccataggcttaacctcatcatataacttaaacagccttcgcaacaccgagagcaccacaccaacaccttcttatccagccctggttgggacaagggctccaactccagactgcagtcctcggtagcgcggtgtcttctgggatctgtaggctcccgcggttcggccttcctccctctgtgactccaattcccggcagtcagtgggctccaaggtccgccctttttctggaggaggagctcagagcgtacgggagggggcggacccttgcccctccggcgcttgggccagagtggtgcgggcggcgcgtggcggcgatccccacgtggtggctttctcacgctagccctctttggtcctccttgacgtcccgggcctgtgggcccgctttctgccgagatgccgaaggtcaagtcgggggccatcggccgccgccgcgggcggcaggagcagcgccgggagctgaagagcgctggaggtgcggatccccgcgaggaagctggggtcggtcgggtcaggtcttccggcaggacctagcctggggtgcggaccaagacctgatcggcagaggccggtcaggacgcgctcccgtgagcgcggaaggcaggggtgggtccccgactcggccgcaggccctgcgcgtcgccgctgacttcctttccagctggaggatgaacttataaagagtttgtcagtcctggcgtgacgtttcgtggccctggttggcgcagaaatcttccccatacccatgcagctttcttctctggtactgcctaatatctaatctcagtaggaaaattaatgctgtttcgtattttcttacaggactcatgttcaacacggggattgggcagcacattttgaaaaatcctctcattattaacagcattatcgataaggtgggtgtggaagaggaaagggagagagttgttggtttattaattttattcctatgaatacataagcgcagaaagtctgcctgccgtaaattagatgctctgtaaatatttgttgaatgaatcaaataattgtctaggattcttgggctgtcttctgcatgataagcttcattttgtgggtctgagtttctcctggttcccaattctgtgtctttttgtggattatctactttatagctggacctttgtatttgttcaagataattattcttctatttctaatcacctttttgatcacttagtttttatgtactccatctatttatgtctaaactacacattagaaagtttgttccccagaaaaacatatagtactacatataaattatttggtgtatgctagtaccacatataaattgcttggagtattactgctttctgagttattgatgttctcttatggttatggatgattgggtgttaggaagtgaaatacacacggtgcagattacacttatggttaaaagcaaggaaagcatc

SEQ ID NO: 115518 - DNA, 1856 bp, Homo sapiens
ctcttgctattactcaggagtaagcgccaagcaatttgggtaacttaaaaaataaatatttgcgggagggagggtggactgatgggagtaagattctttaaataactcttctctgctgtgacggatccgctattgatatctagaatataaagcgtgaaatggttctgattgaagcttcaatcaacgcaggaaacaattgagctccctgggagtcggagaaaccagacctatggtttccatggtgacagatccggctagtccggactcctggctctttatactgcgcaagcgcactgcgcaagcgcacacaactgatttggataccccgcgccttttggttcaaagacaaagcccctccttccccttcccgccgttcgcctatcgccttctctctctgccggtcgcatgcgcgctggtctcctgtgacgtagttttcgcgcgtccgcgtcgtttggagctgcgacgccaaacatggcgtgttcctagaagccgctttcggcatcagtaggcggcggcgtggggtctggcagcgtggggagagggaccaaccgacgccacttcgtgttgggaagtgggagcgggagggccgggcaattcccgaccgaaccaaacggtgaggccccggcccgagagccaccgagcgcgcgggagtggaagggagtgggttgggcacccgagtcccgagaggcgggaggaaagtggggctaccaggagatgagggataacggtagcgaggcaagggcggcctgcagacttggctgtttgcgcaaccttaggaacccggggaactgggggctggccgaggcagcccgggagtgggcagcatggtagtggagcaatcagggtgcggggtgggagggaccgtatgctaggctgagcagaggcgagtgtacccatcgtgaccgcggttgcggacctgggtgatgcatttgcccttgggggataggtggtgcaaattttgagataaagtggttatctcgagtataagaccgttgtgcattgttactgcgcacgcgaccttgttgctaatagcaatagtgtgatagctttaaacattagacccttacatgcttttaatgaaaaagtgaaggtagttgtccgtttatagagaggagcttcatggagaggtatggccgccaattctcaagctcagcgactcctgtagatttatatttgggggtatttgtgattcagcaaaactacttttgcttattacgtgtgtcattttttctttattattttgtgacatgttggtgaatgagagaagtactatctgaaagtgatttgactaaatagcaaggactggtaaattacctactagtgccaaggttgcagttgacatacctcctcccctccataatttaaacgagctcagttgtagcgcggtagtgcccttcagatttcggttattcttcagaaggaagaatagtttgtagccataatgcttttccccctcctgggataggaattttcttcctccattttcatgttatttcaaacttctctgttcagtagaggagcttcagattaagggcagggtgactcttctataggagacatccattgcatgacacatattacatctttcatcactgaggaaaatttcggtgaaagtagaaacattttcccttttggttatgatgggactggtattttctctgtttctgcagtaacctagcacagggtatagtagaaacaattaattatagtagtggcttgtggccatatattatagtctcagggtaggagggtggtctccgccctagttgaacttctaaggccaaagagaattttcaccacaaacacatttggctgtggtaatgttagaggttttaaacaaatatgtaaagattatc

SEQ ID NO: 115519 - DNA, 1359 bp, Homo sapiens
gacatggagagaccccatctcaagaaaaaagaaagagaaatataaggttaggatttggaagaaaaaaaaagccattcagaaggaaatcccaggtcaactctgaaccagctaggtgttaatttctgagtcttatgcattctttctctatggtgggaatggagtagtatacatttgtaatcacattagtattcagttataactgctatgtacgtggttaacagatttagtagttaattttacatgttatataatcaatgcaaaatcattgtagacatgaccctgggatttgtttgatagaaaatatggtagtgaattttgcttaagaagtaacataatctgtgttttccagtagatggcactatagctctctaaattcttaaaagccgtaagaccttttttctcagtctgaatacttcaaaatgcatataaaacatgtccttgaataatattggaaacaacaagaatattttcaggctgcacttgggatactatattacggtttaaagcagacatgtctttttcttttttttttttttttgagacggagtctcgctctgttgcccaggctggagtgcaatggcatgatctcggcctactgcaagctctgcctcacgggttcaggccattctgcctcagcctcccgagtagctgggactacaggtgcttgccatcttgccccgctgattttttgtgtttttagtagagccagggtttcactgtgttagccaggatggtctcgatctcctgacctggtgatccgcccgccttggcctcccaaagtgctgggattgcaggtgtgagccactgtgcccggccggagtaattttttacataggattaattcataattttggagagaaatatggtaagtagtgatgagaaaatgtgcattatttgtttataggcaatggcccagcagcacttttctactgctttgtccaattgaattttacgtgtctgctaaaattcattttgttttagtggttatataaaggatacaattataaatgcttgtcttggctgggcacggtggctcacacctgtaatcccagcactttgggaggtcgaggatcacctggggtcaggagttcgagaccagcctgcccaacatggcgaaaccccacctcttctaaaaatacaaaaattagccaggtgtggtggcggatgcctgtaatcccagttgctggggagggtgacacaggagaatcacttgaacctgggaggtagaggttgccgtgagccaagaacgtgccactgcactccagcctgggcgacacagtgagactatgtctcaaaagagagagagagagacatatatatatgtatatatatataaacatacatataaatatatatata

SEQ ID NO: 115520 - DNA, 1623 bp, Homo sapiens
gaaaggtggcattggcttgcatttttagggtctggctatttaagggaagacatctaggttttcatatctgcttcttcatttactctgttgtgatacatggtggacattatatgaagaaaacctcgtttcacactgacagataattgggtaaaggaggacctcataggtcccagaaagggtcctagctctaccaggggtccatgggccacactttgagaaccactgtttaagcagtcattcagtgaaatcgtattcatttttgtcaagtgtataattaacaaggtgatttgtcaccgtgaatgcattccttatctattgccttgattccatttgtttaattttttcctttcagattgcaactcagattgcagtgctcattgcaaaagttgctagattggattgtcccagacagtggcctgaactaattcccactcttatagagtctgttaaagtccaggatgatcttcgacagcacagagcattacttaccttctatcatgttaccaagacactggcatctaaacgacttgctgctgatagaaaactattttatgatgtaagtgatttcacatagttaaatttgattatgaaaattgtgcggccgggcgtggtggcttatgcctgtaatctcagcactttgggaggccgaggcgggtggatcacgaggtcaggcctggccaatatggtgaaaccccatctctactaaaaactacaaaaattagccgggcgtggtggcacacgcctgtggttccagctactcaggaggctgaagcagaacgatcacttgaacccaggaggtggaggttgcaatgagccgtgattgtgtcactgcactccagcctgggcgacagggcgagactccgtctcaaaaaaaataaaataaaataaaaaaagaaaattgtgctacttgtaaaaaaaaatgactatagttttacttctgttgatgttttttgaaagacttaattctttctcattttaagctgggcagtgatatgaataaaaagatcacttagttgccagtgaggaggattggttgttggatacactctgaaggcaaggaggtcagtttgaggcaaaggaagtagttcggatgagatgataggtctcttgaatgaagctgtagtaaagggaacaattaggtgggcatagagttgacatttaggaggagaattgatacgtctgggtaactgaaggatgtagggcagatataggaaggagtttgacgtaagtagggagtgacagccttttatcaggttttttgcaccttttttttggttttgggttcgtgtgtgtgtgtgtgtgtgtgtgtatgttttgagacagggttttgttctgtttttggtggggtgtgtgtgtgtgtgtgtgtgtgtgtgtgtgtgtgtgcacgcattttgagacggggttttgttctgtcacccagggtgtagtacagtggcatgatcatagctcactacagccttgacctccttggctcaaaccatcctcctacctcagcctcacgagtagctaggactacaggtacatgccaccatgcccagatggttttttaattttttttagagatgaagtctcactatgttacccatgctttaaagtgtttttaacagtgttctttgttacctt

SEQ ID NO: 115521 - DNA, 1101 bp, Homo sapiens
tactttatatttagtcgaggcaatctccacagattgtacagataatcagggccttaagctggatagcttgtgtgagttagcttcttgcttgtttttttttgtagtatgaggctagttcttctccatatagaaagaagtatatgcttaattagcatcttgtagttactttcagtgtagtagttaccacattgtgctgacttgtaattgtcgacttatttttctcagattcactacagtgtagcttttattgctgtcatcctactgcatggtctgaaagagtacacataatgattgatgctcaataactgttaagtgaatgaacaatagaacaggagacttattcttattagatgcctgctggatttcagagtgatatagggcaaaacttccaaaagcaggatttttgagagattagtcagagctagagatacctggaaaaaattcagattagcactttttattttggaatggagcagctgaacctggagatagggactaaagtagggactaggaagggtatcctgtctaatgcggttgaggtacaagatgtgtagttaattgaaggtagcatttgtgggaagacatcattataaagagcaattttgctggttaatacagctgtgcctattattttggtaatctgaagcatggaaaatcttccttttaataataaaggaagatgcaaagatggtcctcaagtaccaaattagtttcctacataaaaaaatgtaagggctgggctcacgcctgtagtcccagcactgggaggccgtggtgggcagatcacctgaggttgggagttcgagaccagcctgggcaacatggtgaaaccctgtctgtactaaaaatacaaaaaaaattagctgggcatggtggcgcacgcctgtaatcccagctactcaggaggctgaggcaggagaatcagttgaacccaggaggcggaggctgcagtgaaccgagattgcgccactatactccagcctagacgacagagagagagtgtctcaaaagaagaaaaaaatattaagctcatggttgagctggttgctatagcaaagtgtagtgcacagggtacacttaaaattgctacctgcggctcag

SEQ ID NO: 115522 - DNA, 1033 bp, Homo sapiens
catcctgaagaagtaaaaagtaatttaatatcatttaatacttttatccagttttctagattgttctcaaacacatttttacaagtggcttgagccagaaaaatgaataaggtgcatttgacatgtcttacaaatcttttaattttgaatagtattgacttcctccctctcccccttaaaaatgccattgacttgttaaaaaaaaactagattagttgtcttgtaggatgctctgcctcctacatttgttgattaatataccttgctgattaggttcaggctaagcagatttgggcatctatagcgaatattttttgtctcagtattcgtgatgaattatttaatacatgaactttgatgtaaaacttttttggtgctaatgtttcttaagggaaaattatgaagacaacaattctgaggctaaaaaagtttaagaatatttgaaatgctaaaatacttagtgtgtaatggttagcttttgatactttggagtcaaggctttgggcttctcagttacagccactaaacagtcagtaggtggcactgtttcttctggtttagaaatagaaaatgttaagtatttgggggtttcatgaactagtacctaacatgtttcattaaacagtttatttgcatattgtctcactgaatattccttcccccctccacatttttagaatcacatgtagaaaaaaatatttttatttctcctacttggttgctttattacttactcttttccagctgagccttctgtaagcatgtatcagttggtgttttctggagcagataggaggtatacagggcttgtgaatatattagttggcaatggttacttcctgtggtttcttctttattcctgttgtttcttctttctttatctctctccctgcttttactgaaaggtaaagggctgaaaggtgttaaagaaaaacttttcaaacacttgtaaaggatgataagacagactttattcagatgggactactgcagtggggttttgcagtaggggagagaaattgtgctcaactct

SEQ ID NO: 115523 - DNA, 1328 bp, Homo sapiens
aaatgtcacagttgagcagtgtagttgattccaaatttggaaatagggtttaatttttatatcgtttttaggagataattgtatttccattaatatagccgaaaactgaatgaaggtttttggttaccgttgagtcatagcttaaagtttgtgaaatagaaatgactttctcaatttcagttactgcaggtaagaagtactaacaattatataaattacactaaattttggaatccagttttagaaacatgagtagtaacaataagtcagaagaacactgcatttgtgagttagaagaactagactttagttccatttttcccactaatttcccagccaaatgaccaggagttaactttccaacccagattaacctccaagcttgattaagttttgcaattctgaatctttcttgtgattgtaattttagtaggataaaataagattcaagtaaagcttgcttttgcttttcagtgctgcgtaagttaactgttaatggatttgtggaacctcataagaatatggaggtgatggtaagtgatcgaagaaatttgctgtgactttgggaaagtggtattttcctgaatgtttgaaagagtgctctttttatttggcattcaattagaagagtttttattaagtgaccatctagttttttaccattctgacttttagacttctggtctgttttcactacatcaaagtggctgttgtgtgaaggagaggaaataggcctaggatatttctcaaggatgccatggtacattgagagtgttaatttgaatttaaattaaaatgaactcctgtgaatttgaatgctattataacattaccaggtacattgtaaatagttttttatatacttaatattttcctttgtttttatgtatttaaaataaatttgtttttttctgtctgatcattacattaatacatgctgttcacaatcaattaaaaaaataaatatataagagaaaaaccttgtcaataaatcgatcataagttgtgatatatattcattgtctgtagatagccatcttctttttttttttttttttttttttttttttgagacagagtctcgctctgtcacccaggctggagtgcagtggtgcagtcttgggtctctgcaacctctgcctcctgggttcaagcagttctcctgcctcagcctcccaagtcactgggattacaggcatgcaccaccatgcccagctaatttttgtatttttagtagagacgaagttttaccatttctgccaggctggtcttgaactcctggcctcaagtgatctgccctttttggcttccgaaagtgctgggattac

SEQ ID NO: 115524 - DNA, 2164 bp, Homo sapiens
tagactcttttcgcttttagtatttgttgcatatcactgtgatataactttctgtaactggcagtttgattttgtaaatcccttgttcattaacctccactggcttatctttagcatcctttgttattcactaccccatgtgagagactatagcatttatatttgtgttgtattttactggtggtctgtttgttatcttcttcttccatgtgattgtaagcacctttatttggacatacacatgtgtgcacacacaagtgtgtgtttgtgtgtttggggatttgctctcctgagaagatatcttagtctactcacttttaaggagctactgattgttttatgttagtcagtttcaatttagtaaaacattgttgagcctgtgggcagacactgtcctgggtactatgcatggaaagatgaataagaatgttcatattgtgtagttactatgttttctaaaaatagtcatttttctctggccatccttgtgggcgtagcagaaggaagaataaaagcccttccaggagagaataagacaaattaacaaacagaatatgaagagtattattagagagcagattagctgatgagctggtggacattgttctgaatgtacaaaaaaaaatcgccagggaaattatcagaataaatttgtcagaagatataggaaaaatgataatgagtgtgttactccttgactactttattttacacatgtatgttgcttgaaaaatacttcaactgtgacatttagtttttaaatgttatccatgattcattgctaaaacgactattcttttactataaaagtgagttcagttcatatattagggttaattttatataatatggcacagagggctactgtgtctgttactcagtgtaaatcttggtattgctttttaaataatgaattcataatgcaaaatatgcaaaaataaaaccagcaatattatttttgtaaaaattttgatgttgtcttggttgtgaacttattaacttctaatatttgaaatgtatttttaacaggtagaagtataggtacagataatgtgtgtagagatagactggaaaagaccatcattctttttactaaagtggtaagttttttaaaaacttgttttctcaaatataatacacatattcagatttacaaaggaaaatgatatttttataaccatacattttcactttagtgtaaggaaacctatgttctgactccttataggaaagctaaaaattgcttttatatgtactttagaatgcatataataattaaatttacataccatgtgtcatagtgtaagtcaccttggtacatgaaaaataaattctaataaatattagagtatttgattcctctaaagctcattattctttgacccactggagaaagtggagataaagaagatagcagtgcagttcagctagaagtagatcaaatgtagcagacaggaagtcagtatattcagaatgaccatcagactatcttcgtccatactaagcatcttttgagtggaattatagggggtgcgctgtggtaggcagtgtgtataattacattttataaaacattaacttttaatgatattttggtcttgaaggattgggagaagtgcaaataattgggttacagcagttagaaagacctagcttggggactgcttgcactaaaataggtacttgaagacaggtgggaacaactaaatctgtaatctatttccctttttaattaaagattcaataatagggtaggggttgcttattccctgggaggggagtaaaggagcagaaatgagctgttttttatctttgtgttttaggtagtaattacctttagtttcagttgtcttcgtttctcttgttccaagtagcctcaacaacagaagttcacctaatcttccaagatacattataaaattgactaagattctctgtttaaaaaaacacaaagcaaagtaaaacaggatgatgtgcttagtcaaagaggactatacagtatatatcactgacacttgcctgcggctctgctgcctcacagtccctactcactatatcagttacataagtaaaatttaaaaagcattatttagatgatctgttttagaaaacacatttatttagctgtgagatttttcagttctttcaactctttcttaaggta

SEQ ID NO: 115525 - DNA, 2088 bp, Homo sapiens
tttaacagctgttgatcatcatttgcctagatccattatttgatcaggagttacacaatgatggcattctaattctgttattccttttgcatttattagctgaaattcttctataaagaagacatctccctccttagctatttgataacattaaaatataattcatatgggaaagggaagataatatttaaattctttaccttagtctattacttttaaaggtctattgtatatttaagcgttttgtatcatattcacccattgttataaaattaagtatgaattgagtctgttttggtttctgtattgaaaataatagaaagttcttattatcagatataatctaacataatcctcattatatgatgtgcctcaagaagagttatgataatgtaaaactgagtgaacatagactccacactaaggttcaaactgctaaatgattattagtaaagttataattggagtgattatattccaatatgaatttggggaaaatacattttaatttttatttatttatttttctacagcttttggacttcttggatcagcatcctttttcatttactcctctaattcagagatcactggaattttctgtaagctatgtttttacagaagttggtgaaggcgttacatttgaacgattcattgtccaatgtatgaatcttattaagatgattgtcaaaaattatgcttataagccatccaaaaattttgaaggtaattcctttattggcagtttaaaagaattattttaatcttaagtgtgatataattgctataattacaaactttttaaaaaatgtcattttagtctgaaaaataaattgttgctgggacatgaaaaagatataaggattataggctttagtatgtttatactagcttttaaaaacaacatagtgcatttaataagccattttttgtagcacaaattggttgaagcttagggactttaagaattaggtactatagtcatcactgcagctcatattgtagggtgtattcatttgaacaaataaaagctttctctgactttatataaagtgtgattgtttctagacaggttaaattgttgtattatttggaattcattcatatgcgtgtgtgccaagatgaatgaagaagtcttggtggtgggggagagagaaacacatgcacacaccccccacaccctctacattatgaggaagttatttcagtatgccgtgatggtattgcatggtaatatataagctgtaatgccagaggcaagattgatgtgagtgtgttgtaaggaaagagtatctttgagatttgtttataataaaaatgaaaatttatacacaagtgtatcttcttccctgagagtgtattttttatttatttaagttacataatccaatgtagctacaatgtttggctatacaattaacttggaaatttcatttttctagatagcagccctgaaactcttgaagcccataagattaagatggcattcttcacatatcctactttgacagagatatgtagaagattagtctctcattatttcctattaactgaagaagaactgacaatgtgggaagaagacccagaaggctttagtaagaattaattttttagtgttagaatgacttttctcccctttctataaatatctgtttgagtgataggtataatattgtattttcatacagcacttttgatctggaaatcttggtgttttaaaattaacttactctttcgttgttatccattagaacaaattgagaagcagaaaatgaatgacttatgcaaatatgttgtagaattttgtccaggaaaagacctttttagtttttggattcctttacaaatatatcatgtagtttcaaacaaaaatataaaattaactctctcttaccctgtcagtttctattttgtgattcattccatgttattttttatttgtagaaattcttgcaaagaaatttggaggtttttgatgaatagttttttttttttttttggacaggacatctttatatctgtttgaattttagtactagatagataagtagaataagtctgttgggacccttgctatagaaaatcaag

SEQ ID NO: 115526 - DNA, 1299 bp, Homo sapiens
aaggtatgattaatttaaaatgtacactttgcttgccatagttttaagtttttgaatgcgtaatgacaaataattgaaatgaaatcaactttcttttattaattataattcgattttgttttcctttgtgttggttataaaaaaatggtaaccttactttttttttttaacaaatcaaaagttggaaacattttcaaagttttagaattttaagattaagtatttgctttattaaagaattagtcaatatagtatgcaactgttttgatgagaaatttgtatttttccctctccagccatgcactgaagtattatttatagatatattccatgaatataatcagactcttactcctgtacttctagaaatgatgcaaacacttcaaggtaaggcatattttgtgattaactttgagttaatctctttaacgtttagttaagaaatagtctgagtgcctacaatgcatactgtactgtttcctgggtcatataataaatatgaatttgagaaaaacaattttaaaacttattatcttccaagggggtggcatttgagataggccttgaattatagtttggacgatgataaattttcctgtagtaaatacaatagaagcaaaagcaaaacagtagtcatactgcttgcagaaagtctatctggagcgtgttgtgagaaatagtgagaaaaggttaaaatagtgttagcctctcttagaatggtggcagtgggaatggaaataattgattatggatttgagagaaaatgatgatgtaaatttttgacacttggtcattacactttgtacacaagtaactaattatctgcctattaactaacattgatttatgatttctgtcttttctgctagactgtaagtcctaggggcattgatcacgtctgttttgtttatattttattcccagtgctgggcatattcagtaactattgttacttgattgacttttagcaaccgattgaatgtgctaggcaaggaaaagtgatcaaagatgatcctaaacttttgagccttaatgacaaggaaacagttacctcattagaagtggtaggagatagagatatactttcggagtgcatgtatgtaaggagccttgggaaaagaaaagaggatcttaaggacagaacctgagattttcacctatagggatatgagtaaataaaagccttgtaaaaatgccaggtgtagtggtgtatcctagagaagagcatgttgtcagaatgagtgttggccaggcatggtgactcacgcctgtaattccagcactttgggaggctgaggt

SEQ ID NO: 115527 - DNA, 1044 bp, Homo sapiens
aacatggcaaaaacctgtcgctacaaaaattaggaaaattagctgggcctggtggttagtacctgtagtcctagctattcagaaggctgaggttggaggatcatttgagcgcaggaggatgaggctgcagtgaactgagaaaacctcactccactgtactccagcctgggtgacaaagcaagaccttgtctcaaaaaaaataattttgtggtatatagcacattagcattttgtggtgtatattttctagaatattgcttgtcataacatttttcaaatatgctataatggtttttaatcctgtgttctctaatgataatcataaaacttagactttccctttgtacttgtgtccatttttgacaccatgaaatgtgttatacttaattgaattgggaaactaacaaattgtgtttaaatataaattttttaaaaaactagttttatttgcttttactgatacctatttatatatatattttttaggacccacaaatgtggaagatatgaatgcactgttaatcaaagatgctggtatgttaaacttaagtgatttagaagcatttatttattcagtagatggagagtctgttttgtggtagattttgtgctgagggtgttgagatacaagagtaactaaaatacaggaacaatctgattggggagataaccaagtaaacagataatgtattataataatactatacaggatagttaatgctaaagtaggtgatgatcaccagatagtttggtgtgtctaaggaaagattcccaaagaagtgtaatggaagaacacaaggataagtaggagttacacgtgtgaggaggtggtgatggaaagagggtgttgcattccagggagatggagcaataagtacaaagacttgaaggaaagaggaggaagcacagttagaatttgaattgtgactattttggtttaactggaacattggggttaaaggttgagttgaggctggagagagttaagtagggaccagatcataaaatattacatccattttagaagcaggcattattttataa

SEQ ID NO: 115528 - DNA, 1007 bp, Homo sapiens
aggatatagagacatcatggcaaaaatatttgaataccctttctaagttctaattgaggtacctaattaaatagtacagattcatattacatttagtaatatgaattatgaaatgaattaatttagtacatttaatagcacatttgcccaattctattttttttgaaatagtctcattttgtcacccagcctggagtgcagtggtgcaatctcagctcactgcaacctccacctcccaggtccaagcgattcttgtgcctcagtctcctgagtagcagggattacaggcgcatgccaccacacctggccagcccaattcttacgttttatatacatttaagcacttgtctacttaaattttaggtattgaatgcataaaatgaaaggaaaaacctctttcatagtttataaaattatttcttagtttaaaattggagaatttgaaaaaattctaaggggcttttttcttaatttgaaggatacacttctactgattcacttcagtatacctggggcctatcagaatacttagcatatagtcatagatagttaatatttgttgactaaactaatgaatgcataggtcacatttagagccacagaatttgtagagctggagatactctaaaagtaattcttaacagtaagtagctgtttatctcttcagttattcaatcatttattcagttaacatatatttttaacacttggaatttgccatgtcctataggcggtgttaaataaaatagactctgacttagtctcagggagctagtgagcctttgatggagagaaagctttcattggcgaaacaaatgtgcagtttagttgtccttaaaccctagaggctatttagtgtaagaccttcactgtccagtgcagaagctccctacgtgtagctattgagcacttgaaatgtgcttagtgcaactgaggcaacaactttccaattttaattaatttaaatttaaaatttaaagccatgtaaaatatttattgattacatg

SEQ ID NO: 115529 - DNA, 1005 bp, Homo sapiens
cacaaatgttttgaactgcatgatttttctccttacctgaactttgatttcttttagcgaagatgatgagagaaagaaagaaatgtatatatgtgctactgtaaatgttttgccagtgttaatatatgttattttggtaatctgagtcacattctgttattgtgtacctcttacaaaattagcttagttgaaatcacaaaatttatatgaaagttttatataagcctagaagtttcttacattgttctgaaaataatcttcatagtattaacagaattggagtagaaaattacatacaggagcttctttattattatttttggggacctttccagttttagagtttggggcattgccactgtttttggttacttgagctaaaaccaaatggatttggtttttatgaaacatacctacattgcggttctttaagataaaagagtcaggattacaacatatatgcctaggaatttttaagtactaaaagttttaataatatttatttagatcaagacttcattgttaatattttgtactgtggtacatttagaagtaggctttaagcttttttttttttttgacagagccttgatctgttgcctaggctggagtgcagtggcacaatcttggcttattgccaacctctgtctcttgggtttcaagggattctcatgcctcagacttccaagaagctgggaccacaggtgcatgccaccacgccctgctaatttttgtatttttagtagagatggggtttcaccatgttgcccagattggtcttcaactcctggcctcaagtgatttgccctccttggcattccaaagtgctgcgattataagcatgagccagcacacctgcttttaagcttttatattaaaaatgcagattgcattcttactacattttagatttaaatgataaattatactaaaagaaatagacctcttaaaatatttaacattttaatttcatgattttttcctgtttaggtataagccattgcg

SEQ ID NO: 115530 - DNA, 1065 bp, Homo sapiens
agccagacatagggtatttgtttttgatttcctaataagaactattctgccatttttagaataacaaattatatctataaaaatatatatttccatgcaatatatattaagggttacatcagatagctagtatgtgagtgcaataattaacgtctttttgccgtaatgagtaggtcttgcaaaacaaaacatttcgtgattggcaccaggcatatatggaagaacagtgacaaggcactgttaacagtttagttaacagtataaaatttaaacagacatagcgtagacaatattcctctaaacattattcagtttgtagatgagttaaattctgaaatggacacattcagcagcaatgaagaaagaaaacactttgtaaaacaatatgtaccggcagcttgaacgatttcaggttgtttaggtaatgccaagcttttggctgtttatttgacttactgctttgacattatgatttatttcttacttctgttcgtatgaatgtagaggtctttcatttctattataaaccttttttattttctttctttttacctgcagtatttggaaaccatgttcacactactttttcagttactgcagcaagttacagaatgtgacacaaagatgcatgttttgcatgtcctttcttgtgtgatcgaaagagtcaacatgcaggtaattatattgtaaaacatgaaaataaatgaggggtgggtagaatagacgtagaattcattaatatccttgactacattgtttaagagttaaaacattaattgaaatgcttctaacttatagattgtggtttcagttatgtattattcaaaattgacatattcgattttctaaaaatgagaaaattaaaatactaaaaaaaaaattggatcaacagtgtagaggtgttcatagagcagaattttacatattttagaagatccagccgatgtaaaattgagtgtgtttgagggcatagccacaagtgtccatcagcaagacttctgggaaagtctgttatttttacctgaaaaattaagtattttttgcagtctggtctgcattatattt

SEQ ID NO: 115531 - DNA, 1057 bp, Homo sapiens
tgtgtgattcttagtacttggtgttcttaatacattaatcacattaattcatttgatggtgtttttttcaacaacattgagagaatttggtcacacagagttcattgcaactgttttaagaactcattttaagtccttgcctctgctatttagtttgggcaaagtctttaaccttgtgtcctcatgtataaaatggtaaagataattctgaactcacctaacttaggatttcatgagcataaaattatttcacatctccaaaatgcttcagggtactataaagttgcaataaatggtttaaaaagttgattataaaaacaagatttggctattttctgtaattttatttagaaatatatggcagatggaaatttcttagataaaacttttttttaaatagaaatgggtcttcttatctttgtctccccaaacttggaattaaaactttttctgtaaagtttgttatttttttggcttagtaaatttaaaaatgcttatgtgtttctgtctacactcatctttcggagcacaaatagcctaagcagcttacatgcctatatcatcagaaagtaacaataaggtatagttattcaatatagtttttgtttttgaaaactcaaactaaataggaaatggttaaaaaaatattttcagttgtctgattctttttttttctaccttaacctctgatcaaccctatcatttttatcattgttgcatatatcccttaactctctttaatatgccaaatttgacgtttgtccatgaggcagcaaacttttaaaaaatgttaacaaattttatcttttttgagatgaagtcttgctctcccccccgggctggagtgcagtggcgcatctcagctgactgtaccctcttctccaatctcctgggttcaagtgattcttgtcctcagcctcctgagtagtagcttggattacaggtgtgccaccatgcctggctaatttttttttttttttttttttgtatttttagtagagatgtggtttcgccattttggctgggctggtctcaaactcctgggctcaagggatcc

SEQ ID NO: 115532 - DNA, 1057 bp, Homo sapiens
aaaaaaaatgccctgcttctgtggcagctcggtgctacaaaggcttattgactgcccacggtgtgtaagcaactgtgctagaaaatccttttgctttattaagctcactttactgttggcaacagttttctccagagacaatctttcaataatacatgaaaagtttcaaaatcccattttgtaaattgatagtgcagttaaagaaagcaaatcatagaaatcaactgtaaaagaaatgaacatttgattctcttcatccctccctccctccctttggaactaactgtttttgttagatgtctagaatttaacagttttggttcttagaaattactttggtgcaaattataaataatgatctttatcagaatatgagatgaatgactttaaaactttactagttagatacttattaatttgtggtttgcgttcttcagaaaggtgttgttcgaacttaaatggcatgtatgtggtttggttgtaaattagcctgttgttgaaatattttatattcaaacacttatatttgtataaggatggattactttagatcagaggttggcaaacttgtactagacaggaccagatattaaatattttgggctttctaagtcacacagtctttgttgcaactatttgactctgctgtcagtgtcaaaacagtcatagacaatatgtaagtaggtatggctgtgcgccaattaaacatcatttatagaaataagtacgtgggtggatttagcccatgagctgtagtttgccatcctctgccctagattgtaagataaaatattaattcctggcatataaataattttgtgcaaacatgtagatactatatgatgttgaatgttagaaaaaatccaatattaaagagattagactcagaattatcagtattactgacaatatattaatgtgttattaaaagtgtagatattttcaagggattacattaaaaagtaataataaaaatgcacggctttgttaatggtaatgttttttcctagcttttagttacatgctaataaaaataaattattaggagaaaattttt

SEQ ID NO: 115533 - DNA, 1024 bp, Homo sapiens
ggaggtgttccatccaatagcttgtattttctcaacaaaatatgaagcatcgtctttagtggggagtaatgggctggattaggagtgtgcacaagatatgagaggtctgtaggtgagagaaggtataaagtagatatcttagagaatgggaatttgaatttattagggataaaaccagtacaccagttgatgcttggggtcacgaatatggagtgaaactttcagactgattatgtgatttatctcctactatggctttttattttcctcttgatccatctcactagagatttgtcagttactaggcttttcaaaaacaacctttggctttggttctctttgttgtatatctgtttcctatttattaatatctgctcttatgtttattatcttattctacttgctttaggtttatgggcttgttgtcatctgatctccattctaagaaaatcagctcatcaacttttagcctttcttctatcttaatataaacatttaatacaataaattatttttaaacagaatttgaacaaaagactttgtatagtttttttgtttctaagaaaattggatgaggtagtaatgaatactggtaagcaggcagcagtatcagctatatcttattaaatgtaatatgatcatttaaaaaaacaaatttgattgctttttgctgtttactcaaaagatcatatctttctcttaagaaaaaacctttcttttaaaagaaacttgatttcctaggataaactttacttggtggggaattccactattaatgcatattataaacatttttctaacattttatctaattttattttttcttctattaatgatttggatctatgatctacattttgtgattctttttgattttatatcagtgctatgtttaacaatttaaaaattgttttcattgcactggaatgatttttgtgatatataacaatctattctttgtatgtttgaacaattaagaaaaggaactggaagtagacccgtgttgggggccaggggttcttta

SEQ ID NO: 115534 - DNA, 1050 bp, Homo sapiens
gttgtgtctttctatcaacaggggattggttccagggctaccacatataccaaaattcatgcatactaaagtcccgcagtcagccctgcggaacctgtgtatatgtgtatgtgaaaagtcagccctccatgtactttggttttgcatcctgtgaatactgtatttttaatcttggatttggttgaaaaagtctgggtttaagtggacctactcagtgtaaagccatgttgtgcaagggtcaactgtagttactttccttactacctttgctatgtatgtagaaatattacataatttgcagacaggtttttattttgaggcatttggttaattctttcttagataatttttataacttaactgattatacacttacctttcttcatttaaatgagaccttttaaaatatttaagtcatatgttaatggctttaatgggcatggaaagtggtttaatcatctgtttttccttcctaggttagtaactttggaaaacagtccatgtattacaccagagttgcttcgtatatttcagaatatgtcaccacttcttggtatgtgttaaagcataaacttactaatgtttttgaatgcaaccataattgggaggcattgaaacataatttggaggcattacaacaaagttgtaagttcaacttctagtttagattcaggggatatatgtacacgtttgttacatggatatattgcgtgatgttgaggtttggggtacaattgattctgtcatccagttagtgaacatagtacctaatagtttttcaacctttgagttcctccctctgccctctagtagtctgcagtgtctatttttgccatgattatgtccttgagtactcaatgtttagcttccatttataaatgagaacatacataccttccatttttatttaatccctaatattgacaaataagtctgttggtgttgtttgttttgttttgttttgagacaaggtcttgctctgttgcccagactggagtgcagtggtatgaccacagcttactgcagcttcaaactactggactgaagcaa

SEQ ID NO: 115535 - DNA, 1223 bp, Homo sapiens
ttttaaataactatgaatcacttcatttaaactaattttgagcagtgaattaatttggttttttgtttgacatttattgttttggcagaactaagttcagaaaatcttagaacttgctttaagatcatcaatggttatatctttttatcatcaacagaatttttacaggtatgttggagtacttttgcattatatgaaattatataattattattttgattattatttgaaatcagggggtacgttttcaaaattttaagattggtctgttattttaagacagagaaacattgactgtgagcatttcccattgcagggcagatgtgctgcatgcagttcctttctcaatgcagaaaatgtgctatgtcaacaaattttttttatattcctatgaaaatcagtgtatcaataatctatatttttatttggcataatcttttttaacttttcctaagcgttctgattgaaatttgatatgcttagaccattagtgtataattctcaagtatattataatgaatcccaaatgaaattttatgcctttttgatattacagatatattcttacatatattgacttttaattgaatttcagacatacgcagtaggtctatgccagtccttttgtgaacttttaaaggaaattactacagaaggtcaagttcaggtgctcaaggtattgtgatcattttaaatgaatatatttatgaatttttcatttatattttatgaaattggactttcatttggatggttcgcaagaaggagaagagttgatatagttctagacaggctattttggcagttttcagttggtttaatacctgtggaccagaggtctcaaatctgaaggtgcatacaccttcaacaggcaagagatcaactggacatcttataaaaattcaattctggatttctaacaaggtctgaactgattgggatgttgcctatcttgagacctcactttgggtagtaaggatttaaaaactcttgtaaattatccagtgatgtgatatctgatacttcttattctttcattttgttagtctgctgttgggacaaagttttcacgttataatttgatagctttaatttaagttggctatcaaaattagaataccacgtttgttgatattctgtaattatgaactaacagtctctaagttgtatattatctttatatattatacctgtctattaaagatataaatagtattaaatgt

SEQ ID NO: 115536 - DNA, 1467 bp, Homo sapiens
gcaaggggtttactaaagggtgagaatataagccactgttaccaaagaatcatgtgggctctaaaggacttgtaataacagtaatctgtgcttgtggcttgttgagaccctggatacttgaggcctggtttattggactagtctattaatccacatttattattaatttcaaagtattctcctagctccaaagcttacaagtaacatcaaacatgttgcttactaaaatgcctttatgaatttttattgcatttatgcctttattaaactgacacagtggcaatataagtatattaaggaactcagtcttatacaatttcagcttcagcttttgctttggtgataaattcttctctggaggtaagaggaagtaaggaattaatacgttggacttaattctgactatttgaggaaaaagtgattggtgatgtgggagtgattaaaacaagtgaaaattgccatgtcattttgatattattgtctttacagatttttttctgtatgtatgcctgttttaacctttctcctctattatactgagcttctccattatccaaagttcagtaaatgtgtgctctgtttgctctgaatacatatatagtaagtgacttgaaagacaaggaatccataatttttatgttgaagatgtgatctcgactatactgaggatccatttgggattctctgcttgaccagtcccttggtttgcgtatgctgccctgctacttttatggctcctgagtatactttggtcttcattttcctcagttattagatgaggagtgatactaaatgatttttattctgtaataggcagtacctgaaattctccatgttaaattgtaatatatgtattctaagtgattaagaaaagaggtgatttctcacatttaaacacttcccagaccaaatttgaattgaccttacccccatccccctcttttggcttttctgcaacaatattgttaaagtaattgttgaaagacaacttgtggattatttggaatggccattgtgattctacttgtttttaattatactcttaccacattattagagggagcgtagcatagcaggtaagactacacactgaagggagacttccagggttagaacattggctctgctacttcacagctatgtgatgtggacagattagtctttgttcctcattttccatctgtaacatggggatgataactttacctacttcctagagttgatgtgaggaatacttgagcttatatatataaacagttatagcaatgccaagcatgtaataagtgaatataagagctggctgtttttatgtaatatatagctgtctcattatttagtctctctatggggggaaataggctactataattttaggcaaaataatttggctgtagagaaacaaaccaagttgttccactttactctttgaccatttatttgaaataaatacttaagtacattaattaa

SEQ ID NO: 115537 - DNA, 1105 bp, Homo sapiens
gaagaaaattaattgtattttattttattttttttggctgctcagaataacacaatctttttaaacatttttattattgaaaattccaaactaacttactgcatatcaaaaatctatagtcaaatatgtagtcattatttttgtaacgtttaatatgttacagattaaggcaatttctctgtaagtatgccaacagtaggttatgattaggatacagatacttgaattaacaaatttggagccagagatggtggtgtttgcctttaatcctatctacttcagagactgaggttataaaatcacttaagctgaggagtttgattccagccttctgcacaacatgacaagactgcatctctcttttttatttctttttattttttttatttttttatttttttaagatggagttacgctcttgttgcccaggctggagtgcaatggcgtgatctcggctcaccacaacctcaaaaaaagaaaaagaatgaaaaattgagaatctgatagtatgtgtttaagatggtatttttatacgaatattgctgtagctaaatctgtatgtttggtttaaaaatctcagaaactagattttattatttaataaatggatgttaaatcctaaatatgttcattatgaataaattatatttttatgttaaggaatattttaggacaatagtgctttcattttactgctatatttgaaggctgggcaaactcaaaatttttggcgttttcctgttcttagagttctagtatagcaataacaatagtttttaatattagctcattttcgtttttagtatctctcataccatttcttaatatagtatgttatataacattttaaatatattttttactaaatgtcattgttatactaatttttgacagtgtctgcaagtaatttctttgttctttgaagcagaaagttacaatgttaggaaaattggatagagagaccagtatgcctgcttttggagcaaatggtgtagagcaaaggatacgctttactttattttgtgactgaacatgttatctagaggaatgtaattataaaatactctaaattgttaacatttctcatatttgaaatttgtcaata

SEQ ID NO: 115538 - DNA, 2540 bp, Homo sapiens
attccattaaaaagaaatgaagaaaatcgctatatgagtttgagaatataagtaaggagcattgtctctagttttcttctgtttaaaaagtagaaggcagtggaagaataaaccaggtaattaaagtagctatctagcaaaaagaggaggagagggtgaaactagatctgtcaggatgtatatctgttttatattttagagtttggaaccatgtagaggtaaagcatgatttagggggaaaaataaaaacaattcctaaagatacaaaagagactgaaacatttgaatctaactgttacgatgttggtggcacagctatttgagaagaatatttcaagtcattttaatacatagtatttcacatgtacatccctggtgggatgtaacgttacaaaaaaagtaagtttgtaattacattcagtagtattattgtcatcagtaatattggtattgttattttgaaactcatatgtgtatatgaatagtagatagaaataaggttataggacctggcatttttcactataagagaaataatatcggaccatttcatatggatttcccacaggcacctcaaattcgtcatgtcagagtggaatgtcatcattattactgacatcacaattgtacccatttgaccaaacaggaaagctagaagcagtgaaagactttttcacctttggtccactgttcagcttttctatatgttgccagttctagttctgaattttctcttgattctgtcccataccctctgcacccaagtctgataatggtatttttctttcagaaactctcatcttctctagctacggttccagaccttttagaccacaaaaactctgttttatccctgaaatatttgtgtatacgactatgttatttatttactcaatcagatactgctttatgtggggattatttaatccttacattaattctaagtactcccttgccacaaccccctcctccctgctgctaaataaaactgtaaagattcctatggattggggccagccacagctatgtattattactataaattctcttcaaacccttttgtttttaaaattttaaccagaattttatatgacatagtttagagtcaactagatagatatataaggtttcttaaagaaaaaaactgtagacacctgtctttctgccatttttccttgctcagagacaaccacttttagtgcttgtagccaattgattcttttgtatctatgttcagatctgtaaataacacccctgtgttgttccttcatgagttgttaattgtaggcagtatgtattgatactgcctttgcacttcctctgtgccttcatcctccaagtaatcaaaattcagtgtttacgtcatgattcctctatttcttcttcaaagctgagacatgtagtcagctgtgattacttctccttttctgtacaatcttttgtattctctggaagtaatacttacctttttttggtataatttttttatgttcactaaactgtctgacagatgtccaatatgttcagacacatcaaggattctgttactttaattttcttgaggaagtctcttcagagccatgctgactcccaccttggggctctttcttttccaagtttgtagctgctgctgcttgttcctgttgttatgaaattttagaatgaggtgccgtaatgtaagtttatttaaatgcattccattgggcactgatgggctcttatagtctggaagcaatctcttttagactctttagagaaaatacactctcttcgttctcctggattgggcatcagttgtccagatactacagagttgaaaatatctagcactctgtttcttagacagactttcaaccagtcttattttctttcttcttatttttagcttcccctttctccttcccaaaagtataagattctgctactttctgtgttttttggagtggagaaggggagaagttatatgaagtaaatctggttgcttctgtcagctttctcctttgacaccttgggattcagctttctctgacttgagtcagtttcctcttgaatttctttcttgctttcagtgtttgtttctcattcctcttgtctttttaaaattatgctccccctcttaaaattttttttctgtaattttagtagggttttagatgggagtgaaattatacatgtatttaataatgggcaggtggtcttactttctactcacagataaatactgtctggtgatatctgcctctgtgactctctcggtctactagcttatctgtatattttccatgtttatcttttttcccagatctagttgtgtttttgttttttgttttttgttttttcaaaaaagtaaacttgagataaaattttattgtttcaaattttatctcctcttgcttttaatgaggaattgatatcttgtatacctgtatcttttagtagtagcatacatagtgcttgccacacagtatagtgtttatatttttaatcttttatttggaccttaccttcacttcttgctcaaaattagagcagcaacaaat

SEQ ID NO: 115539 - DNA, 1005 bp, Homo sapiens
tactaacttcctgtttagctatcaaaaagccaatgttttaaaaatgctttttgctgcctctattagtgcatcatttttaagggttatttgtttacattgcaagggtaagaattacattaactgcatgtgatacctatgttattacaatgtgattaaatacagttgtatgcaagatatatagctgtgtgtaaatattatatacttcatatcaaactgcaattttaaaatggattatcttgtaaaagtgtgtctagtgtcagaatattgcataccctgcatacgtgtatgcattcttaaatttggtctgtgatacttattttagtacattgtttccttacatgtgtttttcataaagcaatgacttgcagtattatcaccaatctttctttctggtttttaggttgtggaaaatgcccttaaagtgaacccaatactaggtccacaaatgtttcaaccgattttaccctatgttttcaagggtattatagaaggggaggtaagatttttctttaagttccaaaggtagtgttagactataggattctagttttaattactctgttagatacagaaggaaagcttttcttgtcatttggatcatattaaattatgttaaattttcagggcggttagacacctttgccttttcctgttccacacagggaagcatagattttctttgacatgtgtctttcaaacatatgcatgtatgttcacacaaaaatcatttgaagtacaggaatggtgagtggcttaattccaatgcttgactactaagaatatgagggggacaaaatagtattaatgttcttatagactgaatatgttaaaccactggttattttctaagaacagctctcttaaatagatccatggacctgtgtatgttatgagtatttaaagtaatatagtaccaggaggcagaggttgcagtgagccgagattgcgccgctgcactccagcctgggtgacagagtgaactccatctcaaaaaaaaaaaaaaag

SEQ ID NO: 115540 - DNA, 1021 bp, Homo sapiens
caattaaaggtacccttccagaacatgcaagaatgccatatgcagcatagactataattagtgcagtaaagtcaagattgctttgtccttacactagggacactaaataaagcagaaatcaggaggccttcccaggactagggctaatcagaagccatcatattggattagcattcaagatggagtcatttttgtctccgcagtcagattaaagaattggcatacataattttcggggctggtaagtctgaattttgcatagcaggctggaaactcaggcaggatttctgttacagtcttgaggcaaaatttcttctttcctgggcatactgtttttgctcttagggttttcagtgaattggatgaagcccactcacattatctagggcattctcctttatttagcgtcaactcattgtaaatgttaatcacatctacgtaatactgtcacagcaacatctagcctagtgtttgaccaaacaactgagcaccttagcctagcagagtttatacataaaattagccatcacattctgtattatgttgatttgttttagcatcatttttagtgtagcatgcaaatgtcttaggaaataattcatttgttttcctttgaaactctgcagtttgaggttgcaacttgtcctctcctctgagggtagcagcaaattagtctagcaaattagagaacagtgaacagtagtcatccaattgaataaagaataatctaagtacaagttgacagttttgaaaaatgcatgttttttttaattgtaccagattggcagtgatttattaaatgatactactaaaatcactcatgggctacatacatgttttgaataagtctgcttagctgtcaggattaattagagtcagtttctggttttgctcaaattatccatttccagctcatgacttaaccccagttcaggtattccagttctgtggtttactataattgaattttaaccatgacttatgaggctttagcctttaaaagtatttacccacaagtaaa

SEQ ID NO: 115541 - DNA, 3344 bp, Homo sapiens
tctccccaatttttcttgcaaagataacctatgtcagtaagttggtatgcagcttcttaacatcttataacccaacacaaccaattagtgcgttactactaattagtagcttactaccaattagtacctcacgtattaagtagtactcagtattttttgcaaccaaaaatattttgaaaattttaaaaagagcactggaggataatataacaacatttatgttcattctaaattttttcccctatttttattaaaggaataaagcataaagtttaagtcttcaatgcgtatttaacacaacataaatattttattcattaaaaagtttacaaaaaattgtattactcgatatacatcttatttgaactagccttttccattcagtagctatgttgtttgatagctagagtctgttgattgatatttgggttctgaataactaatgttttcaagtatcctttaaaaactattatttttatattataggagatatttcaatgtgtatattaggaaaactctaactgcattctgaaaaaataagttcctgagatttccgttcagcaatacttttgaaacacagataaaattacttcctgtctcttagcttcctgtatccatggcaacctctgttttacacattgactgtaaaggaaccaatgtgaagagtggtgtttcctgagcaaacggtgacttaaaaaaaaaaaaaaaaaagtggtggggtggaggtcagcagtgccacagaacaaactggagttaagaaatgtcgttcttcagatttaaaaagaaaacctttactgaatcagctgagtgttaataatacgaatttccttttcttggtaagattatttacttaaatatgaacttctagctgacatgaaaaatagttctgtgaaaaactgtaatttagaatttaattgttctgtagtgaatttgtattttcataaattataatgttatttgatattagactttatgttgttaaagggacatattaaattcaaagattctcattcctacatcatttgtcacctgtgttgtaatcaattgtaatttttaagttaacttagcaaatgtttcattaatctgaactattttgtcaaatagtgggttaatggcctgatcatgttaataattctagaacgtattccatactcattattttttgctattaccatggtatgatttatgatagtattattggctgatcctaattaaaatagaatacagaagttatagtattataaaaaaaattcatttgatgaagttttcgtgatttaaagctttaccttctctttttatagccaattctgatctgaacagaaaatccaagaacagggatatgtgtggattacagttttctctgccttgcctacgactgtttctggttgttacctgttatcttttattattactccacaaagaaatacttggatgttcgtctgtttgtcagctctgcactgggagacaaattaactgccgtaacttaggcctttcgagtattcctaagaattttcctgaaagtacagtttttctgtatctgactgggaataatatatcttatataaatgaaagtgaattaacaggacttcattctcttgtagcattgtatttggataattctaacattctgtatgtatatccaaaagcctttgttcaattgaggcatctatattttctatttctaaataataatttcatcaaacgcttagatcctggaatatttaagggacttttaaatcttcgtaatttatatttacagtataatcaggtatcttttgttccgagaggagtatttaatgatctagtttcagttcagtacttaaatctacaaaggaatcgcctcactgtccttgggagtggtacctttgttggtatggttgctcttcggatacttgatttatcaaacaataacattttgaggatatcagaatcaggctttcaacatcttgaaaaccttgcttgtttgtatttaggaagtaataatttaacaaaagtaccatcaaatgcctttgaagtacttaaaagtcttagaagactttctttgtctcataatcctattgaagcaatacagccctttgcatttaaaggacttgccaatctggaatacctcctcctgaaaaattcaagaattaggaatgttactagggatgggtttagtggaattaataatcttaaacatttgatcttaagtcataatgatttagagaatttaaattctgacacattcagtttgttaaagaatttaatttaccttaagttagatagaaacagaataattagcattgataatgatacatttgaaaatatgggagcatctttgaagatccttaatctgtcatttaataatcttacagccttgcatccaagggtccttaagccgttgtcttcattgattcatcttcaggcaaattctaatccttgggaatgtaactgcaaacttttgggccttcgagactggctagcatcttcagccattactctaaacatctattgtcagaatcccccatccatgcgtggcagagcattacgttatattaacattacaaattgtgttacatcttcaataaatgtatccagagcttgggctgttgtaaaatctcctcatattcatcacaagactactgcgctaatgatggcctggcataaagtaaccacaaatggcagtcctctggaaaatactgagactgagaacattactttctgggaacgaattcctacttcacctgctggtagattttttcaagagaatgcctttggtaatccattagagactacagcagtgttacctgtgcaaatacaacttactacttctgttaccttgaacttggaaaaaaacagtgctctaccgaatgatgctgcttcaatgtcagggaaaacatctctaatttgtacacaagaagttgagaagttgaatgaggcttttgacattttgctagcttttttcatcttagcttgtgttttaatcatttttttgatctacaaagttgttcagtttaaacaaaaactaaaggcatcagaaaactcaagggaaaatagacttgaatactacagcttttatcagtcagcaaggtataatgtaactgcctcaatttgtaacacttccccaaattctctagaaagtcctggcttggagcagattcgacttcataaacaaattgttcctgaaaatgaggcacaggtcattctttttgaacattctgctttataactcaactaaatattgtctataagaaacttcagtgccatggacatgatttaaactgaaacctccttatataattatatactttagttggaaatataatgaattatatgaggttagcattattaaaatatgtttttaa

SEQ ID NO: 115542 - DNA, 1373 bp, Homo sapiens
tgcatcattaattttagcttagataactattttgaaaagttaattgaaaattttgtctgtgttactgcctgcctgttttccttcttggacgttataaaagtctgtaaagtctgcacttttatagatttacctccttaatgtataaaaatttaaaaaacactaaattttttaaaatttcattgcaatttaatttgaatttccctaatgcctaatgattttgagcatccttttaggatgctcacatgccatctgtgtatcttctttggtgaaatgtctgttcatgtttttgcctttttaaaaaaaaatgtttttgttctgtttcttttaagagacaggtctctctgtgttgtccaggctggagagcagtggctgttcccaagtgtgatcatattgcactgcagtcttgaactcctggcctcaagagattctcctgccacagcctcccaagtagctaggactataggcttgcaccactgcacctgatgcctattttaaattgaaattatttttcatcttattgtgttttcagagttctttttacatcctagattcaagtccattaccagatacttgttttacaaatattttcttccagaatttggcatgtcttttttcttcacagtgtcattagaagagcagaaatttttacttgtcaatactctatgtctttatctttgtagttatataagtaacataagactgttataaatctaagaatattaaaatattcctttactatcgaatctatccatctagtatttaaacatactaattagtgaaaaagaattttgtgatgttataggcaaagataaactttttgttataagaaatagattttgaaagtttcttttgtatttcacagctgaaatttctcttcatgttcgagaagatgtttaggaaaaaaaaaacaaaaagaattaatctagtattccagttaacctgttttgcttttcttttattctagtgttatccaagataaattctgtgggattataaacatttcagtagaaggcctgcatgatgtcatgacggaagatcctgaaacaggaacttataaagagtaggtgcattatttaattaatcataattggacttgggggataattaaatacatgctgcatgatttttttcaccatcactctataagcacagtatgaaagttttataatttctcttttatacagaaacgtttttgttattttgcttgtaatatttattgtttgatcttggtatcaccttatttatttatttattgagacggagtttcactcttgtggtccaagatggagtgcagtggtgcgatctcagctaaccgcaacctccgcctcccaggttcaagtgattctcttgccttagcttcccgagtagctgag

SEQ ID NO: 115543 - DNA, 1026 bp, Homo sapiens
agtagaacagcctgggattctaaaagttaaaatttggcttttataaggacttttttctccttcactcaatacattgacccactgaacggctcttcagaatagaatagagaatactagaagaaatgttggttcctggattctgacatctgtatattatcttaacttgtgtagatcctagtgacctccttaggaagtctctctctcttcagttttccccctctgatccattctgccccacttaaaattaaaagctgagtttcttacaggatcaagttaatggggctctattctgtgctgactcagacaccagctttctctcttgtctccctggattcttcatcattctgcaaacatgccatacacttatggcttgactaataatatttctgctccttggtgtgtcaagcccttatcctccttcgcaaatatctacctctaaaattgcattccaggcttataggaagaattcattccatctttccctgtttcttcatggcactttgtctttactgctaatatacaatatttagttgcttatattcagtctagtgacggtaagaggatttgagacagtgcaaaagaaagcacatgctcattataacagaaaactattaacataggattgaagggatttaaataagaaaccttgatttgggaaacctgtggcatcaggatataaaacttagctatatgctttctaattaccaggataaaaaaaagaaacattaggaattacatgggtcttattttcaagtagaagaaagtaggtttatcaggtgttaaacttaagacaaattcaatttaacagagtttgattaagcaaagaattgttcacaaattgggcagcccccagaaccagaattggttcacagtgtcttcagggctgtacctggtcagataatatttatgagcagaaacgggaaagtgaggtacagaaaagggaaatagggtactgaaacagctggattggttacagctcagcatttgccttatttggacacatgttcaacagttggccacctatga

SEQ ID NO: 115544 - DNA, 1032 bp, Homo sapiens
aacaaaaaaaaaggaaatatctaaaatatcttgccttttaatattatatataatcgtgaatgtttaaatatttatttttaccataaatagaaaataggtacataagaaactattttttcccttttcttttggaatcttttcttgtcttctggcctcatcatttaactaactttattataccttctttcctcatttgcaaaatgaaaacaattgtatctacctcatagatagaataaataattaaaatggttatggatacctagtaattactctgtaagagttagctgtcattttaatctgatcattgtatttacacctcgcattacagcacgttagctctcaagggcctaatccttagcttatagctaacattgcactgctctgagagccttcttttaaactgtttgaatttaactcattttactttgcttttatgctaggtatcatctccctagcacatagtgtagaggaaaggacaacatccaaagattcttaagacctgaattctagtccttttttactattacttgtgaccttgagcaagtcaccttgtctttgtagatccgtttgcctcatctgtgaaaagcggcagaaattggattagcatatttccagggtcttcgaactgaaaaattactgttaaaactcttaatatcattacttttcttcccccaaaacaatgtttgtacatataataagtcctcatttaacatcattgatagtttcttggaaactgtaacttgaagcagaaaaacatataatgaacctagttgtaccatgggctaattgatctaaacaagaagctcctacagcatatttctggtcacaaaaacatcaccgaacttcttaataaagatccaaaacacttctaatatttaacattgaagtaagtgtgagctatatatacgtttaagaaagattaatgaaaacaagttaaattattttcccttgtttttggtgaatcagtgagtgatgatggtcgtgatggtgggttaaatcaaggaataaatgtttgcaaagtgaaaattgtaa

SEQ ID NO: 115545 - DNA, 1041 bp, Homo sapiens
gggctgacaacacaattgtgtcattttgacatctctagtggagcagtctggagaagagctgggcctgcccctaggcctcccagtcaccaatgtcttcctggtttgagtttatgctgggtgaggtgatgggcacttcattagactgccatgttagttggtgtccccaggggtctgggagcacataattcagtgtcctaatgtccagcaggtgactgcaagggttgcttctgaaaatgaggttctaactgttgtgtgtccaggtgctacagcaaatatgaggtcaactcgtagtcacatgtgtaggtctgcttctggcgcctgctcctgggaccacattggatgtggctgttggcgatactgtaattgtagcagtcccatttagggaagcactgcctagctctcaggagggaataacagcagtcatgggtgaggcaacaaccagttgttggcatccaccggctgcctctggcccaccaaaccacagtggcagccatagatgaggtacttgtaatattactggatatattttatcatactgtttgagtgaataaaagcataggcttgaatgctatgttaacctggttaacatagaggtactcatatttgttactttattgcttgccatctgattatttcttttttccttcaaaaattactgaaatgattttgtttttttctttatcctttggcacaagatgatctttacaaagtttgtagatagataataggaaaaagccagctatatattgaaaagcagtttgaaagatagtgaatataaattattgcttctcattttgcattgagaaggcaattttactattaatttttatccatgtgtctgtcttttggttgtcactggtttgttgtcacttacgtgttggttatcacatatcacatatatttgcaccaaatttggttatcataaggcccagtttataaaaatgtgtgcaaatcctcacactccattcttttaagacttaacaaaattaacaatattaaaagcatttctctgtttactcttagttaagtaatcaaataatc

SEQ ID NO: 115546 - DNA, 1036 bp, Homo sapiens
tcaccctgttgcccaggctggagtgcagtggcctgatctcggctcactgaaacctctgtctcccgggttcaagagattctcctgcctcagcctccccagcagctgggattacaggcgcctgccaccacgcctggctaatttttgtatttttaatagagatggggtttcaccatgttggccaggctggtctcgaactcctgacctcgtgatcctcccacctcagcctcccaaagtgctgggattacaggcacgagccaccgtgcccagcccttgatctgtcttcttacttgctttttagcataccttgtaatttttattgaaagttggacatgtattgggtaatagggactgagataaataggcatttagtgtgaggatttatgttcatttgtctaggagctgggctttgtttagccctgttggtgtggtggtaaggcacaagggagaggagtgttctcaatcttaacgattaaatctcaagtctcttagtgggcttgagtctctggcctgggaccttcacttgtgcttcgttttggaaagctttcctatccccctcaggtgagacaggaagaggagaaatggctggagcgagaggagtgcctttccccatggctctagaacaagcctaaagcctggttaagtctttcccccgaagagtttattttcttttatcatttttattatgaagaaagctctggacgtatttcataagaatcactcttcccctcctgcaagaactatgatggcatctttctctgatcttcacaatgagaaactggtgggattcctagaggtaatgttcacaaaaccaagaggctttccccaagactgttcccagaagtgagcctaccagtttagagatccaacacttctgctccaggtaagttgatctcagctttgtctctggatttgctggagacagtttgcaaactctggagacagtttgccctgtaatgagtccaagtcattggttttcagtttgtccagctttttcttataaaagcaaagagtgacaacttccaagctttttatatga

SEQ ID NO: 115547 - DNA, 1005 bp, Homo sapiens
acctcagccccccaagtaggtgcaactacaggcacacatcaccaagcccagctaagttattgtgtattttttgtagagatgcggtctcactatattgcccaggctggtcttgaattcctggactcaagtgactcagccacctcagcctcccaaagtgctgggattacaggcttgaggcactgcacctggcctaaaactttctactaaaaaataattacatatctgtgctgtcctgaaatatgctatttagctcttaaattctgtacttttgtgaccctctctgaagtgctggtttattaacggtgaaatggatcatcttgtttttcaacactagagggcaccaaattctcttctagagcaaaacaatcaatgttttccaccaaagaacttcatttactagggtagaatatggattggtatattttcagtcgtttgataaccaaaaacgtaagagattttgtgctttatgataaagggtttagagaatcatagtaaggctttctcttgctatgaatctgtctctagctaagaatctgtcaatgcttttgctaaactgcttttcaggaacatttattgtatgtttgtccagagggaataaaacagctactctgggttaatgcttgggataacttatttttaagggttagggttagacacatcgtttattctggttttaagtttcaggtagcatgtgcagttttctgaaaataggcatttcccctaaattcaggataaaatcaatagccggtattgtgcttcagtgtgaattggggtgctggtagagaggagtgaaatgatgttagctagtaggttacagtgagccattcatatacattgatgtttagcagagtttcttaacttgggtttgataaatcatccttttattcttcaataaaagtgattggaacaaggtcacaccagtcaatgacttcttgtcactaattatacctttttttgtccaattaaaacatttaaagatatttttgcattgtacattaaattatt

SEQ ID NO: 115548 - DNA, 1063 bp, Homo sapiens
gataactctgggctgagatatactttgaaaaacattttctcttagataataactgattagtcataggtgacaagtgagtagtttaatggaaggagagtgggtaatgtgaaaaatgaaaagacttgtagatacagcttgtggaacaccatcattaagggatggaataaagaaacaagaggtgttaggctaggcagtgcttgtcagagagtaggttgtttgaacttgaaagccaagtaggtaggatatttttaagtgatagcagacaagaggacagcagtgggtaggagaagaagcttatatagccacatgtgagtatattgtttgtttgtttgtttgtttgtttttgtcctcagaggtagaagagcactaatttgaaagaggaattaaatggggcgggagtgggtggaatactaaccacctcctttctcttgaggaacatgctgttggaggagccatctttcataagaaggctgtataagtgatgtgctggggaggaaaaggtttcatgcaaggcaaggaaatatctgcatgtctgaagaggctgagaatcccgacagtaaggggatgcccagggcatgttggaaagggttttggggggaacagtgaaagaatgatttggaaagagcaaagtatgagggtgattttttggaagagatcagtgtctagagaagcagaatactctgctctaagcctgttctgatttagagagatttccttagtcatcagacttgatcctgggaaaactagtcaagtatagaccttgtgatgttcaactcacacagcttagctctgtatctactcaccaagacttcttagagacttactcctattgtctgaactttaatacagacataacttgttttttcaaatttaagttagcattttgttttatgattataagagtactatatgctcttataaaattcaggccaggcacagtggctcacacctgtaatcccagcactttgggaggccgaggtgggtggctcacctgaggtcaggagttcgaaaccagcccgaccaacatggagaagccccatctctactaaaatacaaaattagc

SEQ ID NO: 115549 - DNA, 1059 bp, Homo sapiens
attacaaaaatccttttgaaagcattctttctactaaatgatttggtatggtgtctattttgagcatatgagcaagcacaattatttctaaatcagagcaaagctacagctgaaaattcctttaaattctgtaagcctttagtagagttcatatggatgtcctcatcacagaacaaagacaaggcacttcaattcaagaagcttatggagtggcacatacatagtataggtaaatataagacagatggtatcgagagccagaatgtgtgatacaggcaagcagtgcttatagggtttcaaaaaaagaaaaaatggagatatcaatgtgggctgaagtcattgaggggaggttccattggggagccttgagcagggagagtaatcaggagaggacactgagaacaagagacagtactgtggcggggtgaatggggcagggtaggggagttggggagagttggtattctgggagatcaggaagacacagacttgcatacattgagttggagcaaagagagctagaatcgaaccaattaggcagggatactgtgaagtatggcattgggggtaattttgattataagggtgtcttactacagatgctcctggggacacacaagcctcatcttttggtatgttggccttagaaaaaatgttgcacgctgtgcaccagcaaagtttagccaggacaaagaattctgtattttgtggaaatacagagtggtttgaagtagagacaactgagtgtctcaaagatagcacagggcaggcaagctccaggcaaaaaagacttgtagtttttctgtgaattttcacagggtcagcccaggttgcttcagggttatttgtatcattcatccccccttgcctcacctgcctcccaaccccattttccccctttcctctgttgcattctggtcatgcgagaagatttagaaaagactagaactgtatttggagagccactcacaccagatttgtgactagtcatgcacaattcattagattttatgtttataccataatggtgaagctgcagatgctgatatgaaagcaata

SEQ ID NO: 115550 - DNA, 1010 bp, Homo sapiens
ctcaggacaggcaagagccaaaccctcctttcccccaaataaactagaagaataccacttagaagcagggagagaagggctgacatgtgtattccacaaacacacacacacacacacacacactcaagttggtactaactattgtgaccttacagtctttaataaaattctggcaaaatggcacacaaagcattaaaatttgtaacatggttatataacctttatttggctttctttctttctttttttttttttttttttccagaatagacaacattagagcctattagtgttggccttgggaagattaagtgcttttggaaagtgtaccctgttataaacaaaagacaagcacaatctggtaactaaaaatgttttcctaagaggacagagatgtactttttcttcctccctcagtcctattgatttttaaatgtctgatctcaaatattcaccttcatgaagcatctactaaccttttccaaatcagcacaatctcttccttctttgagctctgtataagttattatttaaagagcttataagttaatattaaattttgctatgtttcatagtgttatatccaatcaggactcatctcgggaaatataaattaagacagagacatttggcagaatttcaagagactggccacatggaattctttttgtttttttgagacggagtctcgctctgtcacccaggctggagtgcagtggcgcgatctcggctcacagcaagctccgcctcctgggttcacaccattctcctgcctcagcctcacgagtagctgggactacaggcgcccgccactacgcctggctaattttttgtatttttagtagagacgaggtttcaccatgttagccaggatggtctcgatttcctgacttcgcgatccgcccgcctcggcctcccaaagtgctgagattacaggtgtgagccactgcgcccggccggaattctttatcctaaggaagtcaacccacatgccaggccaaatgtaattc

SEQ ID NO: 115551 - DNA, 1010 bp, Homo sapiens
aaaaaagagtaaatcaaaaaaagggaaacatcacaaaaaggaaaaaaagaagagaaaaaaggaaaagcattcttctacacctaatagttctgaattctccagaaagtaactgagactttggcttaagccgttaaatttaaaaatttgtttttaaaacgtgtttgcccttccttggaatttgctatatattatgctttgcaataaatcacagccttttccatatagacatttttcgtatttgggaccattatccctctggcaatatatttttaatgtgctgtaactgtaaagtattaaatcagtcttgttacttgatagccatgccccaagtatagctatttgtgtatactaaacacatcatttttggtatttgtgtctctgtgtgtttggctagtgttactacttcataagttcattgtaaaatggctttactgccatcaacatgggtcatctacctagcagttaatgagtattgctggatcaggtgtccaccttccaatgatgaagcaaggtaaggggtaatgttttgctcttgacacagagaaatttaatagctttatgtactaaaatataatatcttttaaagatagtgaaattcttcagttttttaaatctctagggattttttttcaatgttgtagaagatgcagctgcttaatggtcttgactaggactttttaaatgaatggtgtctgcaggtagatgatcatgaaaatatctctaacaaagttttactcttctatgaaatgcagaatttctagtacctgcctcctttgtttttgtaataattaaaatacttcttgtataaagagattagttcagcctgttagtaagtctgcagagatgatgctgagttggttgtgatttttagaatagactcctgggttgttttacaaatgtgccatattggcatgtcttacagtgatacctcaaacacagaaatttttatttaggaagatagctaaatctttattagaactgatttttattgtattcagtataaattttat

SEQ ID NO: 115552 - DNA, 1020 bp, Homo sapiens
agataagtgagaaattaagtacagaggtagtagctgtagctaatattgactaatatttatgtgtcaaatatgtcagaatgaaagatgttttctgtggatagaactcaaatacaaatgggaggtaagtgagaaattaagtagatagtaactgtagctaatattgactaatatttataagtcaaatatgtcagatactatatcaaacattgtattctatctcatttaatattcacaactgcactgtgaaatgagtattaatattcccattttacagatgaggacactgagggacaaagaaatcaagtaatttgcctattatgagacagctggaaagcaagaagtcagtctggttcctctagactgtgtacttcattcattttgccatcgtataggataacttacaaggtagtttccagctctttaaggacctgtaggccatgacaagaggtttggcattatcctacagatggcaggaagccatttaaggattttaaagcagattcacattttggaaagataattctggctagaaagtagattggagacaaagtttaccagttaggagtaattctggtgagttataatgatgtgtggctgagatgtggtctcaataggtaaggagagaagtggataaattgaagatacatttttggtggtagagtcactaggagttggtgattgattcagtgtgggtaggtaaaagaggaaatgaggtttacctgggttttactgttaagcaattgggtggggctgtttactgacatgacaacacctcacaaggggcaggggttaaggggatgatgatgacatccagtctggggcttgttgtgttgaggttagtcagacataggaatgcaaatagttaatagtaagagatataatttgtagcttaggaaagaagtcagagtcaaagacaatgatttgggtgttacccacacacataataggaggtaaggctatgggagtggagcactctgcttagatggtgtgtagaatgtgaagggaaggtctgtggctgaa

SEQ ID NO: 115553 - DNA, 1111 bp, Homo sapiens
taagaggggtaactcgagcctctggctttcgaaaaggcgcttgcttcccgccagctgtgagaacaaggcacagtcaaagcggcgttttccttcccccagcgcagcagcaccctcgctacggtcgggaagggcctgtacgcctctagcgacggcagaaccagtagatgcggatgcagtttccggacgagtcatattgcagaagacacatggtccgaaccattactgatagttttggagggggagttagtttgatctgcacacgagagtagtgtaaacaccgccaacacttatgaagtgtcccttctaatattgtaatacaaataacataaataacattaagctatggtaactttacggacttttctcgttccctggagtacattggaataacccttctcagggttagcggtgctcgggtccggtaacaacatggcggcgtccgtgaggggctcctttgggcaggggtagtgtttggtgtccctgtcttgcgtgatattgacaaactgaagctttcctgcaccactggacttaaggaagagtgtactcgtaggcggacagctttagtggccggccggccgctctcatcccccgtaaggagcagagtcctttgtactgaccaagatgagcaacatctacatccaggagcctcccacgaatgggaaggtgagagcctcatctagggaacttggggtcctgggatccccaaagtgagatttcccggatttggggtggggagtgggtttcaggatctcgtggtaggaagagaccacgagaagtgttgtctttactcctgcatgtggacaatgttgcatcgaaacactgatgttggtacttttcaggatgtacttgaagaagtcaagtggagatttctctacctaccagcattccggtcctatttaatgctttaacccaactcatgcagccgatttctggggtcttaggtttttaaacagacatttttgagtttgatatattctttgcttaactaaggtcattcattctccatttcttctacaatcattaattgaacgcctgcgaggcactgggcactgtactaggcgccggagatacaaagatggatgggtaaggtagttgttttcccggaaaagct

SEQ ID NO: 115554 - DNA, 1015 bp, Homo sapiens
tttgaattaaaaaacaagaacaaagcaattgtttaatgacatttagaatgagatgggaaggagtaataattgaatactctgcaatggctcaaaggtagttttctgggagaaataatagaagatttcaaaagcatagctgactttgggatgagaatagggaaatgacttagaaatccattcccccttgggtactcttcctttagatgtaactaagcagctttctacaaaatagggtatatttctgtctgagtatatttagaagatacagtctagtgaattcaagtttaataacattgaaagaatagtaaatacttgaaaatcaattaagtaaaatgtctgcattttttattagaagttgtatgggaccttgcaggtcaagttgaataactgcatatgaagggtcttataactgaggacattcactaaatctttttacatttcaggatgaatttcattcacggttgcgttttaatcggagaggactggttgccatggcaaatgctggttctcatgataatggcagccagtttttcttcacactgggtcgagcagatgaacttaacaataagcataccatctttggaaaggttagtgtccagtgattttaaacctgtggttcagtttttggttttatgttattccttagacttctaagatacatatgattaacttatctaagagctacctttgtaaaaacattccataggatatgtttattattttcaaaaatgatggaatatattcctaatatagtgcactatgagggagcatctaagttctttttggatctttcaattcagtcattagttgtgactttagtgtattccttctttaaaatcatagtaatggtatgagctaaaatgtgccacttagccaatattgattttacacttttggaaggacatttaggtaataatatttagtagtttacagtttattttcttaatgatggattttcttaagtttaaagtggaatttgtgttgacattgaaacttcttactgtaaatattactt

SEQ ID NO: 115555 - DNA, 1052 bp, Homo sapiens
taaaaattaagaatcctaggccttatctgagacccactaaattagaatttccaagcgaggggcctgggaagctgtacttttaatgaattccagaggaattcataccaaggaaatgtaggaaacactgctttagcagatatgaatgatttgctgctctatatgtatgccttattgtttccattttttgtgcctttcttgatgttctttttcccacctgaaatgtcccatcacacctctggatatccaagtcatatttgttttcaacacctgaaatgccatcttttctaaatgtcttttccagcttttaaaaatcttttttttcttacccaacctttgcctttcttgtaatactgtacatttgccttttaaacacatcttttttgctttattacagaagaagcatatgactgtgtttgcattgtacactagtccaaagtccaacattataccctttactttataacttattaattgtgtagagtcctgggctgtgagcttgttgtacatagagtctgtgtcatctttgagtggcagtgtgctagaatagaaataacatggatttgggatcatacaaattcatattaaaactttaatttcccctgacaccctgtgagctttgataacttagtctctctgagcctcaattttcctttctgaacaagaaaatagtatgtcccacttactgttgtgagtaaggatatagttttaattttgatttattatacaatactgaaaaatgtctttgaaagccaagtgccttaaaatatactatacattataactggtattttaatctcagataactaaagaatgtaaaatttctttaatatgatcataaccattatgtagaatcttatgcccttatgcccaatctagagggctggtgagaaatttcattatcagctcagcctttttgggtaggaagccacaatcttgacacaattggcctagtggccttcatgagcactcccattgagtcctagatagtggcttgtgcagcccagcctcattattacccaccaacaacccattcttcacatgcgattggatct

SEQ ID NO: 115556 - DNA, 1196 bp, Homo sapiens
ccagcactgttcaaataccttggtaagaagagggaagactagcttgaatgttggaaaactgtggctaatagaatatatttcttcaaaatttagctttactatttttaagtgtatgaaatgactggagccaaagccaaataagtgtctgttctaatgactaagaataatttgcagtttcagtggttgcatgaaattaaatatttctaaagggcttaaaaataattgtttcattcttcatttgtttatcaagtttcttttttcagtgactgcacagtattaatctttattccagaacctttctgcccgatcacaagttaataattggtaaagtctgaattgaggctttactttatgtgaaaggagaaataagattagagtcctctctggtttatggattatcagtgtgggattacagacaccccttcaccccactcacttattcatgacaaggtgcctctcccacatgggttagctttccttcattatttatttcagtatctttctactacctgataaaatctcttagaatcatagaattttatagctcaaagggattttgtccaacttcttttctttatagatgaggaaactgagcctctggttaagtgacttgccagactgacttcatttcctttttgataggattgcatgatagggagatgccataataatcgtatcttgagttcagaaaagcaaattgtgagactctctcatgatattcttgtagacaacaagaagaaatgtgatctgggagatagtacagtcagatagatttatagctaattgaatacttctgaccaaagggtgctttgttgtcaactcatgccaatttgaactagtaatttgaaatgtaataggagtacatgtaaattctgtacttgagttcaataaaatcagctgaataggtatgacataatagcctgtgagtcctagttgaattactaagaataagatctctggaataaggattttaacatcctctgcattgtttagatcatacttgcagcattttatccagttgtgaacgtacttaaggaagatcttgacaaactagatgcatccagaggaagggaaatggtggggaagacgggaatgatgccaaaaaccacctaacatagggaatgcaatgaggaactggatataataatactttagagaaataaaactaagtgaaaatatgatcctagacttcaaat

SEQ ID NO: 115557 - DNA, 1091 bp, Homo sapiens
aattgtttcttccttgggaaacctcagtttttgctcttaaggccttcaactgattagatggggcccacccacattatggagtgtaatctgctttctcaaagcctactaatttaaatactaatcatatctaaaaaaatattttcatagcaacatctagactggtgtttgactaaacatttgggtaccattgcctagccaagttgactcataaaattatccacacagagttagagattgagccccagaccttccagtttcttggtcaatgttgctcctgtgtcccttcctcctccctccctccctccctccctccctccttttccttcttccttccttccttcttccctccctccctccctccttttccttcttccttccttccttcttccctccctccctcccttctttcctccttccttccttctttcctctctttctgactccctcccttccttcctttcttctctttctctccctgtctcccccgtcacttcccccaccccttctcctctctccctctgcccccttctacctgtattctatttagtccctactgttttgctgcctctttgttcttggatatgaagttccagataacataatttttctgtgtccctctgattttcatttttacatttgtttgcagatagttttgaattttctgtgaagcccctaacactgaattcactaaatatatttagtatttcattcatcagctaaaccttttaattagtcaacttattttaagcaatttttaaaacatttaaaaatatatttggtgtttgttcttcctttaaattcactgttacttgacggtataaataagaaccttaaagtaggtcattaagaaagaataggcattaaagggaaaaatgtctgaattcattttcactctcttaaggattgtctcctaatttcttcagttcatctccaatttgctttctctccctgcaggattcagagtctactgtagtgggaagagaggcctaacaatttggcttttcatatatttctatactaatttaattttaaaagttagttaaaatttgaaatggtaatgattattaaaattaaacacaggttcctcctat

SEQ ID NO: 115558 - DNA, 1841 bp, Homo sapiens
caagtctcaaattaagaatcctgcttcactacgactcaccagatcaaagaaagaatcacaaaagaaaaatgatccacttggggttatttcttccttcttctctcccctctttcttccctttgttcctccatctgtcaatgctgggcactattctaggagttgaagatacagcagtaagcaaaacaggccagaattttagctctcatggagtgtttgctgtaattggatgacagacaatacacatgcaaataattaaaatatatggtgtatcagataggtgataagtactttggaaaataagccagggaagatgaaagagtactggaggtaagtgtgtggttctaccattttaataggttaatctcatcaccaagagggtaacatttgagcaaagatctgaaggagatgaaagagcaagcaatgaagagatatctggaatagagtatttgtttcaggctggagagaacaacaactccaaagttggctagtgttggtgggctggagttgtaggagattatgtcagggaggtttagattgcatagggccttgagtgagttggggacccactagagggttttcacaagagaagtgattgctgtgacttggattatagaaatctcagcttctgcactacacctcttctacttgaattgatccctgttgaggtcagtatgctggccaactgccttcaaaagccacatttcccactgagataagaataggaatatagacagaatagcccgagtgacacagagggagaagtctgctgcacaaaggagctgggcatgagttgagcgaacagcctttcctggggtatcccataattacatagttggcttagagcagaacccagggctattcccacctgtagcagattcttcaagggcttataattcaaaacaaaagaaaacaaaataaaaaaaaaaacctagtttagaatgcaataaggagattcagtggatgcaatagatctctagaaatgaaaggggaaattgagcacctggcaaatactcattttccatttctacaggatggagaagatgaaagtgcagagcatgatgaatatattgatggtgatgaaaagaacctgatgagagaaagaattgccaaaaaattaaaaaaggacacaagtgcgaatgttaaatcagctggagaaggagaagtggagaagaaatcagtcagccgcaggtgagtcagttactgtgctagatatcagagtttttgtctttttatatttcactttaattcagattgaatcctctcttcagctaatttttaaaatactattttcataatgtttgataaacataacagttgtacaaattggcccattagcaggcctaaaataaaatacaccaagcttaaagtaaacataacaatgatcctatgagttcaattccattttatttctctctgatccttttttagaaaggctctatactttcatatatatagggtaataatgtattagctagatgtggaagaatgcatttgttaaataccaatgagagcagtagagtaattgtatagaaagaaaagagacatcctcaaataatttcggtaagcaaaatttgtcaaaactgatgaagaaaatgagtgagcctgaaaacattcttaaatatcttttcaagtctgatttaccaaataccatatacctatcctaagctcagtagtatcataaaataaatttcagcaaatggtgaaaagtttactgtctggtgatgaaagtttgttggatttatgactcaacattttattctcctgaaattcaacttaattgaaaaattatctcttttgtgattctatttcaactttatagtatacattttaaataatattgc

SEQ ID NO: 115559 - DNA, 1024 bp, Homo sapiens
tttgtataagaactaaagttcatttttaatgtacctttcataagtgtctttaaaaaattgtttacctaatattaagaaaagtcaaagtttgcattttccaaaattgtgttcactcttacaattaagggttattcttaaaagatttccttggctgtagtatgggcctgatgaccaaacatggcattgatagctagatttaggaatctgatctatcatgagaatactggagagccactgaagtttttacaggcaaatgatatattgagattgtatttagtatggagaatggattgatagaggagtgttttgggctattatacaaaataccatagactggatgacttaacagacatttaaagcttagtttttatggtaatttcttacataggaacatatatatccacttacttatgtaaacaatttttctctttttataaatcagtataatttgcaaaattaaaatcacataatttgtatattcactgtagaggaaaaagttatattcaagtgcattgcaagtctactaagaaaattaaataaatttaaaaagtacgttaaatacttttctacttagaaaagtaaattaaataagaagtctccaaaggtggcttgaatattttaggtaaacatgagtattgtggacattgttggattcttttaggtaaaataattggcaaagtgtgcctttgtaaatggtgcagacagcacacatttatttataactgttctgttcccccacattttcattattcacattctctactctccctccttcatcctatctgtcctacctacaaagagaaacaaaagaaaaataaggtcaggatagaggagaaagtacagaatttcaaaaggaagaaacagttttttcctctagtgtagaaatttccatgattgtctcatgaccacgtatttttttcagttcataaagttgccaaaatcagaccctggcatggtggctcatgcctgtaatcccagctgctcagcaggctgaggtgggaggattgcttgagcctaggagctc

SEQ ID NO: 115560 - DNA, 1008 bp, Homo sapiens
tctcaggtttaatgaaatttacatgctaatttttactagaacttgatttttatttttgtatattttttcctaaccaatcattctattctcaaatatatgttattcgtgttcccagccactgtgtaagaactggtgcgtgccaggaagtggtaggctccaggaacatgaaaataaaggagatatggtttctatctggaaatgttcacaatatagtgtaagaataagaattgtcaacaattaattacaattcagtatgacaagcgctctgctagacgtgcatacaaagtgctatggatgttaagtaggcagtatatatttcaggaaaagatcaaaataccagatttaaaagggttgaacaaaaattgccatttttgcaaatcaaaaacagtcaaatatcagcaatttcatatgtatgactctgatgctaataaaataagtcattttttggagctactatttaaaaggaataacactttaacattatattcaattatttaaataatgttgcataatctctcaatgtagactaggtggtttgttttaattgcctttaccagttatggttaaaattttggaatagtattaattgtaatagaaaccatactatatttagcatttctggcaagcttccatttttcttctgtttggacattaatagcaataatttttggatattctggactaaactgtttcttgggccacttgaaataaaaataccacttttaaagtgcctattcagttcattgagaaccagttaatccgtatccaaggaatcaccttcaaaacaaacaaacaaaaaaaatccttgaacttcagctatgtatatcagaaatatgacaaccctactgtttttacaattagattttgtatggcagacaggaagcagtgaaatgcacatgtgggagaagcttctcttgtcaaaatagaaaagaggtatttgcatctctttagaatgtattgatttatattatccttgagagttagaatccattgatctcactgcatcag

SEQ ID NO: 115561 - DNA, 2136 bp, Homo sapiens
tcaaatataccaaaggtatattccagatgactcctagttttctggcttggaagactggctaagaagtagtagtaataagcattgagataggaacactggatattcctactcctctcctcagatatttttgccctgttggtcctttctgatatacctctgttttgctacacataaacgtatatcctgaattgtttcttattcaattgctttctttattagtcagctatattaggttatgcacccaaatctcagtggcttaaaaatctcagctaatatttgttttcttgctctggctacatcctgatgggcagctgtggatctgctccacatcatcttcattctaggcctgggatgaaggaacagctcctctctgaaatgtgctactctcatggcaggaggaaaagagtgatgaaggaatgatatgctggctcttaaagcgtctgcttcgaattggcatatgccactttatttcactggccaaagcaagttatatcgttaagcctgatgtcaataggatgaagtataaacctttcatagggaggagcagtgaactgttggaaaagataatgcaatctactacagtctctacgatttaaacagaaattgctgtctacatctatgactatgtagtaagtttgatcatcatattcctggcagcctggaggaagaaaatggcaaatataataaaaattatataattaccattacctgaatttttaaaaaaactatatatcaattcctagttatttcagacttctagaagtacaaaattctaaaggaaattttatcttatcagtctttacacccaagggtggagaagaatacagtggatatcttccataatttcacagatgaataacacttcatatacatacaacattaaattgtaactttcttattagatatcttaagaatcctttggttataaggaatagaaacccactcaaattagctcaagtaaaggaatttctgtatgaaggaataggggagttgtatagaatccagataaaagaattgcatacagtcttttcaagaaagcaagttgtcaggaagttacattttctctctttttttgcagcttttctcttatacttttcttttattcatttgttccattatcctcacatacctgttttctccatagagctctagtctgctacttgttgcagttgagttcttcagaagtaaattgactggatttctgtgtccaaaatctgaatatttgggagagagaatcttattggcgtggcccaggtcaggtgtccactcaattatgccattgatagaggaaatggaaagccacgaagtatgcagatgtggcaaggatgggtagctcctccaacatctatccttccttccctcttaccagaatgccagtgtttaactggagtcatggctgcttaactgaaacacattcatcagtctccttcattgttaagtatggtcgtatgaccaaattttggctaaagaggtgaaacagaaatgtgtcagacattcaggccgtcttttttaaaggaaggaagaaagaagctagccctctttcgtacctgcctcttcctgtcagcctggcacacagatttgatgacttgagctaaggacggtagaatagagaggagcatgcgtccttgaagacttcgtggaaccattgttgcagcttgaaatgcctacctctggacatttcctatatgagataaactacctttcaggttgattcagtcacattatttgaaatttctcttatgtgtggtagaacccaaaatgatacaaggcagctttttttcaggcctgtgaatagagcaggttctctaagatgggaatacagcagggaggaaacgaatggctgcatcattatttctaatagtttttgtagttgattttcttgtttttcctggaagagagtcatatcactttgcaacacccagcatctctacccctcttctcacttttggctgatcaccttgtatttcattaagaaacagaagcagtgagagagaacttgttccttttcccaccaccaaatctacctatctgcatctgaatctattttcttctggcaagggcaaccccttcactctgtgtcctggtcctcatatccttttactttctcatatgttttggccgtgctattacccactt

SEQ ID NO: 115562 - DNA, 1115 bp, Homo sapiens
tctgatggttttataaaggggagttcccctgtacacgctgtctttgcctgtcaccatgtaagatgtgactttgctcttcctttgtcttctgccatgatcatgaggcctccccagccatgtgaaactgtgagtcagttaaacctctttcctttataaattatccagtcttggttatatctttattagtagcgtgagaatggactaatacggggacaaaacacctattatagtacttaagcatggcctgcaacacaaactgacaacttaggactcttgcctttagaaaggaattacaacctaaggatggttaaattgcagcatcactgctttcagtctttggtattatggtcatagtttgggagaatgtttgaattaccttaattcatgcagtttaaggtcattcagagctttttgctattaatatgtataaaaacccctactaaataattttcataaaactgataaatagtgtttattccaacaaagacatatatgagaaaattttcagtttattctttcaaaagttttaactaatattttaagagtgtttgaaagttgatgctgtgtatttatttgaactgttcttttttttaaatactgtaactgctcaagattactttagatgaacacctggcacctaaaccgggtataaacaaaatggaaacaaataaaaccttacaaagctgtaaatctgacatggaaatatactatgccaaagggcacacttcatctgggctctttaaggtgaaacaactcccagttttcagccagagcagtgacctggccttagtatattgtgctattgtacaacagtctttatctgcttcacatcactcaagttctgtttaactttttgttgttgttgttgttgttatattttcattctaattcttagaacaaaaagaaatccttttacagagtatgataccttgaactagaagagccacttaagtatatgtgaaccaatatctagagtgtgacatacctattaaatcttaaagaaggaaaaaaaaagaaaagatggttaaaagatagagagatagatcagtgggacagaatacagagtccacaagcagacctacacaaatatagtcatctgatttttttgacaaagg

SEQ ID NO: 115563 - DNA, 1004 bp, Homo sapiens
ggaagcttagttatggaatgtgagtatgggctgaaatctagctggggctctactcaccaagccttctgcactggtgtgagggtatgtcagtcctaagggtaccttcttctaatccttcagtctagaaaagttttgtgggttttttttttttttcctctagaaggcaccccccaggggaagtgttcctttcttttctcttttttttttttttttttttttgagatggagtctcactccgtcgcccaggctggagtgcagtggtgcgacctcggctcactgcaacctccgcctcccaggttcaagagattctcctgcctcagcctccctagtagctgggactacaggcacgtaccaccatgcctagctaattttttctatttttagtagaggcggggttttacccgattagccaggatggtctcgatctcctgacctcatgatccacccgcctcggcctcccaaagtgctaggattacagacatgagccaccgcacccggccagtaagtgttcttttctaattcacagaaaggtgcctctcaaggtagcctgtggatacatttaagaagtaaaagaaaatgagcaagtaggtataatggcatgttttcccaaaagctacagcacagtaaatcaggtgtgtcaaatttttagtaacatataaggcaacttggagaccgtatgttgcaatggaaagagctgtgggagggagtttggaaaccatgcttatagttttgcatgtctcttccccaactatttgacactgggtgttcttttcttaaaaatgaaagaattgaactacctgctacctttaagggtgcatctaggtctcaacttctgtgaaagttatatctggaacgtggtaagcagggagaggttggaactaacaatttaccaaattggcaagtttcctatgttattaaaagtccttgagatatatgtttacatgatctgtattagtatggcttgaaatcatgtagttctccaacttccttttttctacttattt

SEQ ID NO: 115564 - DNA, 1663 bp, Homo sapiens
accttaagcaaatagtttacaattaaatttaaatattgctgaagcccctctttttcctcaaagtgcttagaaatgttacacctttgaggtaacctaatgttcatttgtggctctagaagacaatggacaggaaagagaaaagttaatctcaaggcagtcaggcacaaatagcactgattgcctgttactttgcaaagcattatgtggtatgttctatttttaaatttcactttactgtttttactttcattcaattgttaatcagaaatatctcctctgtggagatgtttttatcattcttggaactgcatggagatttccctttaataatactactgtttgcagaagtcccaggcatgtgaccttaaaacaaaacaaaacaaaacaaaaaggcaaatcattttcctacttttagtatgtggttaggaatgagttggctcattcacatcaagcctaatttgatgtgagttagtatgaacctttgacaaaatccatggtttagaatttagactggaaggagacaataaatcttactgtttaaatcacccaacagagtaacagtactgtttgtaacatttctccagccttctttcccaaatctgttactctgtgatgtaaagccttggttacttttcagtacttttaaatttgtttgcagaaggtggaacccagaaaatgtgcccatcattgagtgctctaagtttagctgaggaaagcaaggacgtggtaatatttctgttccaaagagttgtatttatctgagttacaggactggtttacataaatgagaaactaagattttccatacaccaggaaaagtttcaaaaggatggctttcgtgcttgccacttcatacccaccaaatgttacaaacaaatactcatgtctgcagtaagacatttgtgggtgtgcgtaattgcggttcacaagtcattcaagctcaagtcttttccaggtacaaatgagaaaccctcagaaaatgaggctctctctgcatttttggaatgagttcagctattaggtttaagaatttatttttttgcacaaaagtagatatatcagagggtcttttgtttcaagaaggagttctaacacctttggtgtaaaatggcattcttgtaatctttatcatatgtaactacatttttggttgttgagattaggagttgaagatgttaagctcttcaatagcctgcatagttttaattaacttttaaataagcagaccttttgtagacagttaagtttttaatgtgactccattgcttactttggctactaaagtgtcaaatttggttccaaaactcatgagaagattcaaaactcattctctttttttttttgtgaagaaaccagaaaatatttcaataaagttactgggtttaatatctagcattagtcttatctcttttaaatagcaaaatgactttgtcttagcaagaatatgaagcaagttcagggttaaagaaattcattttaccattttaccactgtattttccattttgacattaaaaaaaaagccaaacctcacctcacgggggtctctcttatttagaggtttacaacttagttaagctatgtaattttgctgaacattttcaaactacaaaatatgaaatagttgtcgccgatcatagaaacctctttactttcaaagtatt

SEQ ID NO: 115565 - DNA, 1005 bp, Homo sapiens
tagctaagcaataccaagtaaaaatctttactcattttaattcaagatgtattgaatacttactaagtgcaaggaagtatgcagaatgctcatttatttgatactttgttggaaagttaactatattgaatttatctcactcgttttcttttgtcttttaaaggtgagaattctaactcttttagaaactaataacagtttcaattaagttcttgaaaccagattttcagaaaagtttataaacaactatttcagtgtatgacatagcctttcagtataatttggagagcatgatattgttacctgaattacttctctttctactactagtagataataatcttctactagtattaaaacacagaaatgttcttagagagggaaacataagtaactggttagagtgcttcagtaattttgtatctgctactaactaatgcctcgtatttggtcatgtttttatgtgcacaaataaaccaaaagatcacagtgactaaaaatgttttaataactttaggttgtatacatactgaatggctaaaatctccagcataaatgaaaatgaaataaatggctactaataaaatagtatgcctctatcatattcttcagcccaaagcatttttgctgacagcatttattagatatctaagatctacttcagggagggacaaaagagccaaacagtgttttcagagtcagatgcttaaaggacgaaaacctttttttttttttgagacagtctgtctctgttgcagaggctggagtgcagcggcgtgatctcggcacactgcaacctccacctcccaagttcaagtgattctcctgccttagcctctggagtagctgggattacaggcacctgccaccatgccccagctaatttttgtatctttaggagagatagggtttcaccatgttggtcaggttggtcttgaactcctgacctcaggtgatctgtttgcctcggcctcccaaagtgctggaattacaggcgtgagccac

SEQ ID NO: 115566 - DNA, 1092 bp, Homo sapiens
ggactgaaacttttggttttcataatgtttgctttataaagttgatcttggatagagattattaatacagtctatgttctgtgcttcaggatgaaataaagacacatcttagaaatagctcttcttacggctgttactatatttcagttttcagcatggatgttgatttttatgtgttattctcataaatacccatcactgtcctagcttagggtcataagccatcatggctttagtaatctgcttctctccttgattctaggaatttttttttaataacacttgggaaagatagacatgctaattcctctgtaagaagactatttagtataccctggaattaagggttttgaagttcttttttgaaagatttatcgtcaaaaaaaaatctagtttagtatgtctagaattgtgttgtttactttttctctttttgcttcctcccctgcaatgcctacaggctgatatgagatcactggtgctgagagccaagtttacagtgaatgtggtcatgtttaaacttttgctatctttaataaatgcttggtaacctcaatattaatggtctaacaattagcaattctagacctgttgaaaaagagatgttgttgtcatatttgaaaaaaaagtgatttgggaataaataagaaaagagcaggaagttttcatctccaagtaattattcagaagagtgttttcagtagtattttatttgcagtgagtgaaatcagcattctcagagactagtgtttgcaactagaaaacatgtctttctctgaacatgtcagcataataaacagccaggtgctttgtagctacttcccattatatagataatgttgatgtagagcaagattcagtgagttctatgtttaaaataaagagatttcagttaatttattgcttctttgagagcaatataagaaatgtgtaaggtatagttgtcctttacctatgaatcaaaactaagtgccatgaggaacaagtagaacgtcttttaaacttacagaagtaaatgtttgttgaataactacccaagcaagcctacacaaagaggagttggggataatctggtaatactattcctactta

SEQ ID NO: 115567 - DNA, 1010 bp, Homo sapiens
gtttttttgtttttattttttagtggtgacattttggaataagaaatttgtgacttattgctctctttgtaaacataatttcacaaataatttagggacttggatcattcagggataccatgtttattggaagaaaagattatattaagtaggtggcagtttaaagaggttgaaattaagttaaaggtaagcatttggaagaatatttggaagcagtagaaattgactaacttagttgtctacacacagccatttctataataaattccatttttttataactctgaaaatcaattctgcattaaattttactatttcggtaaatgatcttcatacagtaacactttgtgatggaccagatgttgctagcttatgtaattaacccaggtgaaaatataagttatgctgttgaaaatctttaaatgtataaaagcaataaagaatagtagtattttagtaacaaagagaaacgtgtaggtttactgcatcttctagcccattctccctgaaaaggtaccatattggagatgttataagctcatgcttgatttaaggtttgaataagttaacagctgggcaatatgttgttttaaagaataaagtctaggcagcaccatttattattagtttaaatttcagtattcaatttattcatcactgcctaataaagaccctacttcctttttcaccagttttactcactgactgatgttctatcactgtctaaaagaagacaaagacagatgtctctgtgcaggcagaagatgctcagtcaggatagctgtgtgatgtctaccaggtttaacaaatttagcaatacaaagcataaaaaagtggactcctgaaaaagatctgctgttaagtaattcaagaatcacaccctcaaagatcctgtttgtagtttttggtaacctggagggcatatcgagtaggcacctattcaacataatgtctaatttgttgacactgaaaaaagagttcaagattatactcaatatatttgtataaat

SEQ ID NO: 115568 - DNA, 1914 bp, Homo sapiens
agcagaagggaagtggaagagagaggagtgttttaggtcatgaggaatagatgttaaagattatattatacattctgagaactaacaggattttaggatgtgggaatgcatgcaaaaagtgaggcaagagataaagatggagaatgaagcagagctgagaccatgaagaaccttgcagtcttaaggagtttggactttgagaattaagggtcactgtagcattgaagtgatgagatcaaatttctcatcactttaaatattgtttaaaatattgttctggctctagtttgggcagggacttccaggcaagcaaatcacagagccccaaggccaaaaagatgtgatacacttgatttgggcaggcatctgtaccaaaagagtccaagcctatcagttagacaaggcagtaagaaaaggcaaattttaaggtcaggtgagcaaaagcactgtttatctaattgctcttctgtcttgaaaaagcaagcaaaatacttcctgggagacttggaaacttcaacccatgcagtgaggaaagagcctggatttagaatttgaaaaatgcatcataacaatagtatcatcatcaacatcatactgtgttgttattatcaggaaggccacatttaggtatacttgattatagacctaaggtaaggataaatatagggagcttgtgcatcagtattgagagttcagaaaagtctttgcagagaatatggcatggaagctgagatctgaaggatgactttgagttatgaggagaagggaagtggaagagagaggagtgctttaggaggaatagatgtgactcaaacagaatgactcattttatgccttattcttgaatagatgctcatgatagatctctcatgcataactggttcaggacccaggtggaatgggcttgcatgggaaggaggcacttcaatgtctgtacctgcactgtatgagagaggcagggccaaaagttcctaaacgtgaaaagcttcagtaattcaagaggatcacttatatgcagcttcatttgtgaaacgctttgtaaagctttatgatatcctagaagccattttatataattttgatacatgccgatgaaagtctagatgaatgccagagaaacttccacctcatttttttcttatttaatctataccatgtactatatttaaatcatttgtccatatattcatttttttacataatgttgaaagtgttttgatgtcggtaaagcaaatttaacaaggcaagaacactataggaaatgggaaatcttaaagaatttacataatgcttatctgttaccaagtatggctttcacaaaaatgacctcatcctctttaaatcctgatcgacatcattctatctgatgctcttatctcagtgatttttattctgtgtgctatattttagacgtctgtcttcacaacaaaatttctcctcttcccaaacccccacatttccctctgatgggtcccagattagtattctgtactctttctcccttagtgtatgcctatatttatttagcaccaacaacatactgagtcacagtgttggatactgtgataaatgtggttcattaatatttttcctaatgacttcagtttttcatgaaaatgatgcctactcagtataaaaaattaaggcaatagagcagaaagaaaagaaaatagaaacccaaaataacaacacacctaaaaatattctgtgaacacggaaggtgtacaaaaggaatgcataagcttttcgttttgttttgtttcgttcacttagaagcattattttaaaaatagccaaagaaagaaagcttttttccaaggacagtaaaggtcagtcaattaaaggaagtctattaatgtaatatagcatattaataaattgaacaatagtatttcaatttttaaaatacatcaa

SEQ ID NO: 115569 - DNA, 1032 bp, Homo sapiens
aataatctctacctcaaagaccttagtgttcggaaaacatcatctaaatgactgaattacttaccaaattgaaagctatacaaagtagcataataaaaagataggaatgtttgatggagtaaatggaagatgtgtttgctgttccctgtgcagcggctacccagttccatttttatgtcatgccaagtaaatatgggatatctacagttgtgttcatatagctttaagaaataggaaataattgtacttacctgagaacacataatgacagcctaaactaggcattgatggttaaagtcaagaggagctgttatatgtgagagagattagaaaatgatgtacttcaacactgattcaatgaaaggaaagggagaagagtccaagggaaatttaaagtctggtcattcaaaagattatggttccatgatcaaatagagacttcaggagaaggaacaaatttgggcaagaaggagacgatttcaggtttggacataaagaatttgtaattatgttgagatgtccagcctgctgtttctctagagttgagtccttgaaatgaggctagtctcaattgagatttgctataagtgtaaaatgcacactgtattttgaagacttagtacaaaagagagtgttgaatatcacattaatattctctatattggttttatgttaaattggtaatattttggatatattaagtatgtaaaaattaatgtttccttttagttgttgttgttgttgttgttgttttgagacggagtctcgctctgtcgcccaggctggagtgcagtggtgcgatcttggctcactgcaggctccgcctctcgggtttgcaccattttcctgcctcagcctcccgaatagctgggagtacaggtgcccgccaccccgcctggccaatgttttgtattttttttagtagagacggagtttcaccatgttagccaggatggtctcgatctcctgacctcgtgatccacctgccttggcctcccaaagtgctgggattacaggcgtgagccaccacac

SEQ ID NO: 115570 - DNA, 1051 bp, Homo sapiens
tgggattacaggcgtgagccaccgcgcccggcctcaatttgcttttatgattgttaaccatgtgaaaatatttttatgccataattagaaagagaattatattagtaagtatttttctgttaactttccttatatcatatagaaataactggattttctctaaatccaaatgactgttaaaattagcttcacccaaaattgggtcatttgattgatattgtattttctcatctcaaaatgtgccattttatttatttacttttcgttgttttattttgaaattattttagacttacacagaagttgcaaaaataatacagttaccatataactttaatgttaaggccttccgtgaccatagattagtgatcaaaaccatgccaataatgttggaacaatactattaactaactatagaccttatcagaatttcaccattttccacactaatatcctttttttttgttctatgattctatctaggattgaactgcatttatttgccatgtctccttagtctcttttgatctatgacaattcatcaatcattccttgtctttcatgaccttgacactttgaagagttttggttagatactttgtagaatgtctctcaatttgagtttgatgttttctaattgaattatgattatttatttttgggaagattaccacagaagtagtattccttctcagtgcattatatcaggagtaacacaatgtcttctgtcttattgttggtgatattacctcgatcccttggttaaaatggtgtctgctgagttgctgtactataaagttactctttttacctttgagttttataaatatttaggggaaaatactttgacactatacaaatattctgtttctcttcaagtttctctctactaactttagcatctattggtagatggtagatcttgcttattggcaacagttatttactgtggtgttctaatagtgcctttctagttctctgatttctattttaattacttggaattctgtaagaaagaactttctcttctgttatttacatccttacttca

SEQ ID NO: 115571 - DNA, 1272 bp, Homo sapiens
gagatagagttggtttcctgtcttggctctgtcaggttctttaataaactatataatccttttcattaaatcatgtctctaagtcttttccagatttctttaagtttcatatcaaaaccagtaccaaactgaacatagtcacatagagatgacaggtttggacatattctctaatcagctttaaagagataaggtgttaggtcctctttcaaagttctaagcagacaattcctgctctatgactggtgccagaaattagaggagaagggtcaggctgagcttgtaaatcaagaaaaaattttaaagccttttcatgaaacatatccctgaggtgcctagtacctctcaagttgcactgggttatttcacatttcttcagactatctttttaatactggatcaaatcagactagagtccctcaggcttgataggttgtgaaagtatatagtttttgagtacttttcatctgggtaatatatagtattaaactagcttggtcttagttggtataagaaacaaaaaccctctttgagtgttagctctgtgttctacttaataccatgtaaaattttcttattgagcaaactggttctcttttccaaagcagttaactttctttaggtactgttgagttattttttttttcttggaacccagaagtatcagacctatttttcttcgtagtctactcttaatctatgtgctaatttttactttatttacataaagtgaaagtatatttgcacttgactcattggatgcatctcaggccagccatcattttctagttcttcttactttgggcatagccactaataaattgattatctggttttctaagctaaaaaccaattaaagtataaaagtgagggagcgtatactctaaaagggtgaattttatggaaagtgaagtatatctcaataatttaataaataaataaacaagcaaaagagaagccagaaaaggcactgacctgtggacctttctagcccagtattttattgggctaacaacaaattttttttaagtgtgagagaaaagcatggctagagacattcattcattttggtagcagcaagaggtgatcgccaaccagctgacactaggtcaggaaacacaagaacataagagtcaaatattatggaaatacttgttaaacatactttactctgaatgtgtatatctttaaaagataaagttatccctacctattgtaatgggcctgattcattaagagaagtttaaattgtatttattattctttaataag

SEQ ID NO: 115572 - DNA, 3290 bp, Homo sapiens
tacaggcacgcaccgccacacctggctgacttttttatttttagtagagacggggttttgccctgttggccaggctggtgttgaactcctgaccttaggtgatccggctgcctcagcctcccgaagtgctgggattacaggcatgagccaccactcccagctctgttgctactcttattaagaaccaatgtatttaggatatctctctgcatccctttgctgtcttaacacagttttctaataacctttctttctggcctggtggttgtaatttcaatgttgagaatttgacaagagcctttagctatatttttagtaactgcaatttgtcctcctattactaatatctgtgtcattcctgacccagtaaaaatagattgcttaattcatacaggtaaatattagttgggggtcattactgtctctttatttaaaaaaaaaagctgtatttcttacattataaaagtaacatttattctttgcaaaaatatcagaaatgtagaaaggcataaaggttaaaaagaaagattaccccataatacttcgccaaagataaccagttaactttgtgatatttattttttctggatttgtttcttttcatgctataaacacacgtgtttttttccccataatgtcattttgttataattttgtttataatattcctttttaaaagaatgtttatattgaaattgaccaagaattcttaagggggcaacttgctttaggagtatgtcttcttaattatcttacatcacacaacgtgagatatagaggatgatggatgtaaagaccgtacaaatgcagttgagacatgaaaaattcccactatttcagctctggggtttagactatgtgggagcaatgatagccagggactacatttccattgctgatgagaattctttatctctcgttctttaaaaaaaaaaaaaatcatttaaaaagtcattaaaataaatcctgagctcatgttgtagtctgttacctctttctcagctggccactaaaaattctgcaaggaaagattacattcaggttaggtatttggagcctacattgaaataattacaaatttgtccactcttggaaagtagaagaggtgaagggtatgtgtatgtgtgtgcgcacatatgcacgtgtgcatgcgcacacacacgtgttttattgttttgttttgtttggatatttagattgtctccagagaggaactaatatcatcattaaaagtttgattataaccagtgttcccatttgggaatggagttgttaacttttccagactgctgtcaagaccttattttaagtaagatgttttccttttatgtgacattttctgaggttttgccaaaaatgacatcaaacatataattcattcgagtgctgagtttcttcaacatcttgcagcacttaatcaaatttgggaaagatattcttttcacaactttatagtgtaaacctgtgaatatgttgcattaaaccttactttgtacagtttaatctgcatggtatcaggttgatttttaaaaaatgattaatgcaatagctgatagtttttaatgattatattttcaaattctgcacataaactccaggcagatggtacagttgcagcttttgagtattagtattttttcacacaaaactcagataatccctaaattatattaatagctacattaaacaatgccagaaagaacaaaaggaatactgaagttctcagaaaactaacaagatgcccaaatactgagaaatcattgagaacctattttgatatacaaaaatattttaggttttttaaagaagactatggccacgccagaatgtaagtttgtttaaaacattatgctgcagtatgttaaaatgtgaaagtaagctagccttaacgaacgtcttactcattagaaactctgatcttgcgtgtgctctatttatatttgttacttctgtgcaataatcacagtcctgaagggatcatctgggccaatccctccttttttttttttttttcctagatggaatctcgccctgttgctgaggcttgagtgcagtggcacgatctccactcactgcaacttcctcctcccaggttcaaacgattctcctacctcagcctcccgagtagctggaattacaggagcccgccaccatacccagctattttttgtatttttagtagagacggggtttcaccatgttgaccaggctggtctcgaactccagacctcgtgatccacccgccttagcctcccaaagtgctgggattatagatgtgagccaccgcgcctggcccctccattttatatataaaggaaacctagagcttgccagttaaggtgcttacccaatattacagagcaaagtaatagaactagaactcaggacccttagatttgtgtccagtgccctttatactacttgtttttcaatgtgatccaaccttgagtggatgtagtctatataaagttttaattggtatttattaaaatctactttggttttggctagactaattgtttctaaaacccccctaggcaaacttagagtcttttggagagcacattattatcataaatctacacctttttaaagattacacatgtgatttgggaatgaatgacaaaagattattatgtaatggaacacatcaatttctgtcactatggcagcctaggagtccaaactgatcccctcactaaaaacaacgaaaaatgttggatataatacaaaaatatcttttgatatgttcctatgacttgcaaaaatgcaaggaatacttaaaccagggaataagtaaaggtatgaactaagataagttagtggagcactaggtcaggctttaaccctaaggacatttgttaaattgagtgaactggaacattgctttttgaaatctcacaaagttcatggaagattatgtaaaacttaaggttttcccaaggtagcgagggtctaacaagactattctgtgtagttgagggcccaaaggaacacatccttagtggcaggaataattagaaataagcagggtcacctcatttccatcagtgggctacaagggaaattacctatcttgaatcatggcacaaaatatttgggagcaagagcatctcttgggaactctagcaacaaggcagccctcccatcagttaggagtctaaattcacactgcctgagtggtctccaaatcttccagccaagaatttagttgcaatgatagtcttggagaaaaatatgagcaatatgtgttcacagataatatgtgaacaccctatacaatgtaacag

SEQ ID NO: 115573 - DNA, 1019 bp, Homo sapiens
aacaacagatttgcctgatctgagtgttcactttgtgacaaatcattgagctatacttttttaacttgtgtactttccagtatctctgttacatttcagcaatgcatacaagattaaacacacacagacaggcaagagatgctaataaataactaaacattcttatgcattagatacttttatccttttggttcccaactatgtcttactcccagggtcctctcagcagccttctctggttggccctgtaagcatcatcacatgactcagtttaatgacagctccaaaaatagcaactaccatttcataaatgcttactatatgccaagctttatagtagaagctttacacgtattatttactttaattcttacccaaaaaccctataaaaatacatactatttttccattttacaaataagaaaacctgtatcatggagagagtgatttgattatgtaatataattgtggagctggaagaatctgaatgttttgttctttctattgtatttacctgtaacagaaagcctgtgctcttttcactttgttcatctgctactctggaaggtttttaaaggttttgttctcatttcatctcactgattgagaaagagcaaagctcaagtaccattttcttatacctttggctgttccttttatacaacatccaaataacccaagtttaatatgcccactaaagattttcccgttcaacaatgaaattacattttatagactaattttacaagattttccatatttgcttaactatcttccaaaattttgcaaaagaatccaagatataaaatcaagagaatgttttactttcttttggtggcaggtagcattacagaataccagttttcaaaagccaatggagtatcatggtcaagagtacagcctttaaagtcagaaaaacctaggtttgagtcaacttttccaatttaggcctatgtgatcttggataaattatacaatgtatctaggtattcatgtttcgtggccataatgaagtacaa

SEQ ID NO: 115574 - DNA, 1034 bp, Homo sapiens
ggagtaagttgaagagctctattatacaaaatggtgactatggttaataacaatgtattatatcctcgaatattgctgagagtaggttttaagtattcttgccacaaataaaaaaaaactgtgtcaggtatgtgaggtaatgtatgtgttaattagcttgattcagccatccaatatatatttcaaaacatgatgttgtacaccaaaatatatacaactgttgtatatatattcaaaaagggaaaaaaagaaaatggagttcttaatttagcagatgatgcttaaattctttttaatctagaaagtatctatattattctaagatacaaaaattaaaataagaccagttggtctttactgtttttctcagttttaacaaatgtaatgcaatcttagcttggatcttctctgctcttttttcttcattttttctgtttaatataatagtatctctcactttcttaaatggttgtatgttactgctatgttctatggaacatctaccagagtcctgtccaattctctacccacccacctccacgtccatccctcagtgattccacattgaacatgagcaaagccattcttccggagtttataaaacccttcaagattattgaaaatgaatggtgttatataaatgtcatgttgtttcatagcagttcttaaaacaatgagataatgtctgttaaataattttaagttccatggagaaatgcagggcataaatacaagtcattttttattatgtgatttccatatatttttgctgtacaatttaaaacattataatctctaaagatataaatgctttctttgtgtttctatatgtatgtgtacacacgtatatgctgcctatataaaattaataaataattttgttgcttcgttttgtcatttgggcccagtaaatttgtcaccataaatactggccagagaaaaattagaaatctaaagcagtttcttttagtattagacatagtgtttacttcttaactttgtacttgtgtattactgaaatttttttcttttct

SEQ ID NO: 115575 - DNA, 2708 bp, Homo sapiens
tccttgcatttcaaaggcaagggtagctaaatctgcctcagccccttagcgttctgtactacccttatcttgccatttacaacatgaaagtataataatctatttacatgctggtatataccactatgagtttctgacaaacatggcacatcttggtggtagttcatttattctacaaatacttattcaatgtctactatgtgccaggcacacttttggacattttggatacatcaggtaagaatataaatacctctgccccatgaaccttacattctacctatattgcaaagttcctagcacatcgtagatttcttctcatggtcataagatgtctgcaccaattctaagcatcacatcttcatagaaaagcatccaaaacaggaaggaaaaattagaagcaaaagggctttctccttttgggcctttcttttcataggaaagaaaatctttcccagaaccctcaaacatgtgatctggaccaaacactggctggcaaagagtggaatttcttaagtctgagcaacaagaagaaaaccgttaccataactaccaactcacctgcatctgtgccatgtgcttgcctgcccacctataactaaggatgagctgtttgtagtcttaggtcaactcctccacttgtgccttggatcctgccgcacgcccccatcacctacttgcggacattactccaacagttcttttctttctgtcctgtattatcaaatttctgttcttactggattttcatgctctttcatcattatgaaagcatgcagtaatttcttcattaaaaaaaaaaagtatatcttgtctccacatccccctctaactactgtcctttagctctgcttccttttctagaaaaaaactccttaaagaaatatacatgcttgtcatctccaattccccttttcctgtttactcttaaatttactccagttagacttccgttcacacacaactgcttagccctcttaagtgacctattaccagattttacactgttggtcactccctcctccttgaattattgtttacttggcctctagttttttctctcttatactaaatttatttgaaaacatctttaaatctcatggatttacatatcatctattgctaataatttccaaagtgtttaacatgcatctgaaacttaacatgtcccagattaagctattgatcttatatttcaaacctgctcctcctgaaatcatccctgtctcagttaattttggaatcgttttttgttcccctttcttttctaccccatcaaattgatcagcaaatccaggatctgtaggccaacaatttccactggtagtacctggtcagccacaatcatctcccgtgtagattagtgcagtcgtttcataattgatctctttgtttctacaagtgacctctgaaagtctattctcaacatagtatccaggatggtcccttaaaaatatggcagatcttgtcactcttttttttaaacccaccaatggatttcttaaaagttaaagcctctatgtttgtctagtagactctataaaatctgtactctctccccttctgtttacctctctgatctcatctccttatacttctctctcattcatgctgttctaggcacagtagcccctttgcttatctgagtacacatttggcatgttccctgcctcagggccattgctcatgctgttaccttttctggactgtggttcctccagatgttcacatggctcattcccttacctctcaggtattttcccaaatgtcaccttctcaatgagactttctttgaccacttctacctgacactcccaaattgttcttctccactttgttccttgtgttactaccttgtaatatactatatgtcttattaatttgttgtttgttttctgccttccccagtaaaatttttgtccgttttctttattgttgctttcctaacacctataacagtgtttgacattctccaaaataaaattggaggctgaataagtgaaccaatgaaagatgaactctaaaaggcttaaaacatttataatacatcctttgatactgagcattaagttgcctaaaccacttctccttttgttaacaaaaaagaagatagaagaattattacttgggcagtctactgtgtctaagttcatacttgtgaaaaacttattttttcccctgccttttcctctcatttctctctgacaagagcccatgagaaaggtaggataacaggtattttgcacaaagaagttgtgactcagagaagtaattgatgtttccccaagagcactaacagagctgataggacctagattgcctgacagcaactgtagtcctctttccataatggtaacagtcaatatgaagtatgatattttgtagaatactgtataatccttcatgtgagcttagagacgaaacctaccttcagaaaagtgattatgaattgacgttagtggggttttttaacctgtcatttgaatgaaaaagaaacttgctgcatatttaagattctgggttttttctatatcttgaatcaaccaactttcataataattgataagtttgttattgatatcttatttactgccagtatattcttttaatagagcagaatagagaatatgttgctttgctatcagatttctccacattttgcccacatcattcccatcttttcccaaccagaagttatctcctccagc

SEQ ID NO: 115576 - DNA, 1059 bp, Homo sapiens
cctgctaacatgctgccaacaatctctgttgctaatctcaaatcctgccaatacattctgtgtgtggcttttctgaaacacaaacacgatcatgtgtcaatccccttcataaagttctttaatggcatctcatttcctgtagcgtaaagtcctttgcgtggtatgcaaggccctatatgggctataatttgcctgccacactaagctcatctttcactatggatcccatgttccatgaagactagatttttctacatacaaatttatttcacaccttggcttttactgtcatggctcccttttcctggaatgccttttctatctaatgaatattacctcaatattcaagtagttgtttaagatcatttctctaagattcctgtcctgatactctttcatcattggaccagtgtttctcaaacttttctgcacattagaatcacctaaaaattccaaagcccaggggctgaaacccaggcatcggtactttttgaagctccccaggtaattcttagctgaattgaaatgtgaccagtttaaactgagttgtgctataaatgaataccagatcttgaagacaataccaaaaaatataaactagtttagtaataactttatattgattacatagtgaaataatatctttatatgttgaattaaattttaaacttataattaatttcatttgttttcttttaggtttttaatgtaactactagaaatttaaaattctacttatgccttacattatatttgtgttggatattgctggtccagaacaaatcacaatgatactaaactattatataaattgtaactaatagtaatatatggtatctgtctaatgtacacatataagtgttttttttccaatccttttctgcctcattgaaaaactaaacttaacataaattttattatactagaattttatcatgaagtattaattcattaagttgttaattcaggaaacatttgatgcttgttatacgtaaaatactctacaaggaaggcaaggaaaataaaaaccaaaataactatgtaaaattgaaaagttac

SEQ ID NO: 115577 - DNA, 1095 bp, Homo sapiens
caactagacattagtagcattaacattttttatatccatcaagtctattttgttaatcaaatgatgtttactgttattaccacatcacctttatttagttagcaaaaattttcttgaaatagtaaatccagagacatttaaaatcatttataagcaggcttattaacagttgctgtcacagaatagccactcagtacacttctttttttttaagagattgtctcgctatgttgttcaggctggctttgaactcctaggcccaagtgatcctcccacctcagcctcctgagtagctgtgactacacgcctgcaccactacacccagctcaatacactgttttttttttttaaatgaatgaatttgcagctacttagagctgatagctccttgactctggtcctgagacaacagagggtataagtataagctcttttaatctatacagtgaaagctgtggatagataacattggttcattaggtaggtagccaatgaagagactcaagtggattgaagattaagtttctgactagctcctagggaaaggataagggacatactttataacatgcaggaacaaatgtgcagtacttaacttgcagtcttacaaactaagagttggaatacaagttttagcccaggctctgctgataactcacatgagacactagctaagtaatgtcacttacctggtccttagttgcttcatctatcaacaggaagttagattagaagatcctcaagctacttcctagctcttgtgctctagtaaactgatggttatagtgatgttggacatttccttcccaagccctttcatatatatatatatatctcctatttttatctcatacataactaatatatttttttaattttattttaacgccatagcataggtaatctttaagtccccaagatgcttgtattatatccgtgaatccacattttgatacttacattgtaagtgatatttttcatgtatgttaagttcattttaccctttaatttctggaatgaaaagcctgtatcatatgttttacatttctttcaaagcatctcttagcataagaggcacacagaagacactgtgta

SEQ ID NO: 115578 - DNA, 1642 bp, Homo sapiens
taaaaaacaactcctgaatcacttgaacccgggaagtggaggttgcagtgagccaagatcgcgccattgcactccagcctgggcaacaaaagcaaaactctgtctcaaaaaataaataaataaaaaacataacttctcaacaactttagaagctgtcgctctctttagagcattctttatttaaagcagtatgggagcatttacagctgtataatgatagggaacaccctgtgatttacccattctgccctgaagcaccaagtttttgagttcttaacttctattacaaaatccaacacagttggctgtgttgaagtcaaaaaggtctcacccataatcagaggacaaaaagtcaagtttttatacactttccccctttggaaaccaaaagctgcagtaaggataagattacagtccaagactttgtcagatgacagttgagttagcaattgaggcatagacaacattctagagtttggtttcattctcagtccatctgctgaaaattgtttaactggagcttcattaagaatggaatataataaacaggggtagatggaaatagtattgaaatatgtttgaagccttgtgaaacaagagttaccttacttatttgatctgggatcatttaaatcataatgaaaagccataaaattttacccaactatttccttagcatttttcaaagcaaaactggttttgcaatcgattttttacttcagttagagaatattaagtcttttctttgtcattttaaatgtagatcctatcaccaaacagatattttcaaacagatcctacaatttacgggtgaattttattcattctttagatgcttgccatcactaccactaattgccttatacaaaacatttatgaagctggttatgactatacattaagaagaatgactaatgctacaatattaagatattatcagggcaaatacattcaggaggatttgaactacgtgcctgtgttttcattatcatggctagaaaatataaaaagagtgtttggtttcataaatactaatgaaataaattgatacatacattaaagttgtcttaattagcttttcaatataggttaaaatgtgagaaatgcaggaggaagtaaaataaaaatgctaacatgtctaagagcatctcaactggaaaatccttataaccacttttagaatgtgtatagcttcataatctagcaaaaaaaaaaatagtttcccttttccctccatcaatgtaagaaattcccttatatgaaagaaatgtatttgtatggagagggaaagagaaagaaaaacaagcttgacttgtgcaagagtctgtgatatcctttgaaagcttatcacttaaaacaaagaaaaacatatagagttagcacataattgtacagtcagtgtgagtgtatattttgatactttcataatttaatctgaatgagatagtaataatagtttgttaggtgtttgccacatgtcagacagtattttatttaatcctcacaacagcaagtgaggtagatattatcatccccagtttatagctgaagaaactgaggcacaaaaagatgacatagtgtatccctatctcactcatatagtaaattgtggaaccaggattcagatcagtctcacccaaag

SEQ ID NO: 115579 - DNA, 1076 bp, Homo sapiens
cttgctaaaagggaccgtgttcaagaagatgcgtgtgaaacattaaaataagcaatgctgaatctgttttgaaagttgtaagcttaacttacctatgacatgagatagcagaattcatctatatcttttccatttattgcaaaattcttaccacacataaaggttttcaatcttttttagctgaaaatgtaagcaaagaacttgtcctttctcttttgcatttttttaaccataaaaacattaaacagttctactgatacccatcacaattttccttagaattttacaaacttctgccctaggaaatggcagaaaataattattgactccctaaatgcaatggaacaggagattccaggtgcatggcaaatgctaactataactgaggctggcgaggggaagagggcaaattaccctacaccttcttattttccccttcttcaattacattattacttcatttatttgactatttattgaatcacttgccaagcactgtcctaagtgtatctttgaaagatacacttaagaaaatgaaatgaggacatgaaatgaaataagaaaaaaaaatgaggacaaatatgatttgtcctcaaggagttaatgtctagtgagtttaaagaagagtaaacaggaaatcgccataaagtgtgataagtgctaaagggtgctttggaagctcaaaggagagacatctaaaccagacttcaagaacggaatcagaaaaggctcactgaagtgccaaccaagctgagacctaaaggaggagccggaattaagcaaggagaattaacaagaacggagagatgaagtatttgcagtatccctgaaggaagaaaagcatgtgcaaaggcggatggttggtcaagagagcagggtttaagaatactagttatcagccaagtgaaagcacatgaaggtggatacggcaaaggagttgtctcttgagagacgtaactggaaagcaaagcattaactgcctcatgtagggatcctaagtcatcttaaagtgcttgctctttatcccaggacaatgcaaatctaactactgtaggataagaagaagagaggtattc

SEQ ID NO: 115580 - DNA, 1009 bp, Homo sapiens
gccaaacatgtattttcaaaagttgggtcttctgtcttctatgtaagcaaacttttgtttcccaaatcagaaaatagtcacctatctctgaggggaaatgtcagtgcaaatccaaacagaatgatgtcaaggtttattaatgtcattattgcagcctaaaggtagttttgttctttttgttcaaaatcaaacattttgttttacatccaagtaggatatttccttttctaccaaacttaagcatctcttttaaaattatatttatctttatcagaaaacttagcagtctaattgttatttcagacccttgcactgctgaaccagtttaaatctaaactcactcaagcaattgctgaaacgcctgaaaatgacattcctgaaacagaagtagaagatgatgaaggatggtaagggctttgatttctgtatattaaccatgaacaaatagtctcagagcagagacactactggggcatttccactatatcatccttttgttttcagagtttaccatcaccattataggacctcggcaacttttgactttatttcagttcaatataaagtaaaataaataaacacaccaagcactgaagaaacaagcatttattgagcacttgatgtgtccggcattgtgctagtcagtaaaaaatgcacaagaaatatatgacactatcccagttctaagtaactttctaatattgtggaaaagatgagactcacattaaacaactcgaaaacaaccttagaagataataaatcaataatttctcacattttcccacaaaccttttagaactcagtaatctatttcataatccgactaacttcctcttcaaagttatgatctacaggatcctagcaactcatacatagttaattttatttttatctttggatatttttcagctttttaagagactgataaataaagtaatgacatatacatatcctttgcttagaactttatcctatactggcaaaaaaaaaaaggaataaaaattgtgtt

SEQ ID NO: 115581 - DNA, 1450 bp, Homo sapiens
gattgcttctaagacatttttatgtgtccacatgagtggccacacattgagggatcattttcattttctgtcaagatagaaaccattaccaatttgttatgttttcttttacttggcaaattattctattcgcatttttggctgagctgctgtattggcatggtatacaacagacatttgggtaccattcagcagcattatactttttatgtaaaaaaaaaaaaaaaaaaaagagagagggagagaaagaaaagaaatatgattcaattgtaaacagtgcgtatggtgtttgaaaattattcccagatttcactaacaaggcatttaaagaagtgttattagtagatctaaactgaaatgcatgatagaaatttttcactcagaattactaggattcctcctttgttcagatatacactgccaatatttagtgatagtgatggtaccagattccagtttagcaggtagagtggtctctttgtcactatattccttagtcccacagtatacagactcatatagctgtagacccttctttgagcatggattttatgaaaccgattagacacatggcaggaggaatttgcccagggattcatatgaccatatggatgaagtccatatgccaaattgggtttggttagatgaagcttggtgagctcccaaaaaagttacaagaaagatagccacctgctccttacacaacaaaattggcatttctaaggagaggagaaagattaaatctatgtgaataggcttcgatcttatgcacattaactcttcactactatgtttcattgaaaatttctttccagattgttaattctaagattaacttgaaacattacagcacatatacaagataaaataataaacagtataatggtctgtctgccttcttcctctttctcttcttctttctctcccctccgtcactttcttccatagtacatacggtatttagtattataaaaatttgaaaaaataccaacaattgcatggttgcctcaagtaaatattttactgattattatataactaaaagatgttcattgtggccaggcatgctggcttatgcctgtaatctcagcactttgggaggccaaggcaggtggatcacttgaggtcaagagtttgagaccagcctggccaacatggcgaaaccccatctctactaaaagtacaaaaatttgccgagcatggtggcgggtgcctgtggtcccagctactcaggaggctgaggcacgagaatcgcttgaacctgaaaggtggaggttgcagtgagccgagctcatgccactgcactccaacctggttgacagagcaaaactccgtctcaaaaaaaaacaaaaaaatgttcactgtggaaaaatcagaatgcagacacactcaaaaaaggtaaatgagaattacctatgatcccaaactcaaagataaatactgttaattt

SEQ ID NO: 115582 - DNA, 1110 bp, Homo sapiens
agcctcccaaagtgctgggattacaggcatgagctaccacacctggcctttagttgttttcattcttatatttgtgcctagcctcttcaattcacaaaataatgtcctactgattctaagtgcttcacatgcacttgactctatggggtaggtattatttattatctttatttacacatgaaagaactgaggcacagtgaagttaaataatttatctgctttttggtcctcatagtaccgtatccagtgcctggttcataatgggctttcaaaaaatatttgttgatgttatgtgcatcaagatctgtcccatggaaaacaatggttggctatgtaccatactgttaccactggttagctggagatgcaggtgggaggataacaggtacaaatgggcatggaaagaaggtataattaacttctttaaatgtctttcaatcatttcacttgttacaatgagcaatccagtagtaatttttaatctgtcccgtacttgcttgccttctgtattttcttttggatgaaatgtctgttcaagtcttttgcctatttgggaattggatttgttttcttactgttgagtttcaagagttctctgtataatctacatccaagtcttttttgggatatgttatttgcaagttttttatcagatatgtgatttttctccaataatatttttcacggagtaaaaatatttaatattgattaagtccagttgattgatttatttccttttacaggttatgcttttagtgttatgtctaagaattctttgcccaacctaaagtcacacagattttttcctaagttttcttttaaacattttatagttttacattttacaattagatctattatccattttgaataaatttttgtataaggtatgaagtttaggttaaggttcattttcttcatatggatgtccaattattccagtaccatttgttaaaaagactttgaactgactttgcaattttgtcaaacacagttggctatattaatatgggtcttttcttggactctctattctgttgcatcaatctgtgtctttatcctttcaccattaccacattttcttgattacaacagatttatggtaaattt

SEQ ID NO: 115583 - DNA, 1052 bp, Homo sapiens
cacctctttttcttcctttttcttcaggatgaagacagctcttctgtcttaaccctgcgctttcatatggtttgccctgaaataagtttctgtcatgttggggaagtttgctttgtttgtggatctgttttgagagagatagggagacagccatgtaccccagctgcttaccaggcctttttgatagggaatctcatcttccctatggaagacagttgttctgttagtctactggctgtaggttaaatgttattggctgagcagttgctgaaaccccagggcaggtgtaagaatgcatattacagatttgttctggaaaggctcttaaatctttccacctgtgtcctgctgagtgttaagcacaatgttagataggcaagaaagctgagaaactgtgcattcccctgttgctaaagatattttgaaacctacgtctttcatatttactccaacaatactaaatatttacagaagacactatgaggatttcttttttaactaagggatacaaaagacgtgttttagagttagcctttcaaaactccaaactgagggggcaatataacattcctttaaagttcagaaacaggagatttttccatgatagtggtgaacagtgaaagaaaagccactggttttcatcttcgttttcttttttcaaaagtcagtttccattttcctttttgcttgattttcctaatgctctatttttctattcttatttttttgttcaagtattttaaaattttttgttcttatttttctcttactgttgatttttaatttctcttttgagttttttgtttttttaccatttgtatctgcatttttctctgcttcctttaactatttctgtttcctattctgaatcttctttcatcttttgcttttctccattgatctctttctctcctttggccttttctattactcaaagtcatccctgctctgctaaacatgaagagttccagtggccttattttccagaactttttttttttacatagtttgatctctgagctcattcacattttgtctgtctgtgtctcttc

SEQ ID NO: 115584 - DNA, 2252 bp, Homo sapiens
gagactttctgcagaatctggtagatgttttagggagtttatcatcaaaatataagacagtctctacccacaaaaggaagttgactcttagcttagcaagccttctagtaccagccaacaggcctgaccagtacaaagggtctgaaggccttattcccaacacaaatcaccatgtttggcaccgggaatgcaacagtgaacaagactcaaactgtctcaaacaactgagtctgttcacaatcaagtaaacaggcaattacaaaatggggagaattgatgaaagaaatgaaataaggttggtgagataggaagcaccagttgttggaggacttttaagggtagactgaggtatttatttcagtctaatatgataaccagtagtttctgatcaaaagaatgctataaaagaaatgtggaagaaatattattttttaagctttggatctgggaaggaaatagtacagatgtacaacaattaggacacctgcaacaatcgtagggttgggtgataagttcctaagttagggtggcttggatgtgggaagaagaggtttgtagacttcccaatgaaaaagatagctgtttatattatataagtaatttaaattcatttaaatcggaaatgaattgctaatgttggaattctatattagactacttattgtgtgtctgagaatcagttcctctcttgatatttcccattgatacaaatagctattgtatcttagtctatttcacaattgtgggagaactttaaaaactggataagaagttagtgaagtcagtcaaggtctagtcctttttgaaaaatcagttgtttacttctgtttgtaattttacacagccccataccaaaaaaacaccaaaaacaataacaaaaaaaccactttcctgtcaaacacaacctctctgaaaatagtaaacttccatattttaacatactatatatataatatatactatatactacaatatataatagattacatattatatatgatatatataatatataccatagagatcagttatatatagtgtatatactgtatatatactatatatactatataccatatgtataatatatagctatatattatatataaccatagattttatatatacactatatataatattgtaacacactataaagtcaatgttatttgagaatctgagcctatgtgaaattttttattaatcaaacctaaatttttgtctttgccttcaagtgaacaagctctacaattttcatatgtaaatgatcagtgtgtaattaattccaaaaaaattcactactttttttgggccaattccataaagagccgcagagtggatagtattgagttattgggacatacatgattgtaaactatcagaccccctgtactcaaattgagtccgtattctaaatcttattgtgtatcctcataggagactgtaaagtgcgggcatgctttcaattcgtacagtctgtgatttatagaggcaagtaggtcaggaatttattatgctgaaaatcataataactgttttgttttgcttttcacaatgaagtgaccaaagcatgttgaaagataaatggatgaagcattttgattatgcttgtatttctattaaaggttaaatattattgccaagtaactagccatgctaagtattatgatattaaagctgaagtagtttgtaagctgatagccctttctttcctctgggtttaggtttgttattaatcaaaatgttggacttgcttagtgcagtggtgtatgaaacaaacagttgaaaaagacagctcctttaactcacggctctctgctttttttcaaatttgtaaggaaatctgtttcttcttgtggactttatgctgttattcatgtgtctagagttcattttttataccagagccgactaaatccaatagttgcaagattctctcatggcatagaaaggaaaaaggtgcctttttatattcttaattgacaaattctgatcaagtcatttttgaaacatggagaatccctactagaaatggatattacagaaaaccatctgtatttctgggcagagaaaaggataattttttaaatagaagaatatgtatatgaagaggtattaataagacagtaagtttgttttctcatatcaatccaggagtattgatgaaagtgttttaaagggcgtatgattccagctacactggtgttggcttagacatcaacacagccagcccgtaagcacttggaacgctg

SEQ ID NO: 115585 - DNA, 1258 bp, Homo sapiens
atcagatagggctggcttattgtcttgagttttgctctgcaacctgactcactctggctaaaggaatgtgttctttaaaggaagcagacagtgtcctctgagtttactttgaggaacacttctgtatagaactcttttaacctcccaacaggggagaaacctcaagtgaagactgaggcaaagagactctctactagaaatacaaaccagcagaacaaactccagacatgtttttcaaatttaagggttttctgagaagttggtttccatgtggtgtaagcaccagtaaacaacaaacccatcttggtgttctgtatgcttatgtttcattatgtcgatgatagtagagtatagaatttctactgtaagttcccatgcaagaaatcactgaaccatctctctccctatttaggatgtcacatgtacttcagtttgaggataaaagcagaaaagtgaaagatgcaagcatgcaagactcagatacatttgaaatctatgatcctcggaatccagtgaataaaagaaggagggaagaaagcaaaaagctgatgagagagaaaaaagaaagaagataaaatgagaataatgataaccagaacttgctggaaatgtgcctacaatggccttgtaacagccattgttcccaacagcatcacttaggggtgtgaaaagaagtatttttgaacctgttgtctggttttgaaaaacaattatcttgttttgcaaattgtggaatgatgtaagcaaatgcttttggttactggtacatgtgttttttcctagctgaccttttatattgctaaatctgaaataaaataactttccttccacattacatgttaaccattgcagactgcaagcctgtttgtgtccttttaccctaaaatatatgaaggcttccttttcaagatttttttataagaagttcctacagaaagaatatttgtgggaaacctccctttcactaacttcagaatataataaaatattataaataaaatatagaatataaatatggatggggttttttgcatataaatatttcaaaatatccaagccagcacaactcaatatcctcatgccttcagtcttgaggaacccccaagtgaacattcacacctccatgcaggccagtgcctgggttttatgggcacagtcaagatactttaacactctaagtaacatcagccaggctcactgcatgcccagcctgacatctggccccctgcccactcctctgcccttctcagcacagcga

SEQ ID NO: 115586 - DNA, 1051 bp, Homo sapiens
cttttgatattggcaatatctagtgaagttaaaaatgtgtatatccaataacccaaaaattctaattctaggtcctaggaatcctaaagaaattctcacatattgctcaaggaaaggagtactaagttataaactaaagcatcaatcaaagaatggataaataagttgttgaatagtcatactatggaatactttacagaggtgaaaatcagtaaaccagagctatatgtagtagcagatctttaaaataatgtggaaaaaaaggaaaccgcctatataaaaattaagacacaattcattatgatatattgtttatgaatgtacacatatgtagaaaagtttaaaaacacatgtggaaatagtgtttgcctctgagaaggaattcacagggagctcacttgtgtttgtaatgttttattttttaagtgctggatggtagatactcagttctcattttctgtacattttggaatatctgaaatatttcacaatttttttatgattatatctggaacctgaggtgagaagacagaagaacccccagtactaacaagaaccctttctatttgcttcaggaagaaggagagagcttcaaagaggaggagagggctatgattgaggtgttctgagaaaatgtcaacccactcaaatgcagagtggtcagactcaaagccaccccaaaataagccagtgcttggaagtgtgtcccatcttcccctcaccataaaggttataatattggttttatttcagataaaacagaatttcatcttccaaactcacaaagtctctgttggttattctgaaacatattaccactaaatctgtctgtgttgaagtaccctgtggtttctctaccattcctcctggattgtgtccaccttaaccagtgcagtgttatcctggaacagaggaaaccacagacctccagggcacacattagagaatactatttgcaggtttaaaaagataactgaatgacaaaattaaaaccagtttggttgaatgtttctcatcctgttttaaccacaaggagcagaaagatctgaaa

SEQ ID NO: 115587 - DNA, 1066 bp, Homo sapiens
ttatacatgatattatgtgaggactagatccatttcagagtgaaattccataatgtccatcaaacctaccatgtccaaaatgtaactgtcatctacacttcccagccctgcctccaccaaacctgcttcctctgtaattttcccatctccattatgggcaacgtgataattgcattgcccataatgcaatttccagttactcaggccaaatagcttggattccagtctttatctcacacattcagtctgttatgatattctgttgactccaccttcaaaatatttccagaattttaccattatttgctacttcccactgctaccaccctagtcaaagggaccatcaactgtcatgtggactgctataataaactttcaccctttttttcctataatttattattaacatagaagccagttacactttataaaacaagtcatgttgttatacttatctgttcaaaacccttcaatgattccccatttaattcacagtaaaagcctaggtccttacaaaggcctaaggctctttgcagttaccacctcttcctctcagtctctctgactttctctcttactaccttctccatcacttattctgcaccagccacactatccttcctgctgttcatcaagtaagctaggtgtgttccatctcagggcctctgcaatggctgttccctccacccagaatactgcccctaggatgtccacatggccaactccctcagttccttcaagtctttactcaaatggcaccttctcaatgaggcctacaataatcactctactttaaaattccagccacccctcccacacgctcagtctctcaatctccctgtttagttgtattcaatagggctattaactcccacgtactttgccttatttgcttaattcttacaaacaaccccatgaagtagggactcttgctatcaattgtatagatgaggaaactgagccttaaagaggttaatttattctttatcatccctctcctgccctagaatgacctccatgaaggaaaggatttctgtcagttttgttcactgttgttccagtgccc

SEQ ID NO: 115588 - DNA, 1051 bp, Homo sapiens
ataaaaagacaaaacatagcgatttcagttgaaaagtattatacatgtagaaactaagtgaatgccagaatgaagcaagagatgggtttagtgggattaatctagaactgctttgtggcagacagaattctgaacataatttgaaagaaagggaaaacatggcattgaggagacaggtcatgttccaggtggggagaaggttgtgcagacaagttattaagacaaatgtcggagacagcaatgtgtctacatgatgccaaaacatctggtcaattcagtttaaaaaaaaaaaaaaactttcatcaatgcagtgaatttcttcagtcaatccagatgtttggcatcttgtagacaaaacatccagatgattaactgaagatttgacagaattgactggattaaccagatgttatagcattgtatagacatagtgtcaggccgtttgcttggctgaagcagagtccagctgtagaggagatagaaggcccaagcagagaggcgggatttggaggagaggacctggagattggatttgatgaaattggtagctgctggaagaggagggtgatggaaatgatgcttaaggaagataattctgtgtaaagagggggaaaaaatgctgaaaggaaaagttgtagacaggaaaaaggatattagaagagtgcaggtgtgtgtgtgaggtaattaaagcctggaccagacccaggcctgggaaggcaacaggaagaagcagatctgaaaaacattacagaaaaagaacaggaagtcatgatgggctagacaagggagtgaaactgcacatcaccccaaggctggaaactctgaggcctgggaaagcagccgctgtcagcctcatcacagtaatgaaccaaaggacccctccccacagcctcacatccaagggctacagccaggcctacagccagagggaactcagagaccacaacacaaccctcatattcaggttccttaattattttaatgctacctaaattgaattccctttaagcccagtttcatgaagtgatcaagaatgctagattaggattat

SEQ ID NO: 115589 - DNA, 1012 bp, Homo sapiens
gttgatcttgtagtcacaaattccactttattaggatttaaactgtaatagttacatgatagagtatactccatcttattttttaaaattctcaatatccatacacttgacggttttgcaattttgcagtttcaaatatttttagccccaggcctatcagcccacacagccagttgtgtgccctttataaatacacccagattttctcaaactactcctttgtttatttcaacagagaaagaaccttcaatagagactaatctctctttgttcatggattggtactgcactgagaatctatctccatcctgctcccgacaacacagaatgtgaaatcgtaaatgtattaatgtgcttcagaatcaccctgcaggaagtggaggggcaggaatcttgtcaaaatgagtttcccaggcctcagaaatgacaagtccgttgatctgggtaggggtccaggaatctgttgcgtttgtttctttttgaataagcttactcaactaattctgatgcctattttctgaaaatcagaaatcagacttagacactgccctagagcagaaaactgaaagaatgaaaaacatcaaatggacatgagaatcttaaatggcaaaataggcttttttttttaatcaaagactcatattctcttaggtatttctttatataatgagcccctatgtaaatttaccatattctttgatatgcaaaatttttcacagaaactgcataacatcaaatacacctatacaatcagagaagccaagaagacaagtaggacagcttgtctgttcccaattcccagaacttcctactacaccccttcctgaacataatgtttacatgatgggaaaatgcaattaatgatcttggtaagtctttctagtgctccaagtttaagtcagtcacttatttataagacagaaaataaaaaaatttcacatcactgaaacaatgagtgatttctccaggtatttaaatatagccttccaatagcaattattttatagtaaag

SEQ ID NO: 115590 - DNA, 1043 bp, Homo sapiens
tgttgagcttactgagatgataccatgcaaaagatagactggctcggtaaccaggcagacccttttgcagtttgttgacaattacgatgagttccagatgtcccttctttgatatggtagaagggcatttatttatatgagagcaaatgtgtgtgtgtgtttgcgggcgcttttaagtgtgtggatagatgagtgtgcttgcacataatgtgctatttctgtgagttttaaagtaggcaagggataataaccaaagaagaaaatttcatgaagactagacatcataaagcataattttaatagtcactcaaccaagtattttttattttttatggatactctgaatggcaattaaatgtgaaacccagtttcttgggcaagtcaaattctggaatcacatccacctaaattaaaatgactagctcgtattttccccatcttcaagtttcacatcctggtcatcaaaagactcgacagcaagacttagaatgaaaaagggtacttgtttatattaatattttttacttgaacacgtgtagcttgcagcaggttcttgatgaatgtgctttgtgtccaaaatgcctccccattgtacacaggtgtacaccatgcatgcaccaacacctaaaactcaaaactaaatggctattttgtaaggttaatactttcagttaaacagcatgtttgacttgattccatcatggtgctcttaaattacatgtcagtgcatcacatatatcatgatctaatgcagatgactaggctttttccaaaaggaagacagaccctcagacaccaaaagccaatctaaacaactcccaggtttgctgtggacaatcagcatggaatgttttctgcactctcagtcatgaccatctgtatcttgttacctgctttctctctcaacaccacagttctcaaccctgagccttccagagagagctattgatgatacaagaggaatcaccagggcccggatctaagatgcccttagaagaccagcccaagtgccgtcttagccattcagtgaagggcaaacagcc

SEQ ID NO: 115591 - DNA, 1055 bp, Homo sapiens
tcatccttctaattttgtcaaagaacattaaaaactttatcatagagcaataccaatccatgccatttgggctacatgtctgactataacctacattttcctctgaagtgcccatgaattctaagtgattattatttttttataaaaccaacataatgcctggtgcatagcagattcttgataaatattctagaatgagttgggaaaaagctattacttttgtattgccaggcattcctcctaactgattggaagttgaccccataacattagagattccaattcaaatttacagtgtcatataacagaaatgtcctttagtggggactgtggataacttctctctccttccttaaactcaagagcaagcacaaagacccaaatttcccttacagagccttcccaaaacaaaatttaggattatcaaggggattctaacacacaggtgctgatttattaattcacagaggttatgaaactaatcttaataaatcttaacttctatcaggattcatgagtatgtgaaagagagctagagctaagctggtggatagtaaaaagaaaaaaagaaaatcattctttctcactatacttcagcacctcctatattttatttagggaaatctgcctactatgatggttgccatgcaaattccccaagaggcaaacaatttcagcatccatttaactttattagagcctggaacctatgttaggctgcttattcagcaactaatatgcatgtgcaaatgaaactgacatacctatgcaaatatatcatccatgttctaggatttagcagtttagagaaagaagtgtatttctgaaagtgtggaattgatctcaagttcatttaggaagtctacttcttgtttacttggtatgaaatgaaattttctttttatctttcaagagagtatcctttaaaagaaaaaaaagtcttgggaaacattccgaaattggataccagtatctttcttattcaagttgagattcaaattgcaagatctatctgaaaactcttcagagccttctccatgactagttctacattt

SEQ ID NO: 115592 - DNA, 1158 bp, Homo sapiens
ttttttaaaatccagtgctattttgatcagggattgaggttacatttatgttttatagttggctagaaaaggctcataacattttattttagcttctcttctcaagaaaaagaatcttgaaagatgaattgtttaggaactgcagcccagccaacaaaacgcatacctttctctacttagtagctgtataggccaaagatgatggtggattttaacaatgagctttctatgatttatagagattcacaattcactatgttcaactgaaaactattccatggccaatagaatacaaagtctctcgtgtcattctaaaacactagatgctattgatcaatcaggagatggtgtttaccaactcccaatattttttttcagatttcttaaactcggtgattcaataagtggttcatgaatcgcccagaagccgtcctgattaaataataaagaacccatttccgttaaaatggacgtgttatgccagcttctgatgttttccggcgacggctttgcaggtagtgtctttcctatctgcctgcgggactgatttatttatttatttagactatagagaaaggtgaacctggtattatggctcacactcattgatgactatggaccaatttaccaggcagtggaagacagccagaagtaatttaagccagtttttcatacattttccaccacttagcaataatacagaataatttcataaaggtttcaaaaattatgggggctctgtgaatcaactcttgctctgttaaaattaaagtctgttaacttttttgaactgtcaaagatccatagcaaaatttcctacagttccaaattaaatacagagtagacattttcacagaaagaatggaagctgaacgtattaagagaagcaatgttacagtcggagttgacctaggaagaaaggtgattgtagatctacaagagaactgatataagatgagcaagatgaccaaagcacttacatttcctctctagcaatgaccttcaaaggtcaacatcagactattatataaaaaacaatctttatagatgggacctttttaaaaaaatgtagaatctaagagcttggcaaaacaggtttctcctccttctgtttatctgatacatttgggtaaccttactctaaccataataactttg

SEQ ID NO: 115593 - DNA, 1046 bp, Homo sapiens
cattattgtgtatggtatggggagagtctaggtcctagattctgctaggcaccacccttattaaatacattcctacctaagttcagtatcttgaattcactttttaaagtagattgcatataaagttcaaaagtagaattaaattccaaactctgttttagaaaacacatgagcaaattgtaataattatcctattgggtaaatactaaatctaaaaatgtttgccagatgtgggtatagaaggttctgactgagtacatcccttaaattctgtcttttctttactataacaagtgattcatagtcaagctcagttatgtataagaacagttctctaatggaaaatcattctaaattaagaatgtccttttattcccttggttttttttcttttctttctttttttgctccaatgggaaagcttaactttgagatttttacagtggcacagtttagactatcattgtctcatcattttaaaaagttgcttcttaaagaaaaaattaatcatattaaacagcatgaggaaactgttctttaatctggtaattttatgtgtgttatctctttgaagaactgactgatcatctatttattttttcctttggaggcagactttaaaagtacatgttctatgtactagtgattgtttaacaaaatgcttgacagagtttaaagtactatgattatctaacaaaaacaatgatgttgatatattagcaacatgattatcttcagtttaaaaattaagattgcttagacagaaaaatttaacgaggcattttaagattttccttcgctatacagatcttctgtttggtttgaaaacatctgttatgattttaaaaagaatctccagactaaatgcaaattaaatttacactcagtaggctatgtttgctctttccattcttacaaatctcccaacagaaccaataagaattgtgtacctaaatcaagagtaagctattattttgtggtacaaaatgcattatgttattttcacagtgttaggggggatcatataatataggaggaaatgacac

SEQ ID NO: 115594 - DNA, 1048 bp, Homo sapiens
agtgttgtgttaaaaaaatttcctgtggatttgagatgcttggcattcattaaatcaaaccttaaaggactttgaaatagcacctactttgtttaacatttaaaaaattacaaggctcctgagactagtccttgggatagtctttagtgattatccagagtataataaaaatgcaagattttcagaagagggtatttaaaaagcaaaatagtgtaacacttaggagcataatgtttaatatacacctgaatcttggttccttagagagtggcacacacagactctgtgtcacatggtcagtgattagagtataatgtatcatgtgtgttccatacacatacttagatcttggctcccaaatcagggtagcaggtctagtcttctacttgcttgaattaaatactttttcccctagttccttaatcctgagcaatttttgtaacttttctgagactcagtttttttctctatgacgctctgctacttcataggattatttataagatcatatgaaatcaggtacgtgaaagcactttggaaattatcaagtgttaaacttactatatataatattattactagattagagtagataagacagaagctaagactctgtaagtttggagggtcaaatactggaaacatagctctacttaatgctgctgctaactctttttagtagacctaagttagatttaccacacatgcatcatggattttttcctttggattttatattagatccatatcattgaagagaatttgaagaaaactgagagccctgtggaaacttgaatgagaattaagtgaacattcagcatgacttccataccttaattccctacttgagcaatcctcctcaacccaatccatgttattattcattattcactatctggaatgctgacatgtccagctttttattgcttcgtgataagttgccccaaaacttggtggcttaacacaacagcaatcatttttattattgctcgtggtttctctgggtcaggagtttgggaagtgctcagctgggcagttctggctaggt

SEQ ID NO: 115595 - DNA, 1011 bp, Homo sapiens
cttatttattgctgaatttaaattgctgaaattttatgagatttttgcttctgtgttcatgaggaatattggtctgtggttttcttttttgtgatgtctttgttaggctttgatataaggttaataccagcctcagaacaaattaggaagtattctctcctcttcaaaagagtttgtatagaatagtaattttttattcctgaagtatttgtttgaagtcacagaagaaaccatctgggcctaaaattttctcataaactgaataaaaatttagagatgaaaaaaattttcatctgtgaaaatttgtaattacaaattctatttctctggagccagtcatatttcttatttgtctaaatgagctttggtagtttatgtctctcaaagaatttattcatctgatttgtcaaatttagtgacaagattgtcgataacatttctccattatcattttaatgtttgtagtgatgtcacctctctcattcctgatattggtgatttatgtccttctctccaccccataattaatctaattttattgaccttctcaaaaaaccaattttcattgcttttcccttatttttatttttttattttgtactgatttaacttctttgttgttattattatttcctcaacttactgtgggttttatttgctctttttcatatttcttatgatagaagctgaggttattaatttgagagctttcttttcttttaaaataggcttttaggccgggcgcagtggctcacgcctgtaatcccagcactttgggaggctgaggcgggcagatcacgaggtcaggagatcgagaccatcctggccaacatggtgaaaccccatctctactaaaaatacaaaaattagttgggtatggtggcatgcacctgtagtcccagctactcgggaggctgaagcaggagaatcacttgaacccgggaggcagaggttgcagtgagccgagatagtgccactgcactccagcctaacgacagagcgagattccgt

SEQ ID NO: 115596 - DNA, 1045 bp, Homo sapiens
aaaaataaataaaatgaaaactgcacacatttcgtaaaaagttgtgtattgtcaaggcaggtggatcacttgaggtcaggagttcaagactggcttggccaacatgatgaaatcccatctctactaaaaacacaaaaattagccaggcatgttggtggatgcctgtaatcccagctactcaggaggctgaagcacgagaattgtttgaaccagggaggtggaggttgcagtgagccaaatagcgccattgcactgcagcctgggtgacaagagggaaactctgccttggaggggagaaaaagttgtatattatataaatggagatggaaagaagtatcttagaaaaccgcaaaattaaattcttgatttttgagaattaactaaatatatgtgtaactttgttttgttttgtttttgtagcaattcccttgactgaagacgttctcataacattaggaaaagaagaggtaagccactcaatgaatttgtagtgaccccaaataatttctaactagatctattttagataagttcatggcataagaaataggataaaaccactctaaaaccatattaaattttctgcttttatttatgttttattgaacataatatttgattttttttttttggaaacggagtctcgctctgttgcccagtctggaatgcagtggcacaatcctggctcactgtaacctctgcctcccagggtcaggtgagtctcctgcctcagcctcccgagtagctaggattacaggcatgcaccaccatgcccggctaatttttgtatttttagtagagacgggatttcagtatgctagccaggctggtcttgaactcctgacttcgtgatctgcccgcctcagtctcccaaagtgctgggattacaggcgtaagccaccacacctggcctaaagatttgaattttgaactcggtttttgcatcagaactattactgaagttagtggttatatgtaaaccttaatctcatatctagtttttagttaaacttcacaataaaagcaaaatattaaacatcgctta

SEQ ID NO: 115597 - DNA, 2341 bp, Homo sapiens
tcccagtaaagtttcagaactggtcaaattagtgaggtttttctcttttcttacaattatttttaacataaatacttggtactttatattattaatgtattttcaggataatttttataatccccccacctttttattttttgcttcaggtattttttcagtatagaagtttggattttaaaatgacttaaaatttgtatagagaaatgctgcattacaaatgagcagaaatagaatttactcgtatttttatctcatataatcatcatgaacagttttggacttttttaatggcacagaaacaatgtctcctgaaggctttatttattttcttaggatttcttaggatctgaactatcttcttacttgttatttttctatagtgctttccctcttatttttttatctcccactttccaattatctgacttataattcattctagctattagtttttgggtttttttttttcctcttcattctagtgtctctttttacttgtgatgtattcaccttgggacttgtttggctgccttaatcgtcttacatagtgaggaatttcaataaactcttctccatcagatgtttgtgctttagaagagtgttatattggcctggtagaaaaggagaggggaagggaattttctgtgaattatcgtgtgtgacttgcctttttttactttttaaatcaagtgtcagaataaattatcacttattggaactgaaacactcaccgattcaaatgctcaggtatgaatctttttcttcctaaaaaatacaaggtaagtggaattaattgtattttggaaaataaatatgtgtgtctgtatttttctcaagtttaatacctttgttaatacctgtatgcttaatcatttggaaaacttcttactcttcctgctttaagaattgaaagaatattctaaaaactttctagaacaagctattataaataagagagtattttctttattatttgtcttttagcaactatacatatatttaacaactgagtaaattgcttgttagttgctattacgctgccttgttaaaattagaacaaagaccagcctggcctacatggcaaaaccccgtcgctaccaaagtacaaaaaaattagctggtcttggtgatgtggtcatatgatcccagctactcaggaggctgaggcgtgagaatcacttgaacccagtagatggaggccgcagtgagctgagattgtgccattatactccagcctgggcgaaagagtaagactgtctcaaaaaaaaaaaaaaaaaaatagaacaaaggcggctaactttgtgttaggtataatagtcacagatattttactatctgtgtcgaatctgaattgattttactcttggcctaaaaaaaggactgacattcattataataatcagaattatggaattgctgtaggaatagatcagtggatcagtgaaacagattaagaattaaaataaagttgcctctggagcagcgtgagagttagggatgccacccccctgcaaagttttaaaatattaagaatgtttatattttcatctatgaataggtatgaatagtccacagaaaatgactttgttttcttcttttgtagctatcattgttaattatgcaagtaaaatgtttaaccgctgaactcagtcaatggcagaaaaaaacacctgaaagtaagattcttattttaaatttgaattttttgtaaacctattaatagcaaattaatttaataattgtaggaaaaattacaagatccatttggcctttttgaaattgcccaaatttcattgataccgagaagccactttttttctgtgaattattttgtacttcttttattattattgataaacatatcttacattagattataataagcttgattatggagacgttattatagctattatgttatcctcatagacactgccttatgctcgctagaaatggtaaattgttcctttttttttttttttttttttttgagacagggtctcatcgtgttgtccaggctggagtacagtggcacaatcatggctcattgcagccccgatctcccgggttcaagtgatcctcctacctcagcctcctgagtagctaggactacaagtgtgtgccaccatgcttggttagtggttggtttttgtatttttttgtagagacggggtttcaccatgttacccaggctggtcttgaactcctgggctcaagggatcctcctgccttggcctctcaaagtgcctggattactggcgtgccagtgatttgtttcttaatgaatgcaatttacctagtggaagagaaaagttataatttattttagatacttaca

SEQ ID NO: 115598 - DNA, 1062 bp, Homo sapiens
attcctgcatcaaggcctttgcacttgcagttccctctgtctgaaccctctgcccctcttcatccttgacctcatttctttatcttcttcatgtcttcttactcagttgtcaatttctcagtaaccttatatgaccaccttatttaaaattatattgtccttgccctagcatttcctatgtttcttccttgtcttttctccatggcacttataaatcatttgatatactacagtatatatatgttttattttttattttattgtctgttttccttacttagaataaggttcacggtaggagggatttttgtctattttgttcattgctatattcttaccccctagatgagtatctggcaggtaataagtgttcaaccaatactgctgaatgaataaatattttttgctttagtttttcttataaggctaaaaattcacaaagcatatatcaatgaatcaggaggatctagatccggatagtactacagatgtgggagatgttacaaatactgaagaagaacttattagagaatgtgaagaaatgtggaaagatatggaagaagtaagtttcaaaagatagaagtgatagttaatataagatttaaatcaacttcaataataaatagactcaggaaagaaatgattgtgctagtttccaaaagccattatgtatgataaatatttatatagcttttagacctatcagcattcattcaagaaactttacactagatgagctatagaaagaaaaattttgacaatccatgctcccaaggagattacaatcttatggaaacaacagccattatattatgttgtaatacaatattagatgtattgtagaagtacaaagactatacttagcaggagtgctaaacccggtgaaggggtcaaggatagctttctgaaagaggtaattactgggccacgcctgtaatcccagcattttgggaggccgaggctgggggatcatgaggtcaagagattgagaccatcctggccgacatggtgaaaccccatctctactaaaaatacacaaattagctgggcacggtggtgtgc

SEQ ID NO: 115599 - DNA, 1038 bp, Homo sapiens
ttaaaaaaaaacctattatgcacaagtcagattcttagtgaatgattgctttgggaatactaagtgattcatagatctgtcttagaaattaacttttaacatttcatatatgcagaacagattttattattactgccagtcatgatggacatgtcaagttctggaaaaaaatagaagagggaattgaatttgttaaacattttcgtagtcacctgggtaagaattgcacctcattttcttgtagctctttcctaaactatactaattaaagtttaaattttttaaattttttttctttgaatcatgcacacttattttactgttatttactagaatgttttaatttcatttattgaaataggagttattgagagtattgcagttagctctgagggagcattgttctgttctgtgggtgatgataaagcaatgaaggtgtttgatgtagtgaactttgacatgatcaacatgctgaaacttgggtgagtctttttaaaagtatatatattttaacttattgaagtaatttgtaaatcagactttaccatttaataggttatttctaaatagtatattaccatatctttaaataaaatgtgctgttgggttttgcttggaaaattagatacagcgaagccttataatgtttggaagcatctgctatgatttgttatcaatcacagaaatttctaaacagcatcataacaaggattccttatatccaaattgacattacttagtaatattactggagctctgtcatatctaattactggtagttacagttaacttccttgctttacttatttcagtaatatagaattgagttcctataagatttattcacatttttggaattaaagctatttattggtgactttaaactttggaatatattgatactaaaactatggttagattgtacagtattaagactgatactttgttttaagcatgtcttttttaagataacatagaatttatacacatctaaatgaatgtcagcttgaaagtcataacagtgtcagaaagttttgg

SEQ ID NO: 115600 - DNA, 1207 bp, Homo sapiens
gagaaataagtgtgctgctatatgcagttcttttcttatgttttgacagatccttagaactatcattatactgatgaggtcagaaagagaaaaaataagtaactattcttagctgttcctccccattctgtgtctctgctacttttgagcaaggaatccaaaactgtctaaatcaccagccaagacatttttggtagtgggatagggagggatgcttgcttgttgtgctgacctttttttttccctctcaattctttacgattttagctattttcctggacagtgtgagtggatctattgcccaggggatgcaatttcttcagttgctgcttccgaaaagagtacaggaaaaattttcatttatgatggccgaggagataaccagccacttcatatttttgacaaactccatacatcacctcttactcagatacggctaaacccagtttacaaagcagtagtgtcttctgacaaatctgggatgattgaatactggactgggcctcctcatgaatataaattccccaaaaatgtgaactgggaatataaaactgacactgatttatatgaatttgccaagtgtaaggcttatccaaccagcgtatgtttttcaccagatgggaagaaaatagctactattggttctgatagaaaagttagaattttcagatttgtaactggaaaactcatgagagtctttgatgaatcactaagcgtaagtgtaatttaaatttaaccgtactttacttttctaaaaatgctttattttatgccttttcttgaaagatcttttttctacagatagacatttagatagacttatttttttcttagcacattagagatattcaactgtttctgtcttgtagtgttgctctttgaaagtctcttctctaggggtttatgatgtgcgtttttcaagtcaattattgtcttatttttgtggttattttgttttttacaattttgttttgtttgcaagctgttaagatcctcaaaactcattctaggaccccttatcttctcactctttattcactcctgtccctatgactacttctaaatttacttctctaaccttctattacaagcaaacctggtgctatctcttgtcctgtcttcataaatggtgccagtatccatctagttgctcaaaccagaaatctaagagttatccttaactcttttacccttctgtgtaattcac

SEQ ID NO: 115601 - DNA, 1006 bp, Homo sapiens
gactggaatctcaaggaggtggtagtggaggagggtagtttctaaccagtcggaatcctagtttaacagaaaagaaattgaatgggatggtgtaaattatcttttagtatttattaaccagggtcactatatatggctgtgcagttgaatatcacagaagccctgctatgaagtctagagcactctgaaaaagattctgatcaggtacttaccaggttggataacatttatggaatacttatatagggacagatgaccacctacagaccttatgccttaaaaactgagtcttctctccggcagaaatgatcattagcccttccctgcaaaatgtgtagtccagcatcctaggctattcctggcacatgaataagcagcgtaatatgtatcagtctccctgtctttgagactagagacaagaaaacctaacaactaggctttttaactgttctgtaagaccttgaccttgtgcttataccctaacacacatacctcattttgattttttgagttttgtatatagttctaaccttatctagaaaacacaagattatggttaatataagcatgaaataaggatagaattagatgggacagaagtctggcttattttcatctgcaatggagagctatttttgaatgctactgtttgatgccctgattgtgtagaaaagaatgtaaagatcgttactcttttggaaggttcataatatgttaatacagttattgagatgtgatgcctatcttgaaatttgtgtaatatcaaaagaaaagtaaaccaaatttccaaactataaaggacacttatagaaatagtcatgtctactaaataacatgtacctaatggtaatctcactgccctgtgtcagaataacttgagacattttctgaaatattatgaatttgttataaattagtgagatgaattcattcagcaaaaattgagtgcttgttatgtcaggcacgtaaccttgctcaaggacctcatagtctatagctgcattat

SEQ ID NO: 115602 - DNA, 1303 bp, Homo sapiens
gcagtggcgcaatttcggctcactgcagcgtctgcctcctaggttcaagcgattctcttgccccagcctcccgagtagctgggattacaggcacacatcaccatgcccggctaagtttttatgtttttagtggagacggggtttcaccatgttggccaggctgttcttgaactgatgtcaggtgatccacctgccttggcctcccaaaatgctgggattagaggcataagccaccatgcccagcctgaaatactattttttagtgattggacttactaatgtctatttcatattgtttagaatccctcttaagaagtacaaacagttagtggctcttaatatgtattctgcttctatttaaattctcattgcatatatagatagatgggttgatatagatataggtatatgtatatagagtttttgttactaaatggtttatttcctagatgtttactgaactgcaacagatgaggcaacagttaccagacatggaatttggccgacgaatggctgtagaacgtgagttggagaaggttgatgctgtaagattaattaatatagtttttgatgaaactggacacttcgtgctgtatggaacaatgctgggcattaaagttataaatgtagagacaaaccggtaagctttaatatgaggtatgttttttaaaaatgtgtttgtgggggaccatttcctccatcatgggaacagtgggagtattgtttgttccaagaaaagtggaatggccccaaatgtctaaacttaaccaaatgttttgactggatttttctgtggtctcttggttgtttataatcttatgtagaaagtttccactcatgtttgtaaaagaaatggaaagaagatatgcatagtttcaagttgttgtgtgttttttttaacaagtttgtctgtcttttgcttattgatttaaattagcctggttcatgttaaatgttgccaaagattttaaccacagaattcagcattacttcctgctagacataaaatcaaaagttaaaatgcatgaaaccacagtaagccttttttgtgaaaacagtccatttggtcttagtacaaaatagctacaatcagatactctcactgaatgtaaatgaacagaacttaatattttaaggagaaaaaaatgtcctgtacatttccatgtataaacatatttatattgtagttcttggcaatacaaaatctttgaagttttgcagaacagttaacagacatggaattttaataagaataggttaaaactgtataaacaaatgattgattgtttttaatagaccttac

SEQ ID NO: 115603 - DNA, 1931 bp, Homo sapiens
ttgttgttttttattgagatggagtcttgttctgtcacccaggctggagagcagtggcacgatctcggctcacaacctctgcctcctgagttcaagtgattcttgtgtctcagcctccctagtagttgggattacaggtgcctgccaccatgcttgaccaatttcttgtatttttaatggcgatggggtttcaccacgttggccaggctggtctcgaactcctgacctcaagtgatctgcctgcctcggcctcccaaagtgctgggattacaggtgtgagccaccgtgcctggcctcatttctgttttttaacctgaaaattatagctgcctaccagtttaaattgataccttttggggggtagagaaacacttttaaaaatctttcactagttattttgtacatagataagatagttgattcccagcttttatctgtaaagttgtcataattggaattaacttcggtgattctgttgtataaaacattgttatatttttaggtgtgtgcggattttaggcaaacaagaaaatattagagtgatgcaattggctttgttccaggggatagccaaaaagcatcgtgctgcaactactatagaaatgaaagcttctgaaaatcctgttcttcagaatattcaagctgacccaacaatagtctgtacatcattcaaaaagaatagattttatatggtatgtgtaagtactaggagattagacggtaatgttccttccagtttggtttgacttttctttgtttgtaccttcaactgaagagaatgttggcactaatagcagacttcctaaacaaccagaataccatcttacattaatattgtagaattttaaagtagaagttgattttaagtatttctgtactgttttccatcatgttttgaaatttttcaacctcgtttccacaactatttgtgttgttttagatagtaggaagttagtggttatagtcataattacatccaaaatagtttcactgtgggattttaaaagtgtttttattttttcagcctttactcttgaatataatttatcttccccaaattagcacagcttccttctctaaatgcatttccttttttaccttttgacttttattttaatggtgctaccttggaattatatattcctgtggaattttttttttctcttctggagaactaaaagtactttgcatgttaactaagactgagatagttaaaatcaaactaccgtgccatgaaggagtagcacaattttatttgttcatccaagcaggaaaatcaaaagtatagagacctatgcccttgcattctatccttcacaatggaatcagagaactttttaagacccaaacgtgactcttattttctgcctaataccctttaatggtgccccagctatctatgctggctggccctcctcacttctgtagctttatctttcttcatttttcattcatttgctacacgaaccatactgaaagttcacatgtagttgagtgtgctttttaaactctgggcctttgcacaggctattcattctaccagccacacacctctctccaactcctaactcatacttcaagtttcagtttggaagcccctctgttttttggagatggcatcttgctctgttgcccaggctagagtgcagtgacgtgacttcagctcactgcagcctctgcctcctgggttccagcaattcgcctgcctcagtctcctgggtagctgggattataggtgcatgccaccatacccagctaatttttgtatttttagtagtgacagggtttcaccatgttggccaggctggtctcgaactcttgacctcaggtaatccacctgactcagcctcccaaagtgctggaattacaggcgtgagccaccgcacccagcctggaagccctttttaacatcaagtctgagttagatgtgc

SEQ ID NO: 115604 - DNA, 1110 bp, Homo sapiens
cttcattgcaaggtatgtactgttatcatcatatatgagtgagggaagagaagaaatgaattcacatccccaaagtcgcagaactggaattcaaatccaaacaatctaaataatgaactgagcaacaaacaggtggcatgttaggccttactagaaggcataagtcgagagctaccacaaatgaaacaattattcttgttaaatgtttgcccaagaaaatttctaaccaaagaaattaaattccatttgaaatcaatgtgttcagtatgttatgtggatccttttcatattagacaatgtaaaaataatttaattgcctgacacatcctgtatgggaagtgattcctgaaataaggattctgatgtgaattcttacatttcttaagtacttcattagaaattctattgttcataaaatttttaccagatgaaaactttaattcgttgactcactttttactttcctccttgagtttaccaaacgagaaccagaagatacgaaaagtgcagattctgatcgagatgtttttaatgagaaaccttctaaagaagaagtcatggcagctactcaagctgaaggacctaaacgagtttcggacagtgccattatccacaccagcatgggagacattcacaccaaactttttcctgttgagtatgtataacaactgtttttattggcttatgtaattaagaatgtaaatgtgtatatctgaagaaaccatgcaacttaaaattcccgttactttgacttaaggaattttgaagaaacgtttgataaaaaacatctattcctgagctttctgataagtgttacggtagaaaatgggaaatttttatgcatatatactttataggttcattacgaggacaaaatgtattggctatgaaagtgctgagtgtaaactgtaaagtgatacacaaatgtgtatcactgttactgttaacagcacatctgaactctaggttttgtggattgctttgctttcctctcaaagcaaatccttaagagaaagataattatgtttccttaccaacagttgctagatacctactatctctttatagtttcagtagctctgtgttttaaaagtgaactacaagctgggt

SEQ ID NO: 115605 - DNA, 1040 bp, Homo sapiens
gttagctatggtcaaaccactgcactccaacctgggcaacagagtgagaccctgtttctacaaaaacaaattacaacaaaaccgtaagggcttcaattgaaaaaaaggtgaacagttttctggacagtttaaaagactgtaaaattaacatacaatgtcaaatacagtagagtatctctggccattcttgacccaaaaaatgacatcttttacaacacttttacttaaaagttcttatttattaacattttgaatatgaacgttttataccatatcttggtactcaacaaataactaggcagctctagactcttggacagtctcactttaagtgctcaaaacccatgtactcttcggccttgtttgctgatgtacttgggtacaagattctcttggttcgtccatttccagctcttagaagtattacatggtaatgaaccgtatgaaataattgcataattttcagttaatattattgagaaagcttcgtactctgagtgtgattgtcatttaaagttgaataaatttagatgtcatttctatgattaaggttttggccaagagtatgtcgctgtagcataacaatgcttttgtaagaaaatgacctttcccaggaacttaacctatactactacatgcagacctataatactatatggagtaaactaacttaagatattgggccaggtacagtggctcaggcctgtaatctcagcactttaggaggctgaggcaggaggatgtcttgagtccagaaagtcaagatcagcctaggcaatatagtgagaccttgtctcttaagaaaaaaacatatttttaaggtgctatggctgtattttttttgactgctaaatgaccttgaaattttaatactgtcaaactcaaatattagttaagcagtcatgttctaaagataactaagttgaacaataagaatatactacttacatgaccctccgtgcttgtcctgagattagagattatgaaaaaaaaaaacaactgtccttctgaaacattcagaagacatggaaaggaaacat

SEQ ID NO: 115606 - DNA, 1094 bp, Homo sapiens
gtagccaagctagcatttgaactcccacctgtctaatgccaaagtatgtgctgcataaactatttcaaactgcctctgaataaactgttcaggtaagagtcctccagagaccttttaaagccttagccacaattctgtaagccatgtgaagtaacttacctttagggaagatcttccagttccctttggtctgaaagatgcagatatttaattaaacattatactatgcttctattttttttaacacactggaaataacttttaaaagctgctacatttttattgctgagaaattattgtacttctttttaaatatatgctaaaggggagcgtaaacttaaattctctttaatttgctcaaccagaggatataatttaaagaaattggggtttaccaagattttccatttgtcctccaacacagccttggcttgataataagcatacagtatttggacgagtgactaaaggaatggaagttgtacagaggatctccaacgtcaaagtcaatcccaaaacagataagccctatgaggatgtcagcatcataaatattactgtcaagtaaaataagatttgttttaatgtacttgcaaataaaaatacaatattaaacagattattttacattaggaagcttaggacttgctgaatatacagatcatgtttcaaagatacagtatttttgtattttttattaaaggctattttttaaaaattacctttgacttttctcgcaatatttctaatcctgggaggtgataaattgaaatggactaaactcaggcaaatagcactcattataggtaatttctaatcagcctcaaattaaatattaaataattacagtactctcctccaccccctttcccatggttttctttctactgtcaaccatgatccaaaaataggtgagtacaatacagtgagatattttcagacagcaagaccacattcactaacttttattacagtatactgctatagttgttctattttattgttgttaatctcttactgtgcctaatttataaattaaactttatcatagatatatatatatgaaaacacaatatatatggggtttagtatca

SEQ ID NO: 115607 - DNA, 2843 bp, Homo sapiens
gtagcacatgcctgtaatcccagctacttgggaggccaaagcaggagaatcgcttgaaccaggaggcagaagttgcagtgagccaagatcatgtcactgcactccagtctgggtgacagagtgagactctgtctcaaaagataaaaaaattacttaggcagtatgtttccttttaggttgcaaggactttattgatttcattgttaagctagccttacaaagtatatacatacacacacatataaattagttaaaccaaactaattttttctattcttattaatctcagaataattactgaaagatgaatctaggttttttgtttaggcttctgttagaacactgtcaacaaatttctctataaatggtgataattagaaaaattataatttggatggactgataaaaaatatgtgtatatatctttcaggatgttgctggagcactgtcagtagaagaaatcactgaactactcagtctccataaattatgctgtggccgtagctggtatattcagggctgtgatgctcgaagtggtatgggactgtatgaagggttggactggctctcacggcaacttgtagctgctggagtattggatgttgcttgattttaaaggcagcagttgtttgaagttttgtggttaaaagtaactttgcacatagtatgttttaagaaattatacatctcaaaagatggtaatttaggatgcatatatatatatatatatataaaggaatcttggattgggaattcagtactttgctttaaaaaaattttgtggcagaattaaatttctaattgagcagattagattgaattaaatagaaacttattgaatatacattcttttaaaaagtatatttgttatttaagtttttcagataatatgtgaccaatatactgggaaagaggtagtcacagagaaagggtaagtgaaggtttattctttcagtgaaaaaagaatagccaattgagtgcctaatgagacctctgtgtgaagcaagtgaagtatagctgcttcttttaacctgccttttcactgaatgttggcagcatttagtagtagaaatgacagttgcttaatgaaatagaatccaaactacatatttggataataggattactttatgtttatgttcagagttaacagaacacctttaatgctaagaactataaggtacagaaaattaatactttatatagtgttttattaactttctcctacagcattttgtataaaacacaatgagggagtgaaatgttacccaattaggcttgtcaggttagtaataaactgaacagtaataaaactgtggaagtaattggatctgaatttatgaaagacccatttccaggactgaacctaggtcagagctctaaattggtccttctatttttcaacaaatttaaagtaatatttctttctaatataatattgcatcctttgtgggaatgactataggtaaaatgtagtaagtaacgcagaaccagggttggctttatttaaaagctagtgacctaaatagaaagcgaacttcaagagaagttgtaagtacagtggcaaatgcttattacttacttcaaactgtttcccaaaataagtgcatttattttgacaataaaacttaaggctgttcatgagaaggccttgaaaagttactctagaggaaaaatgtctaaagaaaaaaaaaattcaaaaagtttacattaattattcagtgttgtgagtaaataaaaatgtgtgctctttactgtttttcatttttaaagaatattattatggaagcacgatttatttaaataggtacattgagacttttttttttttaatgttctgatacattaggatgaagttaaatcttaaatcttattagttgaattgttgtaaggacagtgatgtctggtaacaagatgtgactttttggtagcactgttgtggttcattcttttcaaatctatttttgtttaaaaacaatacaagttttagaaaacaaagcattaaaaaaaaagcctatcagtattatgggcaatatgtaaataaataaatgtaatatttcatcctttatttttcaggtaaaaggtcatgctgttacaggtgtagtttgtgtgcataaataatacttccgaattaaattatttaatatttgactgatttcaataactgtgaaaaataaaaaaggtgttgtattgcttgtgagaacttgaactgtttactagttaattgaagaaaaagtgtaacactaaggtgaacttgcttcccttttcactaattttgctaaactttgtaatgcacattcttagcatataactgaacacagttgaaaaattgtgcctgattataatgtatgtataatggtaggtgtttgtgtgtgattcatttttaaagaaatatttttctcaagctcctattactatttgtggttgtattatttcactaatcattagttaagactgtgctagtcttccctgggaaactaagaagagagcttttttatatacagtatattagaattttcctagtagctgaatttctgtattaggtctaaatattactgtatgttatataaagcaggtatgtcaagtgtatagccgtagtctataattcaggaatgctttataaccatcagaagccattatttgcactacatatatgataagtatagacagcaataaaatgttaagatcatttttaagaagtcccatcattattcttgaaagtctctttcttgaaccatctacctaatattattgctagttgtaaccaatttaagaagtcattatttgtgctgtggttaggagagaaaataaaacaaaatgggtatgggttggcatgcctgtca

SEQ ID NO: 115608 - DNA, 1054 bp, Homo sapiens
gccaccgcgcccggccacattcagctaatttttaatttttttttaatagagataaggtctcactatattgcccaggggtctcgaactcctgggctcaagtgatcctctcacctcagcctcccaaagtgctgggattataggtgtgagccactgtgccctacaaaaatgaaattttgaatatgaggaatggttgaaagtctggagatagttaacttagacataatactttggagaaataaaaatggtgatggtttttatcttttagtcttttattcaaagactaaatattagaaaagtagtattcgaagaacaagtagcatccataggtagaggatcatgaggcatattttgaaattcgttatgtaaaaagttatttgatatacagaccaatttgcatttgatagagcaagtgttgtaaatcctttcctagatggggaaactaaacctgagaagttatgtaaactacttgaaatcatactgttaattatttgtaggtgcccctgccatactaggcaccctctgtgtgaaaataatgatggtagacaaactctaaccataacataataatgatatcattaaatatttggttcatttactgaactttagcaagtgactatttttgttttttttatttttttttgggtagctgttgtgtttgttgtagatagcagtcatagagacagaattagtgaagcacacagcgaacttgcaaagttgttaacggaaaaagaactccgagatgctctgctcctgatttttgctaacaaacaggtaatgcatttttatattggaatatttattttagtagttttgtgcatgtcaaaaggcaactggaaatatttcagaagacaatcagttcaatagatatttatagtttcttctgtgtattttgagtacaatctatgtgaaaatgctgtgctgggtacctgggagtatacaaaatagaaataaggtagttaatgctcaccagaaactcctgtgtatgcatatgaacacataagagatctgaatacgaagaagactgataagtaacttaagtaacacagtgttacgg

SEQ ID NO: 115609 - DNA, 1018 bp, Homo sapiens
atccagagtcaaatgttcaaagcaaggtttattcagagaaatctagcttttatgcctggtccttctaccctttttacttcattccccatagaaaatcatttagaattttttcttagttttagtcatcattttaaaaagtatagagacatatgtttatatatttgtatgcacaccacttggatttaaaaggtggaataccttacacactttttttttcctgctctttttacttagctgtacatcctaaacatcactctgtagcagtagaaagtgacattttttgttcctttttccagctgcaaggtacttcattgtgaggatatgccacatttatttatcgtagtaaaaaacacataataaaaaatttgctatctcaaccatttaaaaatgtacaattcagtactgttaagtatattcacattgttaaacagatatccagaaatttttcattttgtagaactgaaactctataccctttaaacagttcccctctgccccctctcatcggtccctggtaaccactattgtatttttcccttatgaatttgactagatacctcatataagtggaatcatacagtatttgcctttttgtggctggcttattccacttggcctgtcatcaaaattcatccatattgtagcatgtgaaaggattttcttccattttaaagctgaataatattccattgcatgtgtgatatggtttggctgtgtccccacccaaatctcaatttgaattgtatctcccagaattcccacgttttgggagggacccagggggaggtaattgaataatgggggccggtctgtcccatgctattcttgtgatagtgaataagtctcatgagagctaatgggcttattaggggtttctgcttttgcttcttcctcatttttctcttgccaccaccatgtaagaagtaccttttgccccctgccatgattctgaggcctccctagccatgtggaactgtaagtccaattaaacctctttttgttcccagtttcgggtatg

SEQ ID NO: 115610 - DNA, 1082 bp, Homo sapiens
gcatgcagtgttgtgatcaccactcactgcagccttgacttctggggctcaatcaatcctcccgcctcagcctcctgagtagctgggactacaggcacatgccaccacggctggctaattttttccattttttgtagagacagagttttgccatgttgcctaggctgaaattttaaatatttcacaggtaaaatctttattaacattacagttgcttaaaatttattttcattttcttaggtaccagggactgcagagaatgcccggtcatgtattcgagcttatttttatgatctacatgaaactctgtgtcgtcaagaagaaatggctctaagtgttgttgatgctcatgttcgtgaaaaattgatttggctcaggcagcaacaagaagatatgactattttgttgtcagaggtttctgcagcctgcctccactgtgaaaagactttgcagcaggtaggtagtttaaatgtggttagggacttagttgtaagtttaagtagataattaccagaggtatacattagtgtgttttattaatattttgtgtctgctgtatgcagtaactttgtgcttaggaaatggtctgcaaccttgaattatttcactagtatggaattatcagtgtcgttcacgtgcctttcccaccataagccatgggttcttgaggccttctaacttcttgccattcttcagttatgccaaatccttttactcttctttgccaagcatatatgtagttttttttttttttctgcttggagtgcatatatctctcttttctaatagtggaaatcttccttctccttcaaggtccagcttaaatatttgcctttctttgaagctttctatttgttggtctttttttgagtgcctctctaccatgtactgcctacgtctgctataattcagtggttcttcactgttagagcaaacgtatgttttgtgatggttgagataccataagaaatttgttacccagtttgcagatgacttacttttttaaataaatgagattcagttattctaacacaaatgtcagctttacccatttgtgttttggatctgttttcataagtgtg

SEQ ID NO: 115611 - DNA, 1111 bp, Homo sapiens
ggtagcatgaaaataaatgagagatttaatttctgaatgttataaaaaaaaaaaaacttcaaagaggcatcatgattcttcacaaaaaaatagctttcgagcaggaaacaaacattctgtttgcttgcatgttttcataatgcaccagattgttttgacaatatttatgtctgttagctcttacttaggatatgattttagagatagtctcttggttttttgtttagcaataaacggacttccaaattttaaattacttctttgcagtacagttttcttataaaggagtgaaagtaaattagtatttttctgtgtcataaaagtcacttgtggctgatgcttttttgtattaatagggatttaaatagttttttatattattagtcaatactatgagttcttttctctaattatggtacattttatagcattcagtattggaaccagaagctaatcagatccgagcatcaattttagatatggctcactgcatacggaccttcacagaggaaatctcagattattccagaaaattagttggaattgtgcagcacattgaaggaggagaacaaatcgtggaagatggaattggaatggctcacacagaacatgtatggattttttttcttcttcactttctcattcttttttatttttcatattttcaccttctactaagtaattaatgggcaattacaatttgccagtattgcaccaatcattagaaagttttttaaaagtccctgtctttcaggaactcattcatcatggaaaagagagagtttgaaatatggtaactattttatggaggagaagtacagggtgctttggcatcacaaaacagggacaatgatttatggaggtcagagaagtccttatagaagaaatggtgtttaaactgagatttgaagaatttcagtcagggaaaagagcagaacggggaatgagttgtcccaagaagggaacaatatgttaaaatgtttgtaagtgaggattgtacatattgtagagacttaaagaagctcactgtagttagagctttaagtattgaatgggacatgacaagaaaagaggatatggagagttcaaagccaaatcatgcaggatcttg

SEQ ID NO: 115612 - DNA, 1050 bp, Homo sapiens
gcctcagccttcttaaagtgctgggattacagatgttagccactgagcctggcctatttttttttttatttgcttaaatcagtggttttctgccgtgattgtgcaatagactcacctgtggagctattaaaataacatggcgtataattagaaaaatatatacaagtctagggttcatccacaacctgttgaaataagaatttctcttccagacagctatgtttttaaaagcttacagctaattctgatgcatactcctacattttctaaatagcatttgtgcttctgtccttcctatacatcatcatgacaactaatatttaaagctatggggatgtatttaatatcagatttttgtagttttacagaaagacttttgacttctctatggtttagtttcttttgtgtaaagtgaggggatttggtggaagagatctttgcaccgaatatgaatctatgagaatagttctatttttggcttcaaattcataacatatattggccagttaatcttggaaatagcttcttacccctagaaatgaatgcttctcagatgagtattgaatgacctttgttcttaatgaccaatatattttcatatgtaaatattgttcagttaagcaaaaaggattatggattctatatttaaaaattcgtcatgttatactgattgggttcaattttaaggcattaattttttgtttatcagagcatcattcgttgtgatgaagatgaagctcaccttgcctctgtatattgcactgtgtgtgcaactcatttgtgctctgagtgttctcaagttactcattctacaaagacattagcaaagcacaggcgagttcctctagctgataaacctcatgagaaaactatgtgctctcagcaccaggtgcatgccattgagtttgtttgcttggaagaaggttgtcaaactagcccactcatgtgctgtgtctgcaaagaatatggaaaacaccagggtcacaaggtatgaatttaattattaatcagttggatcactgtagctactttaccagctcagtattcgtt

SEQ ID NO: 115613 - DNA, 1466 bp, Homo sapiens
gatcctttaatgatttttcctctcgaatccaaaccagccagggcgtgaactgagggcggtgagggggtacgggcatctccctgcatgcaacgcggtttttgtataaactacaaatcccagcatgccactctctctctctctcttttttttttttttttttttttttaaaaaaaaaactccggcaacgttggcctttgggaggccgcgtattgttacctaggggtggtttcttttcctgcagtcgcgatgtgtgattgcagatggaaaacaaagtattttatgcctacgtttctaagatagaagaaatggacttgttgaaaagaagccagtttgtaaaggacacagtaggagaatttaaggtaccaccaccagagagaggttgagagtgcgtttgacttttggttttgccaaacgcgaggttttccgtttccttccggggcaagttgaacctgtccagcccccgtaggctgtgggtcaaaagtgccggtcaaaatggaagtgaatccccctaaacaggagcacctgctggcgctaaaaggtaaacttttgcgaacctgattcccccttttctgtttccttgcattccctacttatcgaagcctttgccatgtaggcctcatccttcttaaacactcagtgctcgccctcctgctctgtcctttgccgccaagcgggaggaagcgatttctcctggatgctttttaggtttatgggcccctttctagaacgaaatagatacctggtaaatcgttctttctgatctgtgctgcttcagtcacgagattttagccgcagaagctgacgtcccgctcctaccgtggagatctctgtgaattacagcgggcatccaaagtgctttttccttctgtctcttgtttcttcctgtggcactgacgaagttaatcaggcttcagcttcccctgtaaaattagtattgcatgacagtagtgcagagaatttagcaatacatagtaatacaacatataacttagatttattcaaaacaaactgcagtttacttcaaatcactgtgtatgtgggaaatatgtccgagatctaatgtcaactctcattttttgtacacagccattttgagtaagtttggtgatttaattagatcattatttaggaaaaaacagcagcacttttttttttaggacaatttttttaatgcctattttctggaaaccttttatttgaaatcttttcagctttattttatttgttttttactacaacaaatgcgctttttgtttcttggatgccttaatatatggttaacaatgacttcttgaatgagctgaggaaatgctcaataaacattcgggttcaattgaattgcgcttactttacttatggcatccattttgaggaacgccttatccttcccattatgatgtagtcatcagactttctagaagctcatcagtctcatataatgatgcctgtgttagcgagattgtctc

SEQ ID NO: 115614 - DNA, 1025 bp, Homo sapiens
ccaacatggtgaaaccccatctctactaaaaatacaaaaattagccaggtgtggtggtgcacacctgtagtcccagctactcgggaggctaaggcaggagaggctaaggcttgaacccgggaggtgaaggttgcagtgagccaagatcacgccactgcactccagcctgggtgacagagttagactccatctcaaaaaaaaaaaaaagaaaaaaaggtttttttatatctattatgtttttggcacttcattaaatgcacgtttgatacaataatttttaattgtcattaacaagcactaatgaatgcctacagttataaagtattatgttaggcatgaaaacatttttcctattccacaagatttgtgattgcttgggtgagaaaatgtactagtcaaagctaaatagcagtttagtatttgttaatgtatgtcattaacatggaagatgaaagatcactggagattatgtcaatctggaaggtttcttgggggagagggaatgcgaagaggatcttgaaagaatgggaggatacagataacaaggcaagggagacatggtaatcagaggcagagacatagtggtacacatgtgttcttttaacagtgaacaaatttcacttggtaagagtccgtaaggtggtacagaggaatagtagctgtattagtccattttcatgctgctgataaagtcatacccaagactgggcaatttaccaaagaaagaggtttaatggacttatagttccacgtagctggggacaatcatggcggaaggcaaggaggagcaagtcatgtctcacgtggatggcagcaggcaaagagagagagcttgtgcggggaaactcccatttttaaaaccatcagatctcagccaggcgtagtggctcatgcctgtaatcctagcactttgggaggccaaggcgggtggatcacttgagttcaggagttcgagaccatcctgcccaacgtggtgaaataccatctctactaaaaatacagaaattagccaggagtggtggcgt

SEQ ID NO: 115615 - DNA, 1053 bp, Homo sapiens
ggacctctaattagaatgagtttgaaaatgatcatagagttttaaagttaacaaggacgttagagagcaaatagacccaacttccagaaactggatgcaaatttgtgcatacacgtacatatgtttgtcatatatggatggggtctctgcctttcattaaattaggagttgacaaactacagcccaaagaccaaatttggtccattgtctgtttttataaggcttttgaactaagaatggttttcacattttcaaattattgaaaagaatattttgtgacttgtgaaaattacatgaaattcaaatttcaggccaggtgtggtggctcctgcctataatcccagtgctttgggagccaaggcaggaagattgcttcaggctacgagtttgagaccagcctacacaacatagcaaggcaccgcctctacaaacaaacaaaaaagaaattcaaatgtcagtgtccttaaataaagctttactgacacacagccatactcatttgtttatgttttatctgtggctgatttccagctaccacagcagagttgtatatagttgaaacggagattgtatggcctctaaaatctaaaatatttgctaatgacttcagagaaaaagcttgccaacctctacattcgattgtgaaaagatctgattttcaaaagtttgagaacatatacttttgtctttctatgttgtaaatattgaatttcttggaattcagtaaatactggcaattcagtaaattcagtaaatattgaatttatttttataagagattaataaaatagcaaaggcatatactttaagatgtcagtactataaagatcaaagaatacagtagtatgcatgttctaaaacatgattttatatttcatgcctttattcacttttataataataattataagcagtgtagtactcactaggggtcttaggctcaactagacattcagactcatgatatataataatgctatttttctttttctttctttttttttttgagagaggatctagctctgtcacccaggctggagtgcagtagcatga

SEQ ID NO: 115616 - DNA, 1059 bp, Homo sapiens
ccttccttatttgtacctttttttttctctgaaggtaagaaacctgtctcttgttatccacaatgtattattttgttttgtcctagtatacacataaaatggtgaaaaaacacgtgtcgtagctagagtatatttgtgtaccattctttttgtctttagccatagattacagttaagattttgttttccaaacttacttaggttagttccacttttacccttccctctgctatagcccgattgtattcttcatttgtaatgcagttaggttcatttgttactgtttatattccattttgaattctccctaattcctgcttgatcttatttatttatttttttggggttgggggggtgtgccattgccatggttctaagcatcagagctatacagaaaggtttacacataaaagtgttgctccccctttcatccttctttcctaattcttattcccctattctttccactcatagccatgcacaccctgtaggtaaccagtctcatttggactttttttttttttttaactttctttcaaggctgatcttcagacaagttctcagcgtttaaatctttcagcctccaatgctgcagtggctgaacttaaaccggattgttgtattgatgatgtcatacatcatgaagtcaaagaaattggaacacacatgtaaggattaattttattagttctcaaaggtttttacttatatatgcctttgtttgaaatttttgctttcttttcattcaccatgaagcataggaacctacttcaaaaggaattttatgttctatgttggcatgtttaccagaaataaagtttaaaccaaatgtttgttttgtagggagaaaatccagtttatcatcatttatctctagttttatttttttacatctacaatctctaaaaaatgaaaagctgtacaaaatgtttaaaacccaggtagcactctaaaagtaaatttattgtgttttgaaatgctagtaactgatgttcatagtgtttatttttaaattcagtttttcagttttgtatttaaccaggtatatgcactctgtcc

SEQ ID NO: 115617 - DNA, 1471 bp, Homo sapiens
tgcatccagtagaggagactgacatgatgcaactataatgtaagcccctcccacacatataacccaaatcgtgaagtaacacatcctgggtacctagagaggtgaaaaatgatttccagctatgcatttgatggaggtgacatttgagattgctcttaataaaacattgaagaaatatataagttttaaaaaggctaactatgaaatctactaagaagaagagaattctcaattttttcaagtggttcagccccacattccctgaagtgatcaacggaactctaattgcccaagatattccttagaaagatgattccattattacataaatttaagagaaggtatacggtgtatatctattctgaatgtggaggatagtatatattcatcctaaattatctatgaagaattgcaatgttggtaaagaattatagaactagaaagtcatggggtatacctctctgctccaaaatgtgcccttaacagtttgctactgttgagtattcagccatagggttcttctctattccattgtcatttaaccttagcagtttcacctttttagaaaaatggtttgtcatatttctttatgttgcttcctgtttactttcttatttactaatgctgtcttgtttagtaatttaaaaaaatgcagaaatgcattttattttaaagtaattcttttttctttaacatttaactctgatttttctaattattcttttttatttttccattagagtgacctcagttctgtggtaatttgattttttattataaatttttatacttttcttactcaccactttttgactctgcctaattaatctctctttacaaaacatagtggaaaaacagttagttgtgaataccacctatgtgacttcagaaagattatatataattttatgtactttttaattatatcaattttctattccgtggggcaaaattagctcaaaagttaaattgtcatactgaaacaattctcattttcagtgtttcttctttagattttttttttaaagaggtatgttaccttgtgtcaaatggccttgtgattttcatcatcttactgtaaaatacccgattatcctagccttcagttctttgagtagactgtataatcgaaattcattttcagatgcacagtggttttagttttaagtctgggtcaggtgatgatggccgcttgacaaaatgaaacagaagaaaagcaaattttcccaacttggctaaaattttgttttcaaagttatatttacaataagcagcatttgcttatatcacattacatatgtaataacatcaactgccttagcactgaattcttaatttttaaaatatcaaattgctttacactaactgttcaaactaacttgattttccattatgctgcttgtttttctttcgttttatctaagctcttcctaaatttatgcagaaaattgcagtttttaaattgaaatgt

SEQ ID NO: 115618 - DNA, 1024 bp, Homo sapiens
ccctttatgctgaatattacctgttttgacatattccaaattttacttttctttccactgtttgaggcaataatttttaaaaaatgatgatgatgattcctgggcccacttaaatatagccgttagttatttttctgccatggcctgttccaagccttcgtgttgttataatccatcctcatctgtgcgtcttgtaaaaagtcatgattttcttcctggctcctttcaacatcatccccctctttctttagaaaataactttacctatttagagttacacacatagaagctacagcatctggaaagtgtcccttcaactccctgaaatttctttactgactacttacctgtgagattcatcttaactctactgaacatggaataattatataacaaaaacagtccaggtctgccaggctattccacaggcagtagctgcaaaagaatttaaaatgagagacaagtaaagtgaatcagaagtattttcttagaacatcagcttggaaacccaacagctgttgagtaaatgtgctgctgtggtgccttcattaaaatggaaaggttttgtgatagatatacattaactgtgttgcttgttttcttaggctccaggttatggagatgttaggttgtctttggaggcaataccagataccgtaaaccttgaagaaccttttcatattacctgtaaaataacaaactgcaggtaatgccactgtttgtagatggatgtcctttctacctcacctgcctagaagataattttaaaatctttttgttactatctccttttaagttttcctcttgacatacagccttctctgatgttgatattgagtactgtaaaattcttcatctggtagcagtataattacatatttttaagggcctattgtattatgcatcttctgtattttatttcattcatttgtcacaccctatgaggtaggtattcattgtttatacttccttcaccaaaacatgaactaataggttcttatgtattaatatattatgaattgaa

SEQ ID NO: 115619 - DNA, 1120 bp, Homo sapiens
ccagaaggccaacatccagacaggcagattagtctgaggctattttaagtgctagaaggtgtgacttcctttcatcttcctggttctatcttaagtgacataaaaaatgttataatagcttttctctttctggtttttattctcctggatatggagaaaacaagtttactgtcactagtagaaatattgcagtacctctttgtgaaatgaacaagatttattcctattattctgattcctccagcagtgaaaggactatggatctggttttggaaatgtgcaataccaattccatccactggtgtggaatttcaggaagacagctgggaaagctgcatccaagttcttcgctctgtcttgcccttactctgctttcttcagtacagggactgcaagtatgctgtcttttcaaaaattccaatatttgggtgctgttaacttacaagtcatttgtgatgtctgtatttcctctgaatgaatgaaaacttagactcatctctctctctctcaatagagcatctctggcttaagactaacagacacattcttaaagagaacatatgaatatgatgacatcgcacaagtctgtgtggtatcttctgccattaaagtggaaagctgaaggaaacttccaatgttaggcttttcatttagtttcacagaactgctctttttgttacctttgtaaaatgatgacgtcaacaacgaagtaaatatgttacttaaattttctttcctgtaaaatggttaaaatattaaatatttgttttgaagagatctgattttatcttgtaatttatatttgaaatgaacatgtgtatattttctacacctattatttaatttcatttcattttagatgaccattggactttgttctccaaaagctgtgtatctgagaccatttgtccctagcaagttatctagaacacgagtcagcacactttttatgtaaggtacaagatactaaatattttaggctttgcaggccgtaaggtttctgtcacaaatactgaactctgccatcgtacttcaagagcagccagtaggcaaaaaaagtacagtggtgtacacaaaaagaagcagttggactcgggaagctgaggcaggagaatcactt

SEQ ID NO: 115620 - DNA, 1277 bp, Homo sapiens
agaggtttctcagacctgcaaacacctaagcacctgggccaaacaaagctacaacgaagatctgtatgaagatatatagttctgcagaatttaaaaagagcacaatttaagtcttcggccctcagaagttaaattcatattccatctaagccaactttgattttcattaagttagaatgaactcctagtattccagtattacacagaacgaagtactactactaacacatagaagtcattactgtgatataaaaagcaaaatagatccttaattaaaaattagtcactcatattcagtgttgaataagaagttaaagtttctagcataactatcttgagtgcattaaaaatgcttttagagcaataagataagcttctagctgactgcctagaaaaacagaagatacaaattcagtgtcagaaatgaaagggaatacactacagacactatagttattaaaaggctaactagaaaacaccatgaccaactcaaggattgtatatttaacaacttagatgaaacagattccctataggatacaaactagaaagctcactgtagaaacagataacctaaacagaaccatatttattaaggaaattgagtttgtggttaagttaaaaaccttccagtaaagaaaactacaggcccagataacttccgtgatgaattttaccaaacacttaagggagaaataatatcaattctaaacaatctcttccaggaaacagaagaggaggaaatacttcccaactcattttatttgaccagtattacccagacaaagatactataagaaaaaaaactttaaaacaatgtcttcatgtgctaacatctgtagttaaattagccattctttttacatgaaataatgggaattggtatatttcttccatttcatttttctatttctttgctaatataccacctgtaacaaattcaatctagatgctatctgtccacttgcctacatttccattctattcaagccatttttgctcttcaagtaccttgatcactttggaatcatagcattgcaagctatttcaaaaaaagttgcgtggttggattgtgctagctacttttaaatttataaaaaatgccccatatattttcttgcttgtctgggaaatatagttgctatctaactagaaaaataagagggcattattaaagtaactctttaagcatcgtactaaatgtttgacttccattaaccatatttcttgtagtagctgtagctattatgatactgtgtaaaacagaacaggttcta

SEQ ID NO: 115621 - DNA, 1021 bp, Homo sapiens
agttcttaactaatcttgtctgcagtttggtattgataatattagcatggccacttatgctaaatacacaataagatacatttagaaatccttaatgtactggttaggtcagtggtacaactgtttgacttaattatcacaatttccccaatggtaaccttaccttggaaactatcaaatataaatatactttaactaagccagtgacctggtcctaagttaaggattttctaaatggtatttaattgtgtgcccataaacactgattttttttaaaaagaaaacttagtaattatttgatggataacaaaaagcatctatcactaacattgcttgttcatgtaatcttctgtgataatttggcttggcatgccagtcttataattaacataatttaaatttgatgcaatttaaatataacaggagacttaaaatattttattataaattagatgccatattagttagtggagaaaaggggcattaggtattaattgcatgggtctaactacattgatgatgagagtttaattccaactagagtatattttttgtttattaataatgaaattggtgctgacatgtaatgacttcacaagttttacgagggaaaactgaaaaaggaagtaatataaattttgtggggtttttttgagatggagtcttactcttttgccaggctagagtggtgttgcaatgtcagctcactgcaacctccacctcctggattcaagtgattctcgagccttaagctcccaagtagctgggattacgggcgcccaccaccacgcccagctaattttttttttttttttcttgagatggagtctctctctgtcgccaggctggagtgcagtggcgcaatcgcggctcactgcaacctctgcctcccgggttcaagtgattctcctgcctcagcctcctgagtagctgggattacaggcacgtgtcaccatgcccagctaatttttgtatttttagtagagacggggtttcaccatgtttgccaggattgtctcaa

SEQ ID NO: 115622 - DNA, 1033 bp, Homo sapiens
ctttatcctcaccatgtcttcttaatgccactttttctagtaccttctctctttttacattcccctttactttgcatagcacactgaaactctacaaaatgttagtgcatacatgatttagctttcattcttctaaaaaaaaaatctttgctaagatccctacatattaactgcctttaatgggaggtgctgtttttcaattccaggcggcaagtttaatgcagaaccctcaagttcaacagctgtaagtatatagaaagagcttattacacttccccaacccttccacttgccaggctcctaatttgagcacatcagctcaaaaatgatgaaactgttctgaatgacagtcagttggagcttaaagccacacacatttggcctagcctctggtataacatgggtattttattaacttttcctcgtccagttgtcctatttgttaagaatatataccaatcccagtgatgtatttcttgtgtactctagaatgtcaggaatgatgacaaatgccattgggggacctgctgctggagttgggggcctaactgacctgtcaagcctcatccaagcgtaagtattatttaaaacagaaatagtgaagatgtattttatgttttacagcctatctctatggtgaggggtcagggctttctttttaaatgtttatcttttaccgttagtaactttagcctccttaatgttactaaatctgaaagaagttcatgaattacaaccactttttagactgcagggcaggaatccatacctagatagtctggccagccctgtctgttgagaaaaagaaccatgtttattatgcttccccccacccccacccccgcccccggttcattatgctttattttttgggactttcaagtaccagcagaatctttttcttcttttcttttttggcaccatctcaataaggcaggtgagggacagatattagaaaagtagataatttatatccctacccaatggctagagaaactgaggtacaggttagtgacttactaaggaacccata

SEQ ID NO: 115623 - DNA, 1035 bp, Homo sapiens
agtgaatgagagaaagtgccaggggactgggatatcacttttacttgtcgtttaaccctaccattaaagtgataatagcacaaccctctgtgtagccattcacagcaataactcactctttgtgcctccatagtagccaagatgtcctagctttttcacttttctgtttggacaaactagaaagggtataaataggtagaccagttgtatgacttacatatttgtcctttctatagcaaagcaaacagtgaaaggcagcctgcatacttttttctgcacagaagtttctgagcttttttttttcattttattacataattatcttagacagtttgacttagaaatttagtgggagtgatctacaaattggaacaagaaaaaggtagtattattagtacctgaaaatctaaattagtgccttgaaaactgcctttaataaaattctgttttctttctcttagggctgctgctcagagcaaattaggtcactacacagatgcgataaaggattgtgaaaaagcaatagcaattgattcaaagtacagcaaggcctatgggagaatggggtaagttctgggaggatgttccaagtagtaccatgtagcatcaggtatgctgttcttaatggcttggttttgaatttcctgcttaatgttttaccctctgaactaataagaggataaataaaacataagggaggaaatgactacaatttctttgactaggaagtgagatgattgatgactgatttgattgttggagaaaattatataaccgtaccacaaatctcagatgagcactcaatattgcagacagttaggcagacagttctattatttttccttctatagtcacctttccactcgctgatgtgacgatttcatacctcttcctctcccttcaaatttccactaccccctctctggtgactctcaactgatgctattgccttacacttaattgagaagctagatgctttttgaaggaaaacaactcattttcctccttgcaaatccatcagtctgcctacatttg

SEQ ID NO: 115624 - DNA, 1023 bp, Homo sapiens
tggaatgcagtggcgctatctcggctcactgcaagcgccgcctcccgggttcacgccattcccctgcctcagcctcccaagtagctgggactacaggcgcccgcaaccacgcccggctaattttttttttttatttttagtagagacggggtttcatcctgttagccaggatggtctcgatctcctgacctcgtgatccgcctgtctcggcctcccaaagtgctgggattacaggcgtgagccactgcgcccggcagaagtggcactgtttcgcatttttgcaaaactaatgtgtgacataatagaaggtaactggattcttatgtctgcctctgcatttaagctgctgcactgtttcattttggtttaagatgaagaaaatcccacctcacagtcatatgaagttggaaagaagaatattttaatagctttttaaagataatcatggatgttctttgatatcacatcaaagtttgacaaatcgtagctttttaaaggttagttacaaagtggaatttgaaactatatcaatgtacttgttttacactgttacattaatatccaatggtgtaccttacactttgaatggatgttgaatccatgcctgttttttaaaacattaagcataagtccttcggaaattttagtggttcactgtgttatacagttcttcctaatgttgacatatttcattatacagtatcaaacaatcactttccttaatgtcttcctatttagtcggaaaagtcttcaagtattgggaagctgtcaagctcacagtggcagataggattttccaaaattctagttttcacttgaaagctagaattttatcattggtaacacaaactgtcagttgttttacttgaagtgacaatctcactttgttacatttttgacagaatttctgccacatacttaagtctgaataaccctggtttgtctgtcagtagtttttttctggtaaaaatggtgttccatgggctgggcacggtggctcacgcctgtaatcccagcactttg

SEQ ID NO: 115625 - DNA, 2076 bp, Homo sapiens
agcattgtgatcttaggcaagaatacttaagttctccgtatctgtttcctcctcagtaaattgataattgattggctgatttcttcattcaccaaatatttattgtctattatatgcgaaatagtattcttggtctggggatatagcaatgaacaaagcagataaaaatctttgcattaatggaacttacattccagtgggagagacaactaaggaaaatataaagtaagttagatgggaaaatgtgctgcagagcaaaagtaaaatgggaaaggggaatgctcagtaccgataggaaggaaattgtagagtcaacaggaaaggctaccaagaaagtgatattaatacttgagtaatgatctaagagaaatgagcagttgtgctatgtgaatacctgaggcaggtcattctaagcaggagaaacggcacacaccaaggctctgaaagcagggctatgcctggtgtttttgagaaagtaaagagaccattgtgactagcatggaataaatgtcaggcaagtaagtaggagatgagacagggaaaaattggactcatccttttttttctattttcttctttttttttttttgttttattcgtttgtttttagatggagtctcactctattgctcgggctagagtgcaatggcgcaatctcagctcactgcaacctcctcctcctgggttcaagcaattctcccacctcagcctcctgagtagctgggattacaggcacccgccatcatgcccagctaatttttgtattttttgtagaaacaggggttcaccatgttggccaggctggaactcttgacctcaagtgacccacctgcctctgcctcccaaagtgctgggattacaggcgtgagccaccgtgcctggcctgtactcaccttttaagattgaaacaaatatagaacactttgaacattgcctggttatatccattcctattaccacaaaaatgctgtataacaaactgaatttcagtggagtacaatgatcaatgtttatttttgctgacaaatctagattttggctgggcagtttttctgatcttaactcattcatgctccttcagtcagccatgggttgtgtaggcagctctgctgatctctgctatcctctctcacatgtttggtgatgtaggatggccacagctggggctatttggccctctttcctgtgacgtctcgtcctccaagaagccacctctggcttgttctcatgtcagtggcagggttccatgagagagtggaaggcagttggaactggaacctcattagctctgccacattctactggtcaaagcaagtcacaaggctagcccagattcaagaagtggggaaacagactctatctcttgatgggtagaacagcaaactcacattgttaagagacatagactcatagcaggtagaaaattgaggccatgttagttatcagtctaccacatcggcacataataaaatctcgagaaatattagttactgtttttacttgtgtgaattgcctagttttattttgggatttttaaaattaggattattactttgtaagagcccctcatagatgtttcagttgtttttgatctttgaacttttggggtagattattgttgctttttgcttttttgctttatccctacaaaagtttaaatttttatacagtcagaaatatcagtcttttcctttatgatttctgcctttggtctcattcctagaaagtccttctccaccccaagattatgtattttaaaaatcacctacattttcttttttttttttttttttttttttttcagacagagtctagctctgtcacccaggctggagtatagtggaacaatctcatctctctgtaacctctgcctcccagtctcaagcagtcctcccacgtcagccttccaagtagttgggactacaggtgtgagccaccacacctggctaatttttgtattatttgtagagacaaggtttcaccatgttgcccaggctgatctcaaactcctgggctcaagcaatccttccacctcagcctcccaaagtgctacgattacaggcatgagccaccaca

SEQ ID NO: 115626 - DNA, 1039 bp, Homo sapiens
aacaaatatttactaagcaccagggactacattggggattaatttataaacataggctttttgtcttacagataaaaaaggccaaaacaatcttcaaaagaagtatcatttatttttaaacttcttaatacagattatatagaacaaatagttaaccgacatatagatcctgatgcattgcatttaaggaactttcagttagaagtaactgtgtgtaacattttctagaatatacttagaaaactttccacaaatcctggttgaaataaaataaaagtatgttactctacatcaattccattagctgtttatttgtagccaataatgataaaaaatatatacaaacagtatgaaagaggagaactgagttctaaggttatgtctgtatgtgcagaatgagagatggagaagaaactcatagttatggaaaacagaaaagaatggccccagaatttcttgcaagacttagcagccaccaatattcagaactgtctttaagccccaacctgtccatcatcttaatacattgtgcatcagaaatttccaacccaattaaaccatttttgtttccttcattggtttatttatgaaagtcactaaaaagacacaaatctggtctaacctattttagccttacctcttatccctccacatcccattaaacccgtgtacccaccttacctcatagagctatcttgaaagactcagccagtttagaagttacatcctcattgaagtctttcctagattccccaaggcagagtcacacacactgtcctcttcattctccattgccttatttatatagaatttgttacctgatattctgttatttcattattatttttagagacagggtcttactctgttacccaggctggagtgcagtgacacaattgtggctcactgtagcctgacctcctgggatcaagtgagcgtcccaagtagctgggactatagatgaggtctcaccacgttgcctaggctggtcttgaacttctgggctcaagtgatcctttctctttggcttcccaaattg

SEQ ID NO: 115627 - DNA, 1013 bp, Homo sapiens
ctgtaatgctgtataaccattaaaatcatggattacaagcagtatttaatgacatggggaaaaggacacagaagaactggaagaaaataaattttatcaatggttttgttaggattctctagagaaattgaacctatagggtgtgtgtgtgtgtctgtgtgtgtgtgtgtgtaagtatatatatatatataaacatatgtatgtgtggggagagagagattgattgatagattgattatagggaattggcttacatgactaaggagtctggaaagtccagaatctcagtgggggctggtaggcttgagacccaagagagctgatgttccagctccagtccgaaggccagtagcctagaggcccagaagaaccagtagtgcagaagtctggagactgcaggaggattctcccttgttcagggagtcttttaggccctaaactgtttggattttggctaccacattatagagggcagtctgctttacttcaggctcatcactctaacgttaatatcatcaaaaacaccctccaagttaacacataagattaatcatcagaatgtttaatatatcaggtgatgggtttatagctaatttttactttcctctttatgtatttctctattttctgtattttctgcccttacatacattatttttataacatattagacccttcaagttataaggagtgaagattccctttggttacctctaagggttggacatactttgtagaataattatgacagacaactttggctgtgtatccaggcttcatacaagaatataagatagctgcagaactggatattgtaaacattcgtgggcattttggaatttgaaagatcatcagaatccagcatagccctagtgacctggtcatctccttgcccccactatcccttcatcaccaagagttctctactctatgtttcactgtaaaaaggacttggctattttctcttatctcagtgtttgttggctattttctcttatctcagcatttgtttc

SEQ ID NO: 115628 - DNA, 1333 bp, Homo sapiens
ctgctcgcctgggtccttaacaacttacccagctcttgccaggcccttctcaccagggattcctcccaagtcccctgcacataactacagcctggattctccccagctctacagcttgcagtatcacactgtctagagactcctgttgctgtgcttcacactacaggacagacttcctggcgctactaaaggcagcctagatcaacccaagttaatcacatccgcaggaacactgtgattggagctgctggccacccctgagggaaccagcccatagcccagttatctccctggccattgtgggtttcctccctttgcaggcacctgctgctagcatcccattgtgcactgatactagctagggagggttccaactccagtcatgccagcatgcacaaattctccagggatacaaagggaggttgctgtagaaaaaggagcctaactattttctgcctccactgaggataacctcagagtaaatatatgcacaacaaatgccttagtactgtaacataaaattatttgttggccaggcatggtcactcaaacctgcaatcccagcactttgggaggccgaggcaggtggatcacttgaggccaggagtttgagaccatcctggccaacatggcaaaaccccgtctctactaaaaatgcaaaaattagctggacgtggtggcacatgcctgtgatcctagctacctgggaggccgaggcatgagaattgcttgaacctgggaggcggaggttgcagtgagctgataatcgcaccactgcactccagcctgggtgacagagcaagactgtctccaaaaaaataaaataattttttagcaggcaaagtgagatacagttggctgtattaagtagtatttagttaaaatacaactctgttacctgctgcaacaaaagatatacaattacagaattattgcagcacagatctagcaccaacaatctaaaatgcagtctctaagctaaacacagtccttttacagatttaattagttgggaaattagggatgctcagggttgaacagcctgggtctgtcatggagagaatctttaaccaatagaaggcctataaggctttagaaacaagtccctcattggctttcaaccaaactgaatccattacacctgctgaatctgtccagagtccatttcttcttaggaaccactaactacccagccatccagatgtgccatgtgtattctgccacctgctttagagaaacatctggtgtctttattaccttgctgtggctaggggagttttccattcccctccatggccctctgttcttttgagtgagtgttgtttgtgctgct

SEQ ID NO: 115629 - DNA, 1109 bp, Homo sapiens
atcatgtacatgactttagtttcactagtgcttttttccctgaataacattcttcagtcagcgttctctgagataaacttgagctttggtgatgaattgaggaactcatggcccagttctgggggtgttaaaagaaaaaggggctaggaccataaaatcaataaccccgaagagcaaagtgtgcttccataatacagcctgctttcctccctcacgtttttcctcctcctttacctctttccgccttatttatctgtattgagtactgcaaaggaggaagcaccatgctaaaacacaggtggtatttatgagtatgcttgcttccaaaagcaagtagatcactaacttttccttttccttacagatgatttaagccagaagttaaaacccttgggtgaagcagaacgagagtttattttgaatttgaagaaaaaggaatgcaaagacaggggttttgaatatgatgggaaaatcaatgcctgggatctatattactacatgactcagacagaggaactcaagtattccatagaccaagagttcctcaaggaatacttcccaattgaggtggtcactgaaggcttgctgaacacctaccaggagttgttgggactttcatttgaacaaatgacagatgctcatgtttggaacaagagtgttacactttatactgtgaaggataaagctacaggagaagtattgggacagttctatttggacctctatccaaggtactgaggatcacgttgttggaagggaccttagggattcagctatgcctactttaagactctactcttggccaggcacagtggctcatgcctgtaatcccaacactttgggaggccaaggtgggaggattgcttgaggctaggagttcgagaccagcctgggcaacatagtgaggccctgtctctacaaaaaatttaaaaattaggtcaagtgtggtggctcatgcctgtagtcccagcactttgggaggccgaggcaggtggattgcttgagtctaggacttcaagaccagactgggcaacatggcaaaactctgttgctacaaaaaatacaaaaattagccaggtgtagtggtacatgcctatagtcccaggtac

SEQ ID NO: 115630 - DNA, 1162 bp, Homo sapiens
acctacaaatatgcatgaaattccaaaaggctcacagacccctcgaagccctcaccataatgaatctcaagttaagaactcctgagttatagcagtttccttcttatttgatgatttcacaaggaagcattttggtcttttaatcacatttattaagataatagtgatcttcaaatagggttttcagtgctcttgatgcatgttcgtttttcaggcacagtcctcttatcaacttattatcatatgcttaccatgtattccatcagttctccacaactcattccattgttcccattatttcttacattaattgtgatcttttgagatagtcactttagtactagaaagatcttttcttggtactctgacattttagagctgtctgactcgtgactgaactattaatatatatattgcattcaccagcttagtgtttctctcttgaaacagtagacatattcagttcttaaagttttgcctaacctcatccatgagcacaaatgtgtcatactgatgaataatgtgttggtacaattctttacttggtcatatcttcatgagattatctttgaaaaatctcttcttgtctattaatcctttcagatagcctgtaatattttaagaacttttaaggtcatcacaagtgatcactacttttgtttttcataggcaccgatccatatatttgcaaatttataatttcaaagccttttgtactgacctaaaatggatgatagtgaaaacagagattgacaacttctatgttcactaatacttccagcttacctaagaaacatatagtgaattaaaaatttgccatatgtattcagtacattggttttaagaaatggcagctcagtgtttgagctctccactgtggcagttggcaggtttcatgactagaagggctcgtttgagcttgtcatcgtaatatttaaacatgttggcaagaacatcccgttttcaaacatgtagatgcactagttcaatatgtctgctatctcttcattcaggacgtgagtttcactcgtattacgtttacagggtaggtaggtaattttgaagatagcaatcaagaggtgatatctgtagtatctgttcctgttgcatggctttattgtggtttgagctgtcagtaatcactagcctttgaacttctgta

SEQ ID NO: 115631 - DNA, 1051 bp, Homo sapiens
tgcccttatgtgaccatatacccagaaccctctatcattaccttttctcttccagctgtcaaggtagcagccaaattactgatccctgtggttccaaggaacttgcaagtgtaatagaagcaattcctgcattgtcttctctatacttcctcttattctcaggcttcacagtttggcaggcagccatactactcttatttagacaaaggtgctgggttgaacttagagaaagcatcatcccaacaacttggagttaaaacttgtgatgttgaaaacaattttcagtgttactaaaattctggattcagcagtgctgttattattagatgtcttatgccataaggctggtgttaattccttcctttacactttttcctttcctttcaaatgctctgagtatcatggcacttcctgatcctctgctgtcacagcaataatggacctggctccaaaagccaagaagaatcccttggcccctcaccctcacaccctttgcagatactaaaagatgatttttaaacaaacattttgttccctcctacaatatactatttggggttttttgttggtggcggcgggggatgttcttcaaaaaaaaacccacaaatatttgctctaaaataacacttgccttacaaaatacaggtacccagttattaaaaattaatgctttgggacaacaatcctagtctccaaaaaacttagatcattattatagctatgtgtgatgaagagaaaaagaaattcttttgttgtcccaaagcattaatttttggtaactgggtacttgtattttctaatgtgagtgttactttagagcgaacatttattttaaaaagaaaagaggaagaagaactccccccacaaaaacaatgtataccacggaatacagtgcagccaagaaaaagaacaagatctgaacccagaaggcagaggttgcagtgagccaagattgcaccattgcactccagcctgggcaacaagagtgaaactcatctcaaaaaaaaaataaaaagaacaagatcatgtcctttgtagggacatggatgga

SEQ ID NO: 115632 - DNA, 1038 bp, Homo sapiens
ctagttttgatagcagtaaacccaaagtttttttcagtggtgttttagtctttttctgtttactttttttcccggtatttttgcggtacagggaggtgaaatacaatactgtacttttgaatatatattgaataaatttggtaatcctgttggtaggtatatcctaaatatatattgatgtttagattgcctatgctgtctcacgtaatgaccggaaacccgaggagagagttgattttctttagttcaaagagaaaaaataagttttaaagatcaggatcaaattatttcacaatttgttctttgctacttcagcttcattaagtacatctccaaaggcagtcctttatttattactgtagttttgattttttttttcctccccggggcatggtctcaggagattctttttttttttcattgttggtaagatttgtgaaccatggaataattcttgttaagtcaaactagctttatcaaagaatttaaagtgcataactcatctactttatgattttggaacgtatcattaggctgcaaaagaggttattcttgggcatctgaaagaggtgaacaaaataaatggcattgaacttcagtttccttatatggcttatacttggcttcaaaagcaacaaaaccttaatagagcaagtcccttacagagaattatcgctttatgaagatggttatttattagtaaattttgtataaaaaaagtattgtagcacttgaaaatgactatttaagcctctatttttagatttagttcttgattttttttctcaggagaagagtagtatgtttcgatgcagacaacacgttttatgaagtgaggtgttcacctttgtgtttcttttttttctcctcaacaaggcataatttacttcgtagttttcttggaattctgttagtttatcaccgaattaacttaaattttaggttttatactattgtgaaactataagtattttcgaagctttgtttaaactgtgacaaaggtttgaaaagaggttaatagaggagtcatccgttaaa

SEQ ID NO: 115633 - DNA, 1001 bp, Homo sapiens
tatgatgacctagtctctactgtattggtcatttaaatatatgttcccagcccaatgaatccttcttctggctttggtgattgcttagaagaggaaagggagaaatatttaacgagtttctctttgaaggtatgtgggtagcttgaccttttggtacaggtgcttactgttcctcaggaggcagtctccttttttcataatcacactgtccaagtgtcacatctcctacatacatagagctgtactagaggctttagctacacagtgttttactatggttttgctctctggctgaccgctcaggatatgcttctcttaatccttcttgctaagaaaactcatcttttttggagatcccactttcttcttgttttgggtgtctggttcctcaagtgtattgcattttgttatttccccgaccccagcctactttgtattctttataaattccgttctgttcttatctgtaggtatacccctcccaggttttcagcactgctatagatatttttaaattaaattttaatttttgaaacaatgactgacatatggaaaagtttgaacattttttttcctgaaccatttgactaagttgctaacatgatgccctgtcgtcatccctaaatatatatttttttttatttgagagctctgtcgcccaggctggagtgcagtggcgtgatcttggctcactgcaagctccacctcctggattcacgccagttctcctgcctcagcctcccaagtagctgagactatagacgcccgccaccacgcctggctaattttttgtatttttagtagagatggggtttcaccgtgttagccagggtggtcttgatctcctgatgtcatgatttgcctgccttggcctcccaaagtgctgggactacaggcgtgagccaccgcgcccagcccgtcacccctaaatattttaatgtttatttcctacaaacaaggatattctcctgcatataatgacatcattaccatcaaaatca

SEQ ID NO: 115634 - DNA, 1065 bp, Homo sapiens
taaagtagtgtgtaattcttcatgatctcaagttttaaaaaatagacttaaggctgggtgcagtggctcatgcctgtaatcccagcactttgggaggctgaggcaggcggatcacttgaggtcaggagttcgagaccagcttggccaacatggtgaaactctgtgtctactaaaaatacaaaaattagccgggtgtggttgcgcatgcctgtaattccgcctactcgggaggcttgaactcaggaggcggaggctgtggcgagctgaggtcacgccagtgcactccagcctgggtgacagagcgagactccgtctccaaaaaaaaaaaaaaaaatagactttaagttttttgagtagtttcaggtttacagaaaaattgattaagaagtgtaaaaaattcccaaaccctccttctccatttcccctattattaacatcttgcattcatgcagtatatttgttagaattgataagccaatagtgatacattattattagctaaagtctattgtttatattaggcttcactctttgtgttgtacattctgtgggttttgacaaatgtatacatgtccctgattgttgctgataatggcaacaatctgttcagtagttatagcttatggatgagcgaaatgaattacaggaatgttagaagggatgagaaggaggaattgggaatactctctaatcaggcacttgcattacctaagatcagattacttttttactgacagcatatgtgggaataatgtattactgatgttgaaattacctgtattgaatctttggaagcagatttttaaagttatctcttctttaaaaatgattatcaacatttggtaatccatgttcacaatttctggaaaactgaaatttgaatgttggcgtgttttcattctgagaaatgatttaaatgaaagtagaagctctcccatcattactttttttaagtcattgctctacagctcttagttggcctctttgtgtacatcctgttcatccaagtccaactcaagtaccattatttccactgaaacttccacccaatgtttaaaatttccc

SEQ ID NO: 115635 - DNA, 1034 bp, Homo sapiens
agcagtatctggcacataataagtgctcaataagtattatgtgaatgaaaaaataatattaagataaagaatttaagctgaatgagaaatctgtcgtgaggccttgatacgttcagttaaataacttctgtaattttgaagttggaaatggtgtgtatttttaggtcctctgcagagaccagtgagtagtaaattcagtaggcttagtcaccatagctattttagagcagtgtttcctaaacttttataatttttgtaaacttttgagctcaattaaatgaaaaacaaaaaatcaaggaataccacctcaatgttgaattttcaaaatagtggtacttaaatatctccattcgtaaagctatgtataaagtccttgtttttagactgtggttacagttataacagcacaagttaattgtatataaactataacatttatttaaattttcattaataccaaattcatataacaaatgatgttttgctgaaatttaattggaggttgtatcatgactgattcatttgtgtttgacacatgtatgctgttaagtgccttatgatgttaattttcttgtctttctcttggaactgtcgcaagttttggacaacatgtcatcgtggatttactttgcaagtttgaatctgcatttatagattttctgcttgtgtgattttcccaatagaatgtaaatacaattcagacattaggactcatgttctgtgggatgactgccagacagatggccctaagtataattgaacggtatacctgaaaagtcagaaaacacaggatactcttatttttatatctgttatattttcacataaagaatcattagctttttttttccccccaactttcagacccgttcactggtgctgaatttgaagcagtatattctattaatctgggggaaaaagcaccatagatatactacagagagtccacaaagtctggaataacaggttaaatactgtattatacttctaaaatttttatttttattttttaaagagatgggctctcactatgc

SEQ ID NO: 115636 - DNA, 1035 bp, Homo sapiens
ggtgctgcagaaagctagttgtctgacattttttaccagagagttgttgtaaaaccaagtaaggtttcttataagttgtatatattttaagttaatatctgaaagaaatgcctgctagagtaattactagagtgcttgactatgtcgcattttttaaagctatgtggatggaagagcaattgttatttgtaaatgtataatgtatattaaagatgatatctgaataaagagaatcaagagtgagtgcttttacatttgaatgcaaaagttctataggtcagtgatttccttcctgacttgtgtcccaaaatgtatataaaatgtgtttgattacaacatttcttcttttcttcataaattgccattatgaaaattttattgggaaattggagaaattggctattaagctactagaaaaatgtcagaatccatccataaggcttcatagtttaaaatacaggtttacaaatgtgtatgtgtgtgtaatttgggtgtggaataactaaaaccaaatgttaggacttatgcaacgtgagagaagaaactgaatttgtatactatggttctgcctaaatctccgtagctttttactataacatagtgtgttaaataatggtatatttatatttagacatttcataaatgaaggtgtttcatattcctgcttttatatttaatactggggaattaagtatcttaaattattttccccctcttttagtaattttcatcagggcccacaattttcttcaaacataaggctcatcctgaggttagaaagataaacaagtaatacttgaactggcaaaattatttttccattactaatactctctgtgtaactatgcacttctaattaaagcctctttaaatctgatattgttcatcaatgaacagtttggtttagtaatactaattaaggatggttctaaaatttaaaactttgaaaattaggattgtttcatttagtctaatgcttttgatttgtaattcttacagtggttgttcataggatattaacttttccagttacca

SEQ ID NO: 115637 - DNA, 1031 bp, Homo sapiens
aaaaaaaagcttattattgtgctcattttctgggtcgacactttcttcttcgttgtgattagaagattcttatgtctacagtgttacttctgatttataaagtggctcttccttatcacatacctgaaattctaatgagcagttcccatgttgatcaattcagttctgatcaggctaggctttcttccttttggattatttccttgtgttattctgtaaaggagaatcagtctttggatactgttactcatttacttctctttcgtatgttactttcctcctctgccctcaagaattaaggttctcagcctttcttatcagtcagcagtttttagtctataccacttccacttgcaggcctatatagatttggtgttcgtttttatattggcaccaggcccactgaatttgatctgaggtctaaaccgctgtctttgtagtctctattcacagaaagttttcctttgagatttcaactctatttagcttcctagagcccaatctaatctttcttttctgaattcgttctcctttcagagaagttctgcaatttctgtttgtctgtctgcaacatgattagctctacagaaaaaaaaatcggaaattgttatatctccatgaacaattacttgaccctataaattgtcttatatctcaagtgccctacatctttatatgttatctttatatgtttggacccagtatggtccagtggccattaagtgtttacatgtgtgactaataagctgaatttttaattttatttgatttagcttttaatactaagtgtaaatagccacatgtgtctagtggctaccatactggacatagcagatagaattctttcccattcttaagtgtcctcctaactcagtatcagttgtattcttaaaatgtctagaacaagaaattttgtattcatttttggaatttttaaaatgatctcataagcacataggtaaaatctaaattctcttctggcgattaaaatcttattagatgaactgtttattcttactgataaaatatgc

SEQ ID NO: 115638 - DNA, 1022 bp, Homo sapiens
gactacagtaagaatggattgttttacacagaaagaattgataacactaattatcattttaattttatttattcctaaaattgctataaaattgccaatgtatttgtgtggtgtttgatttttttggtttaattttatcttagagtatgctgcacaattcaaatttttaaaagtcgatttttaaacttttatttcttcaagttaattgctttattacttgtgcaaatataatcttactttgctaatataatcttagcctagttagaattaacctatgtatatacattgtgtacttaataaagttggccctgagaatgttcactaattcagaattggccttttccctcaattaatttgaaatctgttctttatttaagcaagtttttgcaccagtgtgtaaccttaaacacatttaagacatataagttctttagaaaaactatatggccaatatttaattgaaacaaaatatacttggggtaggtgggaattttcatgtggaaacttggacttttcataggaaggttatagggtggttgatccctgatggctggttaagaagacctgaaaatatcttcgcattcccacttcctactcaaaactgcacttaatcatgtccttaatgaagactcatagaactcttactcagaaattaagtaaaattaaataaaaatcttcgtcttattagagtttttcttgttgagtactaagaagcagactcaaagcacagttttttttgtttgtttgtttgagtctcgctctgttgcccaggctggaatgcagtggcgcgatctcggctcactgcaagctccacctcccgggttcaagccattctcctgcctcagcctcccgagtagctgggactacaggtgcccacacctcgcccagctaattttttgtatttttaggagagacggggtttcactctgttagccgggatggtctcatctcctgacctcgtgttccgcctgcctcggcctcccaaagtgctgggattacaggtgtgagccactgcgcccggc

SEQ ID NO: 115639 - DNA, 1035 bp, Homo sapiens
tctttcaagaattatctttggttatttttatatctagaaatatgatattcctaatattgctataaagttgccaatatatttgtgtggttgaattttttggtttaattgtatcgtagagtatgccgtacaattcaaatttttaaaagtcgattttaaaacttgtatttcttcaagttaattgcttttatacttgtgcagataacgtaaaattttgtatttaattttagttgtattgtagccattaaggtaaataatgagactaaataatttctggagtcagtagatttaactagagcaataattgaaattaatgctgtcttttcctacttttcataagacattaatgtgtattgttataattgagggcaattgtccttttaccatatcataattttattgttaaacagcttttcttgagttcatacagatattgttttcctccatttacaatttgtttggaaaggttttggaggacttaacatttctgaagtctagtaacaactgaaaggagaaagttggtttgttgccatgaaacaccttctcaagttatcaccttgtttttttttcactaaacttttttcagtgtactttttcttcttaaatcccagtctctcattatcctatttcaattttccctctcattatcctataccagttaaattgctatatatttaattgttaattgctatatatttaattgttgggatcttttgccacccaaacagcagtgtttttgaaaccgtgcgtggagacccattggtagctcataaaatcaattcagtatgtgtgggcagcattttggaaaaaaaactataaatttggactgcgagaattaggaaatataggacgcttaaattagaattttcaaataaggaataatttgttagtgtaagtgtgtcccataaaactgtgggatatacttgtactaaaaaattatttgttgtttgtctgaaattcaaatttaatggacatcttatacctactcctgcaaccttaattataaaaaatagaaaatagagtgtgttgtatatagcc

SEQ ID NO: 115640 - DNA, 1040 bp, Homo sapiens
atttttcattactccattatgaacagaactatgaatagactgacccagctggaaagactggatttgggaagtaacgaattcacggaagtggtaagttctcatcagtctcactttccctaagttcttatatttaatgaagaacaaaatatgaaaattaatgtatttctcttacaaattggataaaggtttacttttttttcttagttacaagatatgaaatttcttagccagaactttccagacagatagaaaaattaaccagacagatgaacttctgaccacaagtgagcataaaatgtaaaatcaatgagaggtccatggaagagatactaaacaatttttagcataggaagcagaaaatttgagtgattataagtgggaaacatcagtctggaatgcagcaggtaaaagtagttctgaatcagagagagctccatggggtattgcttgttaacttattcagtaataagatacttctctataatgttacttaatagctaaggggaaaatcattgagtgaaacaactgttatttttgaagtggtaatgagaacctttttgtttgtgctttgtatgccaagtgcgctatgaagctgactctaaaaggaaaggagtagtgtttaagtagcttttgtctttagtgagttttccaaaagaactcagaaaataagctagatttttttttttttgaagaggaactcatccagctgagtatcattattaaacttttaaattagtttacaagtttgttgtttaaaagtgtggtagctctcaaatgatggttttaagcctaggaatttctcaaaactgcttgctatagtattgccctgtgggtattatattaatattataaatttcagctgaggtttgaggaggaacatggtactttggagtacctcattctctaaaatacatgctgtgcttcccaaattatttatctgttacgtcctttctcaatatttgttctgtatgaatccgtttccgtattaactatttcaaaaatctcgttcattttaagaatccaacaagctttcaaaatcg

SEQ ID NO: 115641 - DNA, 1021 bp, Homo sapiens
tcagcctcttgagtagttgggactaaaggcacttatcaccacacccagctttttgtatttttagtagagacggagtttcaccatgttggccaggctgttattgaactcctgacttcatgtgatccacccacctcggcctcccaaagtgctgggattacaggcgtgagccaccaagcacaacctcatagctgttcttgaatccttttttttttttttaaggaagatattttcagaacacagtttaggaaacatagaaggattttcaggtaacatgtagagcctagttgaagtattattagtatcagtacacaaatatgagtacaaattaatcactccacaagtttgtggtgatactaatttgctcagcaatgtaatatagagaaagcacacaactggaaggattttgggctgtagttttgccaagacaggtgcaagaaaagaataatgcagcaaagaggtcttggtttgtggcaagaaagtggtttaaataagatacagtgtggtacaaaaggggagtcaaagacaggagtaaatggtgggaagaatgtcaaaaggtcaaaggaatagtagtcttgctgagggtgatcagcaagtactgtgagtgcagtggagtgggagggctgcatgatgtctgtgttaccatactctgctggttgtccttttacctgactgctcctcagtctccttttcagacatatttgttctgcctgtgccttacatgtttgtgcttctcatggttaccctaggctctgctttaatttctccctactttctcctgaaattgctatctgtatcctcattattcttaacaatatcttcagcccagttcttgtgccagagcttcacattcatatagctcaattcctacttaacattgccacctacatgtctcaaattcagcaagcccaaaattgagtataccacgttctgccccaaatatatttcccccacacccctcagcttctttagcttggtaaataatacttgatggaggcagaggcctggaaatgcaacccttaac

SEQ ID NO: 115642 - DNA, 1042 bp, Homo sapiens
tttgtagctaagaaagcaggatattagtggaaatatgagtctgagggtttttattgcatttctttttacattgaagtgaaagttgcctctggaagttggggtaagggcatttcaggaagtggtagtgattaatgtatcataaaatctaagcttaatagagaaggaagtaaaacctagagtgattttacaaggagcaaaagaaaggtagttaaggaaccaaaagtttaccagcaataataaggaattgagtgatttggaagaacaggtgtagtggtcaaagaggtggaaaagtcctgggtatgactatggttgtgaatcatttagctgatgtgcatagggacattgggattgaggacatcaaggaattataaagttgtagtgttggggtggtgggcttatcatcccacattgacatcattcaggatattagcaggtcttaggtggagagaaaatctgtagctaaaatattagagtcctcagtaagtctatacctgggtgatcagtttgagtagcctctagaatggatagaaagggatattacctgatatcctgaatcttcaaagatgtgagatttatactaaagagtagaaagtgtaagtgacgagaatttgacaagaatgagaagcatggtataagttaacttaccttgggcttctgaataaattctggtgtaaagttgctttagaaataatctaacactaattggaatctctgggccaagctggtgattgaaattactgccctggaacaagggagagggaattatatgaattaaaaaatagactttgttggaaactgctgggctgtccttgcctttccaatcataccacaaaagtatgtcagtaggaatttgaatcacattccacatttgttttgaacaaaaacaaatacactacttcattgagtacgtgttaagcaatttaaaaaagcaattataagggaaaaaaaatcttgaatggagtaatgaaaacaaagaaaaggctaaatcaaagaatttcattcccattggtaagatttggtttcatgacatccttaatttggg

SEQ ID NO: 115643 - DNA, 1100 bp, Homo sapiens
gaatgtaattatttgccccttatacaaacttagctgaatctcagaaaatgacaggctgaccttggaaaaatatggctcttggtatgtgagacataaatatacgaatatctgaattttatatatacgtagatgaatagctgaaaaatgtgtatctgtttcaaagctaagtgacacaatttttggcaatattcatactatatatctctaaatggaaatatttgagtctgataaaacttttaaaacattgaaatttactgcaaagtcttattttgtcataaaaccatatttttatcaagcctaaaatgccttcaaagcctatcatctgtcttcacagttatccctatgagcttgatatctaatgtaattcagatgggttacagattaaattttgtttgagattgacattagaaatatttgtacttcatattttacttattttatttctctaggagggaaatttaaaaagatatccaacaccatacccagatgagcttaagaatatggtcaaaactgttcaaaccattgtacatagattaaaagatgaagagaccaatgaagactcaggaagagatttgaaaccacatgaagatcaacaagatataaataaagatgtgggtgtgaaggttagaaaattcaaaaggattaaccaaagcctatttcaagttcttatttttaaatgacagttgatatagtgccccttttcatgtactctgaatgtgcagtcatgcaccacagaatgatatttcggtcgacatgctcacatacatatgatggtggtcctataagagtataaggggctgggcgtggtggctcacacctctaatcccagcactttgggaggccaaggcaagcagatcacttgaggtcaggagtttgagaccagcctggctaacatggtgaaaccccatctcaactaaaagtacaaaaattagctgggcgtggtggtgggcaccagtaatcccagctacttgggaggctgaggcaggagaatcgcttgaacccaggaggcgggggttgcagtgagccgagatcgtaccactgtgctccagcctgggtgacagagtgacactctgtctcaaaaacaaaaaataagagtataa

SEQ ID NO: 115644 - DNA, 1056 bp, Homo sapiens
ttcagaaactttcacaaatccctaaatcgtctgtatattcctttaggactttgccacacacacattattgtatcacagaaacaaaagttttaccatgtcattagagttactgtacagtccacaatgagcagaaaacaattttaaccatccggagttgagtttgctgagctaagtgactcagttgtccacacttacaagccttggcagcttctaagaggaaagtaaccttggctaacttttaaattttaatgtggctcatggatctttgggggccacgtgctcctaaaatgagcattttatctgtgagtgtcacaggtttctatgtttaaagttttcatgtttgagattagtccagaattggaagttggcaaattgcttacaaatttttatctgaacttttaaaatagatataaaacttaaagaatatgagctctttatcttttcttttacttagacctcagaaagtactactacagtaaaaagcaaagttgatgaaagagaaaaatatatgataggaaactctgtacagaagatcagtgaacctgaagctgagattagtcctgggagtttaccagtgactgcaaatatgaaagcctctgagaacttgaagcatattgttaaccatgatgatgtttttgaggtatgattttatgattattctggagcaactataagaactttcaatttaatattttattgttgctaaataaagacctgatactgattgtagaaaatatgttaatgcattcatcattgagaaatttcatatctgcaaaaatatcactcacttgtcactttaaacttacaaattattatgccctttgtattcagatgtttatgcgaattagattatagatagtctaggctactgtaaaatacataattgcttttatttctgtaacttaaaaatgaaaagactactataggcatacccaattatttaacttatttatgcatttatccttgaaagtgaaagattttttggttgaatgtctgagacagtttttagatgtggagtttcttctagtggataaataaaagctggaacttttttta

SEQ ID NO: 115645 - DNA, 1066 bp, Homo sapiens
atgttattaacattttatgttactgaataagtcagagacaatattatgaaataagatcagtagagtagacagggccctgattacgaggctctgaaaagccaagctaagaagtttgaacttaatgttctgtagtgttgaggagccactaaaggcttttaatagagtgttactctaattcatagagctatatatggttgaaagttactatagttgtaagaatattataggagatgcagcacgtgaacatctcagtataaaaaagggaatagaggagcagtatcctaatgtttgattaggataatggtgccatgaaaaggatagaggtacaaattgtacaaacagtcttggaaggactggttgttattttattgccgtatcttgaaaaggtttaatatgtgtttataatatttgttttccctttaaagtcttatgacttaatatttatttatttaaagaaacaaaaatttaatttttatccccctcacccccttttcactaggaatctgaagaactttcttctgatgaagagatgaaaatggcggagatgcgaccaccattaattgaaacctctattaaccagccaaaagtcgtagcacttagtaataacaaaaaaggttagatgttaaaggaaagtgctaagaatagaaattgcctcaataaatttataaatttttttgaaataaatttcattgaatattatgttatttgatacattttagaaacaaatttttagacatggctttctgaaaggttctctttccttctctctcatttttagggaaagtccttgatagtcttttctttctcctcatgcaaatttacttataaaggcatggactttaccgacagataaacttggattgttcatttctgccacttatctgctgtgtaatccttgagttaattttatccatgtgtacatatctgatttgacatacaatgaggctaatgaaggatttttgcatcaaataggctagataatgtatcttttagcacagtaccttatgtatagtaggtgctcgttattttattgattgtatcacaaaacatttttttacactccgtc

SEQ ID NO: 115646 - DNA, 1011 bp, Homo sapiens
tgcagtggcgggatctcggctcactgcaagctccgcctcccgggttcacgccattctcctgcctcagcctcccaagtagctgggactacaggcgcccgccactacgcccggctaatttttttgtatttttagtagagacggggtttcaccgttttagccgggatggcctcgatctcctgacctcgtgatccgcccgcctcggcctcccaaagtgctgggattacaggcgtgagccaccgcgcccggcctaaatcgaattcttaataaccccagcattggttactttttgaaaaattatatcaccatctaaaaattatttaatctttgtattaggactgaattttcaggggtgcttccaattatcaatataatttattacctcatatatagaaccaggatggtataattgccatttgtcatcactgaaaagaatttcacacaattcttggggaatttatcattaatcttaaatttgttttgtttcagatgatacaaaggaaacagattctttatcagatgaagttacacacaatagcaatcagaataacagcaattgttcttctccatctcggatgtctgattcagtttctcttaatactgatagtagtcaagacacctcactctgctctccagtgaaacaaactcatattgatattaattccaaaatcaggtgtgtgaacctcttttacagttttttatttatacaataaatagaagtagtaaggcagataacaaatacataaatatatagggtttaataaatattatagaagtggttccagtaatatgttttatttccccatttttattgctgattttccatttagtttttatacatttccatcttaaattagatttttaaatggggaagaatagactagattctcaatctctggttaaaaagttgaatatttatatatttttagatatggcaacataaacagcatatttgaggtaatttaagttgaaaggagtatttttatagttagaaatgcagaatcattttgaggg

SEQ ID NO: 115647 - DNA, 1246 bp, Homo sapiens
aattaatcttggtattatctatgaattttaattgtattacttgtctccaactgaatataaagctcttttaactattaagataatattttaaaattacatgcttgataataaatgccttttgtctttgacttttattaacttttttaacttgtctacctacacaatttatttattaatgttccctgttactaagaaaactcggctttattatgtttttcataaaattatctttattttaggcaagaagatgaaaattttaacagccttttacaaaatggagatattttaaacagttcaacagaggaaaagttcaaagctcatgataaaaaagattttaacttacctgaatatgatttgaatgttgaagagcgattagttctaattgagaaaagtgttgactcaacagccacagctgatgacactcacaaattagatcatatcaatatgaatcttaataaacttataactaatgatacatttcaaccagagatcatggaaagatcaaaaacacaggatattgtgcttggaacaagctttttaagcattaattctaaagaggaaactgagcacttggaaaatggaaacaagtatcctaatttggaatccgtaaataaggtaaatggacattctgaggaaacttcccagtctcctaataggactgaaccacatgacagtgattgttctgttgacttaggtatttccaaaagcactgaagatctctcccctcagaaaagtggtccagttggatctgttgtgaaatctcatagcataactaatatggagattggagggctaaaaatctatgatattcttagtgataatggacctcagcagccaagtacaaccgttaaaatcacatctgctgttgatggaaaaaatatagtcaggagcaagtctgccacactgttgtatgatcaaccattgcaggtatttactggttcttcctcatcttctgatttaatatcaggaacaaaggcaattttcaagtttgattcaaatcataatcccgaagagccaaatataataagaggccccacaagtggcccacaatctgcacctcaaatatatggtcctccacagtataatatccaatacagtagcagtgctgcagtcaaagacactttgtggcactccaaacaaaatccccaaatagaccatgccagttttcctcctcagctccttcctagatcagagagcacagaaaatcaaagttatgctaaacattctgccaatatgaatttctcta

SEQ ID NO: 115648 - DNA, 1478 bp, Homo sapiens
cagattcctgaaggagattatttatcatacagagagttccactcagcgggaagaactcctccaatgatgccaggatcacagagacccctttctgcacgaacatacagcatagatggtccaaatgcatcaagacctcagagtgctcgaccctctattaatgaaataccagagagaactatgtcagttagtgatttcaattattcacggactagtccttcaaaaagaccaaatgcaagggttggttctgagcattctttattagatcctccaggaaaaagtaaagttcctcgtgactggagagaacaagtacttcgacatattgaagccaaaaagttagaaaaggtaattgaacatgagtttttcattattttctttatgaacttaattattttccttaaaaatgatgaaacaagattctctgaattactgattatctctttatattctaggtgtttttctctggtactgggaatagagttccaaatttaaactcagccaggacaattgggatgataatgtgtgtttctatcctctccttcactccccactgtttctaacaaaaatgtattaattttatatgtttatgtgtctgtctctttgagattgtgcacacatactaaaaatacacgtacctctgttcagcattttctgaactttgctattaataattgttgattatctaaatttaaaaaatagtttactatatagttaagacaataacaaaaaatgtattgcaaatgtaaatatttcatctaatattttttccccagtccacagtatatgaactaacattgtcactgacacagatggcttctggcatggcatttattcttaacttttctgaatttctacatttctgacctacttaaactcagttaagtgtttctgtggctctagtgttgcttagcaatagttgattaaataactaatgctcgtgttcaatttataattttatgtgtagatgttcatcttttgaaaggagttaaaaatgtagatacagatatatatccttgtaaaaccaatatgaatgccatagtcatatggcccaagtgtacaagacatgatttttctttaagatttaactttatacttactcactagattttacccaagcattatctttctttctttattaaatataaaatgtgttcttaaaaacaggtgaacatacaacttcaattagccatttttaaaaattccttaaataaaattttcagaaatgcctaaaatatattagtacctcatatcagtttacatgaaatctcagcctataattgttctttttagtgcagtcctcaactttaaatgaactttaaataggtaaatatccacaagcattaggctacttcattctcatctatgcattttatttcatctagtaactctgtacacactgttgaggctatttgaacttttgtgctttttctaaggcacttggaaatttcttaagcagaagagtaacataggtgtgttttata

SEQ ID NO: 115649 - DNA, 1001 bp, Homo sapiens
gagtctacctcttaaaaaaaaaaaaaatttttgaagtggtattttttgcaaatatattttgtgttatgtatatttaaacactcagtttgtttaatatgttagaatttgcataaaatgaagtagattctctaaaaattcatttgacttagaattactgggtgttggtaaaatttatctttatatagagaaattaatttctgttctgtatatgactttagatacacatacatcagcatatggcgtcaactcctattttctgacatatatatctaagatgtgttaggagtaaaggaaatagcattctaaaagcagttatatgtctgtactttcttcctttgcttaaacatgtgaatggttgtatttacgtgtaatttgtgtatatgtatatgttgtcatataaatacatggtaaatggttccaatttctttcactaatgaaaattagtgttgcatgatacttctctggttttggggttacttgtaaataagtctacgtatataacatgtctcgtggattttgcatgctacactaatctctgttaaatctatcccctctttattcagagcatgctgtcaaggtcctttaattccaattttactactgtaagcagttttcactgtggcagctctagggatctgcatggcagccagggcagtcttgccttgagtgttgcagacagaagaggttctggtgggcacatttttcgagtgagtacctacactagaccaatacttttagcttgtagaagagaaaaccccaaattttaagtgttttaatgtttccaggaaaaaaaatgtttactctgggttagaaaccttgatttcctctgagttcttccatggcttagttctaaatctttcttcagagctgataaattcattatctcctgagtttctttggtcataaactaatgatgtagtcagcccttgtttatgcaaaaaagtgaacaataggaataactgagagatcttcaaaaactattctttgtagtatgttttctc

SEQ ID NO: 115650 - DNA, 2044 bp, Homo sapiens
ttgaacatggacaagcagtgtccttgctaaaaactttccagaatacagttgaactcatcattgtacgagaagtttcctcataagcactgtggacaaaaaaagcggggaagacagcaagatttattggaagatacttacaggggaaattaatattttgactatttttatatataaagaagaactcaaaaaattatgttcaaatttgtacattaatgaaataatggaacttgtggttagagggaaagaaccactgtacagaatataaaggagactgttgaattcataccatataaaacttgttaggtttttaaacatagcaatcaaggctacaaaaacaaacctgtgttgtttttgtatagattgtaggtttatttttggatttcatatacatgactgaactgtgtgcaaggcaatagttagccttgattttagcccagagacagatggcagagctatctctctcatagcttttatgcccttatttttattcaactggtattaatgtttttctcctgaaactactttttttgatgtgggcaagagatttgaagtgttggcttttgctatgtgcatattgaattgaagagtgagtaggtgaaggtggtgctggtgggttcactttccaaggccagactaaaacagttattttctataaaaatctggaagcaaagaatggggatggggagagctacgtggtagtatgtttttattaggagaataatgcaataaaatatgtaatgtcttttttataaagcaaaaaagacaataattgcatttatgagctcggcaggatctgttcttgtcatagccattgactatacatttgctactggtgattcagtttttaattttttagtcacaggaaatttttaactctactgtagatgcatgtccatgcattttctgtgttatggaaatccactgatttttttttttttttcaaatggtggtacttgcaatctgttttataattagtgctccatttaaatctaatttataatttttattttaagcagcaaatgaaacaaaaatggccagttttaagattgtgttgcctgtaacacaaaatgttacgaaggtttaggaaagcctctttgatttttgtttggccttgcattgccttggtaaagtaaaaggaaacagtacacttggagctaggaaaccaaagcaagctttgtgaaactggcacagtgatagagaattgctgtggagagttatagagcaaagggatgggtccttgaggcctgccagtgtgtaaaggtgttcaaataaagggctgtttctacaggtaacattaaatgtgaactcaacacttccagagtctttaaagggtttctatgtgtatcagtgtaatagtgttttaccaccaactgcctttctttgttcctagttactgtaacaaatatttgatgatagaggtttattaattttgtttatccagaccattaattttatttgtttttgttctatgtaatcaaataaaatttgagtaacatgtaatggtaaggattaatgcatggttatttggaccagaaaaaagtgccatagaagaccaataactgtttagttgaggctagtctggaacctttcattagagcaatatttggttattgcacttcatttttatttactaagaaatgcaatttgggaatttttaatctgttatgctttgtttatcaaccttgattttaattaagacttttataagactagcttaaaacaccaaccaacattatttttgcaaaagtgagttggactcactttccattcttgctagtcagagtaagtaggcagcacttttaaaaatatgtgaactcaaatattgcacttctttcaagatgttatcaattggttattgtactgtatagttttaataattttgattgaaaccctttaacaactctttgtaaattttaactcattttagttgattttcagtactatttacataggaattgatttttatggatatagtagaagaaatgtgctgtattttgataaaattcacttattgtatgtgtgttgtaatctaaaaaaaaaaaga

SEQ ID NO: 115651 - DNA, 1003 bp, Homo sapiens
tgtaaccactaaagccactttatagaaaatagagaaaaggaaacagcacttgtgatcccaccactctatcaaagcttctctccatttccctgtagtccttttcacatgcgttaataaatattggacatattacctcattggttttaaaaataattgtatagtgctatcattatgtaatatatgtaatatagcgtaatcaaaggaatcacactgttattttacttttttcactttgtcataagcattttccatattgctgtcttatttatagtaatatttagagattagtaatttctgagtgtattgtgtgtttttgaaattctattgttggatattttgattgctttttttggtattacaaattagtggattttagctagaaattgggaggtgtgtctttttgattgtcaacaatgattagagggcctgttggcatttagtgggtaaatgttagcaacttataagtagtcttaaacaggatgaattgtgctaatccatagggccactgaagcccagtgaagaaaccctgttataaataatgcaccaactaatatttttgtacatgatactgtatgcttcgctcatgttttggcatatcttttttggtaggtcctctgtcctctaaaggatgtgtattaatgtactgataaaatactggacatattattacctcattggttttaaaaatattgtatagtgctatcattatgtttaataaaagacaaaataaccagttagggccaagaaatttaattgatgcccaaaaagttggttctttggtttctgcgtgtactacccactgaaaagttttaattttttttgaaaaattgataagattttgtattttaaaaaaccaaaactttaagtcaacgaatgaggtcaaactaaaatctgctaaatttgggtactgctattttcttcttaaaatttatttctaaaattttatttatttatttagttaagtagagacaggatttcaccatgttgcgcaggctggactcaa

SEQ ID NO: 115652 - DNA, 5114 bp, Homo sapiens
ttcaagtgatctctctttttttagtgtgaaaaatcttaaatgtttcaaatagattttaatataaaatctatgttacagattacgtatgtacttagttcggtcttttttttcctgctaaagacaattacagattttaatgaaaagtaattatggataggctgacaaaatgattatccatgaggatagtatattttcgaatctaacaggatgtattcattttaggaaaagttcctttcatttgtgctttgtctggttcatttttagtatcggcctgcctggattaaactgaatcaagtaggaccagttagagtctttgttgcctataaaatatgtaagattttgtttgtaaaatcttttgtctggaaaatcatcactgtccagctctggtgtatgcaaaatacctcaatttaaattccatactacctgactctttctaagactgttgtgaagttttttagtgatgtaaatgcttgggaaacacatttaggaagagttggaatgatgataaaatttgaaatcttgaggtttggagcttttataaagggatttttgcttacatatgatacactttttgagttaatttttgggttaaattagctttttttacattcactcggattaaggattgattaatttgagttccaagttttacaagtaaggcagtaggcctgcctggattgccttctgttgtggtagacaaatcaccattaaatgactaagtttcactgttttatgtgttaatgatccttaataacaaaaagttttaaagtcttaatttcgtaagattatgtaaaggttaagaaagaaattttaagtgaaaatgataaaaccaagcaaatgtttattagttcaattgtttttctttttatcttgcagcaacgcacctcttgctttttcctccaaagtatgttatgttaagtttcgtgatccatcaagtgttggcgtggcccagcatctaactaacacggtttttattgacagagctctgatagttgttccttgtgcagaaggttggtatctcgctttttttcctcttatttgaatttctgtcctgtctgttattgcctttagctttcctagagattggcaagtagacagtactcttggtgtgtgtgtgaaagtaagaatgaaatttggaggaggtaaacctttttacctaatagtaatattaaaatggttaatttatgacatgtacatttgaggttttacaatttaacattcattggcttctggtttgctttggctttctgtagtcaatttgcagattgcaaagaaagctttctgaaattaaaaaataattgatatgggaaattattttaaatgcataaacaagcatttaccttgtgtgttcaatattaatactattacaaatgaaaatagtgtacacattttggcaaattggggttaagtgatatttataagaaaatatttgtaatttatactttcaagtacactcttaaggtaatttaccttaattgttactatgagatcattattttatattcaatgtaattgtttgctttgcaactggaatttaatgttttcttttactggccccaaaaaggggcaggaggagtgttggaaaaaaaggaaagcaattttccaaagcctccatgaaggaagtagttgttgaagataggaacaaaggccttaaagtatccattaaattttatgacctaaactgctttaagaactaattattactaatattttttagtaacttctgtttacagagccactcacgtataatagactgtgctgaattttgacacttctggtgtataattaacttttattcagagcactgactagcatgtgtacaggattttagaattgggttattataaattaaaatgtcttaaagtagattttctctggtggatgattgaaactgttttaaacataaaggtttatggaaaacagtttgatgggctttcatatgtaatttttaaaacctcttttagtggccaggctgacattaaaataatatataataagcagtttgctgcactttaaaggttttatgcttatttcagaatgcctgttctgggatgtcaaaaacattacagtctaatacagtgagtaccaggctcgtattttttaagtcccagaataggacattctcagtatttttcagataaatttggaagtgtctttcccatgcttgggggttagagtgggtagggaagataaaaatggattaaagttaattattggccaaatgtatctttatctgctgatctgtaaggctacagtaagccccaaattggtgaggtgggaaaggagctggtgaatggtttcgttctacaaactttgtagtgaaatttcatactgagaaactgcatgggaaaaaagaaatcaggtaaaaggtttattaaactggaatattaattatatcagaaaattaataccaccaataacactgggtcttttattgtgttagcttattactgaattggaaggaagaattttatcagtgttgcttggttgaaacctgctttattcccatagaatctttcatatatctgagaagccctactgtattttgttataaatgttcaagatgatgggcgtgtagatgtcccttttattgtttattttacttgatagagatgaataaatgcacagtcagatgtacctttttagtgtttttaatattacaacttggacagttttactgtttttgaacagaaaaatttaagcatacttttattgcaatttagttataagtaagtaaatattttgaaacactaacctacagttggtattggtgaaacattcagatatacgtttttcattagttgtattaaatacggcagagatgaatttatggaacctcgagaatttcacagtgagctgttaaaatactgattatgcactacaagcaaagaaatagtgcattattgtactaaaaaagatagcagagtgagtgtgaaataaccaaagaaaagtattccagtggagtaagttctgtaagaggagatgtgctgtggtgctgtaagcaagcagtgttctgttgacctcactgaatgcatcctttccttgatgttgaacaaacagcatcatgacataagtgagaaaaaccatagaaaaaaatttaagaagttttttcagtttctttgaattgctgttttttagtgtagacagtaatgtgagaagatcctaagttgtaaaagtaacatttgatgtgtaacagtttcatgcatattaagccttagcctttgttaataaaacatgccatttcaaaataaaatatgctttcattatacttgtccaaatatgacctctttttgttgttgcgtgcatttcagatttctttttataaatgttaacacgtagaaaaagatacggtcaaacataacaagggtgtcagcctaatcatcagtcataactttatgtccacattttctggtagatggattttgactattaatttggttttgtatgttttctctatgtgatatttgtgcattattagatgactagactggccaaggcagacctgttacacttgcctgagttaggcattgtttgccatgccactaaacctgccgtcaagtgaaaccttcattggggaaatgagatcggagtctgaaccgcagaagatggacgccctgtctctgttttttattgttttactttaatttcatttctttttctttattttgtccctttttttgtttttgtttttgtttttgttttgttaaatctctttcactttaacttgtgagctggttttcccagttctttgtaaatggtatttcattaagggttcataacgtgttgcaaattatattgggagatgattagtagagctcaaccttaagataaagcaaattttcatgtggtaaattaggatacagtgttgtgaagctcattgtgagtcttaatttgtgtgtatggactcataaggtacattttattcttgaaacattaaaacactgataagtatctcaggaacactttctgatctcagcgcaacatttttctagtttttttcccccctagtctacatctctcataaaaactgatagcttctaatttttgtccttccccctggaattttaggcatacaaaatcatcaaggaaaataagtaaatataacaatctgggagtaaagaagagcctttcatttttatgatggttatttatcatataacttatttccttgacttatgaagactttttgttgcctatgtggggaatggatatttgagaaacttaagtatttgcatgtaggtttttgttagcttgaattttttgttgaatatttttcagaggttactagcttctaaatggattctgagattaggactataatactgtgagagatgttttcctcagttgactttgaggagtatagtttgggaaaaatgctaaatgcttatttgttttatacttttataagctctgttatttggagggtaaatttggtagaattctatcttggaaattaagcaatggagctttttcttaaagtacttttgccattacctttaggtaattagaataagtatatagagtaattagaatggtaattgaaagttaatttattaaaaaatgtgcttatagtggatttatacatttatagtagtatactatatttatagtagtatactcttttgaaaggcagtgggagagtttgacaacctactgatacttaagctgaaagtgaaagacttcataatactaagtagtcaacttttggccagtgttgaataccctttttgtttgtatagtctttctacaatgtcttcaataggtagttttacttattaaaggacaagtaatattaaatttgggacattactagattagaactctgagtttccttaggtgcatacattaaggtagtgacgatggagtttctgcctcaaaacctcaatttatcaagaatgttcaggttttacaaaccttttgagataataccaatttataacagataaaacaggtgaaatcaatataaatagtatagtgtatatgtgggtatatataaatacatgtgttaataccaataactaatacatataaagcagattattgttatttgatgttttcagtaaggcctacctgccttttgttgatgcatgttaagaaatctgttctccagaatt

SEQ ID NO: 115653 - DNA, 1228 bp, Homo sapiens
acatgtagtcaactatttaagaattttttttttttttttttgcctaaggggataaggaaaaataatgtgaaagttgcagtccttatcagaagtaattgattagaattcagcaatgaatatgccaaatcgtacttatttcagagtaagtttttcatttttttaggttgtagggagtttttttcctactgagtgttattagattattttaatgttactattgttattaggcaattaaaatgtttttaagcaagctttaaggcattaacctcccccttcagataagtatacataaattggttctaaaagttaataagaagttttctgaaaccagggaactttttttttcctgaaacatttttagtagtttcccaaggcatattttttggaactgagttcttttaggcatctctgatgttggtgagatgctttattaactgaatggatgtaggcttccttttacgttgaagttgattacatggagtaagtttttgttttctatttgaaattaaatggaatctgttggagggttatcaaaattgtttgcatcacaaataggtagtttcagtaacaggataggggcactcattaagaaatttcaattcgcacatatttgttttttctttttcttttttttgactaatttggttatttgccatttctggggattaaactttaaaaaatgttcttcttttctgtatctgatgttctgtgtgctattagtgatgcagccaacacgaacggttgtcatgtgtaacacaactttcgatcaccgcgaaaacaccgtcctgggaaagcgtccatgcttgatatcgtttggttcatgaacattaagtttccagtacaggtgacccatagctcaaagtgttaaataattgtctacattattcaatttttaaaataatattccattaatgagattgttaatatttgaagttttgctcacttttatttttcctagtagagcaggataaaaggaaagacttaagttcttatttatttctttatacagatctgatagatagattcatttattattattattttttaactgcaagggtaattgtaaaatcatagtgtaaagtttgtgtggtgtttctgctttttgtaatgtttggaacttgcctctgcaggtaaaatcccagaggaatccaaagccctctctttattggctcctgctccaaccatgacaagtctgatgcctggtgcaggattgcttccaataccgacc

SEQ ID NO: 115654 - DNA, 1263 bp, Homo sapiens
gtgaaaacatggcaaaatatttttccattaactatgcagaattaaatcataatttagtaatgcttcctttgtgatttccaagtgggattaaaaaaggatattacggccaggcgcggtggctcatgcctgtaatcccagcactttgggaggccgaggcaggtggatcatgaggtcgggagatcgagaccatcctggctaacacagtgaaaccccgtctccactaaaaatacaaaaacttctctgggcgtggtggcgggtgcccgtagtcccagctgctcgggaggccgaggctggagaatggcgtgagcctgggaggcggagcttgcagtgagcgaagattgcgccactgcactccagcctgggcgacagagggagagtctcaaaaaaaaaaaaagggtatattactattactggttcttggtttttgcttaaaaaactctggccatatttattttaaaagaagtgccatttttcttcaaaagacaacatagaacaaaatacaaagcttgccttaattggaagttgaatctagctttgtggtgttggataggaattgaactaagaaatgaactatgtgattgtagttaatttatctagattgtaagagtggtttctgaaattttgaagtgcaaaattttagatttgtagtttttacataacattgctatgctgaagacctgcattctgattcttggggggaaatgttttttaattgaacttatgtgttcaaggaacagaatggtggtcagtatggttgaagcatagtgagtgagggtcatgagtgtttgagattggaggggatagataggacacagattatggtagggctttttagaccatggaaagaggggtttgagttttattcttaaggtaattagaaaccattgatgggttttaagcagggatatgacatgatttgacatgttttaaaaagatcagactggctgctgtgataagtgacattgatttcataaacttccgttttcaccattagcaagtgccattacttaacagttgttaaaatcttagttctgtatcatatttgtatatatagtcattaatggtcaaaatgttctctaatagtataagtggaaatgaaaagagttgtgcttttttccttgaaagctcttttcgttctgaaaaattttttctgttttcaaattctgagatcttacatttcttctagtttacattcatattaaaaataatacgttccttaatgctgaaagtaaaaactgaatttagtgatgctatagaaagatc

SEQ ID NO: 115655 - DNA, 1991 bp, Homo sapiens
atattttagatatattttcttaggtaaactttcagcatgataataataacccatttcttagggttgatatgaggattaagttactacctcagttaaattcgatgctatgataattgttgactgttaggaactcatactcatactcatctgtgtttttcaatgaccaaggtacagttgattctcattctttgtgaattctgtatttttgaattcacttagtaagtaaaatttttttgaaatccccacatcaacagttggagcacttttgtggtcgttcgtggacatacacagagtggtgaaaaattggggtttgtctatttgcacggaggtcgaaatcttcttgttttggcactcaggcagtaaacaagcacgcagtctgtttagtgctatgttctttgaattgttgtgctttttgttggtgatttcactgttaagatgggcccacaagtgtagtgccaaactgctgtgtagtgttcctaagtacagggagattgtgaagtgcctcatggagaaaatattaaatacatgtattagataagcttcattcaggcctgaattgtagcgctgctggctgtaagttcagtgttaatgaatcgacaatatataacagctaaggtgtctttaaacagaagaacatataaaataaggttaaatattttactagttaatgtaaatgtgaccagaggcttgtaggaacttcaccctgtattttccctaggaataatggttcaatattcaataattcattgttcacggaaactatagaacatagctatgtcaggtaatgagaaacagcctgtcttttagggtcaagtttaaaagtggctaaaatatccagacagtaaaatatatttcaaattacatttaaaactaatgtgaccttactttaataactcagacatatatatgactgaaagttcggagtccctagtctcctttcattcttgttgagttagttcattcttttcaagattagagaatggtatctttggatactaatagaaaatatgtgttctgtgtgttttttttcttctttcgatagcttggtgtttcacttagcagtttgggagctataccagcagcagcactagaccccaacattgcaacacttggagagataccacagccaccacttatgggaaacgtggatccttccaaaatagatgaaattaggagaacggtttatgttggaaatctgaattcccaggtaactaattaaagaagaaacaaagcagcagtagcccttattctttttctcttcttaaaaatcatatcagtggatacagtaatatttatctgattttttaaatggatatattttatcaaagtgtcactttgttcccttagacaacgacagctgatcaactacttgaattttttaaacaagttggagaagtgaagtttgtgcggatggcaggtgatgagactcagccaactcggtttgcttttgtggaatttgcagaccaaaattctgtaccaagggcccttgcttttaatggagttatgtttggagacaggccactgaagtaagaaatcctaaacaaagaaattttaatgattttgaaacatttaaagtatttttgatgtaatgaaggctttttttttctttttaatagtaattggcaatttgtggaaaggaagactttgtgttaagtataaatgaaatacatgagatacttaccattttagtctttaaattcctttatttagagacatttattttctcattttctgttttctagggtctaattcagtgttaacattatttatataccctgcataacggttgtaggtctttttccataaactttaatagtcaggttggttttacattatgacactagactaattgagcaacttaacaggtgggttgaactacagtacttccagtaacaactgtggtaaattcaaaatctacagaaggaaattataagtgcccagaaatgttttaaaccagaaattttgacttttgaggtttgcttacatccttg

SEQ ID NO: 115656 - DNA, 2581 bp, Homo sapiens
caggtagcttacccttcttctagagtgtacaggatatcagtaagatcttttgatttgaaaatagaaatgattcattttcatattggtatcaacattttaatttattttaattctaagctatggaaaagcacttcatctagtctgtttgaattaagttagctagggttcaatttttcttttctccctgcttttggttgtattcgcaaggaatgataggaagtggggatgagagattaatcatggttttgaggttgcttttggttattctgtatatcattcttacgtgcttctgagatgtcctcacgtttataaatatgtgtatcatataaatgtttgtttcatgttttataaaatgtggtgtgtatttgtgatatgctaatatttttaatttagaataaatcactccaacaatgcaatagtaaaaccccctgagatgacacctcaggctgcagctaaggagttagaagaagtaatgaagcgagtacgagaagctcagtcatttatctcagcagctattgaaccaggtaagtacataacgttgttacataggtcatagtttaaagatcatagactcttagaactggaaggaattttagaaatcatcttgttcagtcacttcattttacaaacaagaagactgaaactcaagaaatagtaagtagcatactcatgtcaaagaacaacttagcccatattttatctctttctgtgatactgaattgaggcactttagtctgagctaatcagctctgtattttcatagcaaaatcagtgctcacaagtgatttgctgaaagcaaaaatgttattgcaaggctaaaaagagtacatatatttaaaacgttacgactcagcaggtttacttttcctcaacattttaattttagaagtagagaagagagcccgtgatttagaaaaaaatacagatactgtattttagtaaggtaaaagaacatctatttaaacttttgtgttgctaatgaaaataattaaaaaacccattctaaaaacatctaggtggtttacatttgagcagattttctaaatcaacacttagaatttaagcttcaaattctagcagaataagtggagaaaggacttaaaatcactgtcacaggaattacagacatgttgtaatcgtacgttacggcagcaacaaaatattacgaacagctgtttataatcatctggtttatatgtactgctgcagggtggctgcactcaacgagtttatgcaatgactttcttggatgtttctgaaggaggaggatgtacagagagtaggccccttgcactatatgtggtacattccacttgtgcctgattattaactgggatctttaattgttctgagcttacactgcaaagtgattttttcctcccagagtctggaaagagcaatgaaagaaaaggcggtcgatctcgttcccatactcgctcaaaatccaggtctagctcaaaatcccattctagaaggaaaagatcacaatcaaaacacaggtgagaatttctgctgtcatatttaaattttattttagttttgtatttaaaatattaagattttatgagttttcgtcaaaatatcagaagttagaaattttagtagtgtacacctgaagtgtggttacctttaaatattgttctaattgtaatactgtagttgagaatgaaattttgtctaatgatacttaatttttaaatatttgaacttatctttatttttagaagttagttttgtgtctaaagatactctattccagatttttctaagagtaaactagtctttatatagaagtgacaaaagctgttttcattcttcatattgagaaaagggaacatccttagtgaccatgctgaaaataattgctcaagttgcagcttttttgttttgttttcccagtctattccaagtttggggagcaccaccccagatctttcacgcaattccctattttcagtaccacgtatccaaaggaacactttgagtccttggtattgctggtgataagagcctcctctgcccacttttggacctgaaacacaggagtaacttgcagtttcagcttcagttttagtactttgcttaagctctgtttatcttatttttgatcatagctttgtccttttgattttctttatctgtcatttctttgtctttggtataaaggggaccttaaaatgcaaatttggcaataccatcctaattggaagtaccctaaagatcattactaaagttacaaattttgttgtctattttaaggtacggagggggctgtttttgaaatgtgaaagtatgtatagtggatcctaattgcatgttatgtgtacatacgtactcctatgtatgtcttgagagagcagggagggaagagtgtatctgtgtatgttgggattttaaagaaggagaaaggatttgggggagggaaaaggaaccagtttgttgtacattgttttaccagcaggctcagtttactttgtttttgtgtgtgtgtgtgttgatcaaggagattcaaagaatgaggaaaaataggatgttctttcttagattctagtaaacaagtatacaccagatatactagtgt

SEQ ID NO: 115657 - DNA, 3485 bp, Homo sapiens
tcagctcattgcaacctctgccccccgggttcagttgattctcccacctcagcttcctcagtaactgggaatacaggtgcatgccaccatacccagctaatttttgtatttttagtagagacgggtttcactatgtttggcaaggctgatcttgaaatcctgacctcaaggcaggtggacctcaagtaccacctgcctcggcctcccagagtgctgggattacaggtgtgagccactgtgcccagcccaactatatttcttttactgataattgttctaaatttattaaaacatgactatcaagatgagttttagctgtataaaggatacttatagaagttcattcagcttccttggaatacgtacataaggatataaagtttacatttatgttaacttttaatgatgatgacattgagagttaagatttttaaacatttattttgtgctagagaatactacgcagttttacatacatcatcagttgtaatcctcatgacagccctaagagatgcaggtatgattgctactccactttatagaggaagaaactcaggcttggagaggttaagtgactagccagagttctcacaggtagcgtgtggcagagctgactttcagagccagattgtcagactccaaagctgttgagtctaatcactttgctatttaagttgtgtacatctgttttgttacaatttaataagcagttaggatacctcgttatgaaaaaaatcacattctcaaaaaactttttcagtgagaaagggggcctagtccaaattggaataacagttacttttcctgcaattaaacgtttcctgcagttaacagtttcttttcatacaggttgagactcacaaatttgaaaatctgaaattcaaaaggcttcaaaactttttgagcgctttcgtgatgctcaaaggaaatgctcactggagcattttggatttttcagttgtgtgtttgggatgctcaaccagttttatgcgtgtgtatatatagaatgcaaatattcgaaaatctccaaaaatgtgaaattcaaaacacttttggttccaagcatttcacataagggatactcaactggtagctatgattatagttacagctataaaatcaaggcattgcaaatccaatatttgattatatctagttttaacttatgagtaatgatttttattttcctgtcacagtggcgctgtcattaggactgtgcttccttttatatattctttttgtttgttatgacagacagcacacattcacaggaactactcaaccacgtaaccactactccctgtcatgatgtgttatgaccagattacatgcaagtcaacagggaaaaatcttctatactgatttgaggcataaaatgactagcaaaagccacatctgaaaatatacgaaataactgttaaattctttgtttctgtctctgttctagacaatgaaatatccggtaaagtttccagtaaatgtatttcagattatgtaactaaagtattatttaagagaaatttttaaaatattgttaaatactgttaggatagattttaaattttcttgtttgaaagatcgtaaattaagttttgatattctaacaattttttttctttaggagtagatcccataatagatcacgttcaagacagaaagacagacgtagatctaagagcccacataaaaaacgctctaaatcaagggagagacggaagtcaaggagtcgttcgcattcacggtgagttttagagaaattaacaataatttttttttcctcagagttctgttagtgctaagggataatattttaattggcttcatttgttaaaaatctgttgtggtttaggtttttaatgagagaaattaaaccttttttattgttttagtaatctaggattaatattgattgccagtgatctgaatctgatgtcagtgtgactcatgaggtttccaaactactcagttcagcttgcgtagtatgaatagctttgtttagcagcttcttgtacacctgagctatataaaaatgtatatgtaaatgtctgtaggtactataaattgtcttgtgttggtaattgttgaagagagagaggtctttttggaggaggtagaactattttagttatgaatttatttatttttgtttttaaagggacaagagaaaagacactcgagaaaagatcaaggaaaaggaaagagtgaaagagaaagacagggaaaaggagagagagagggaaaaggaacgtgaaaaagaaaaggaacggggtaaaaacaaagaccgggacaaggaacgggaaaaggaccgggaaaaagacaaggaaaaggacagagagagagaacgggaaaaagagcatgagaaggatcgagacaaagagaaggaaaaggaacaggacaaagaaaaggaacgagaaaaagacagatccaaagagatagatgaaaaaagaaagaaggataaaaaatccagaacaccacccaggagttacaatgcatcgcgaagatctcgtagttccagcaggtttgataatgcttaaaatttttacaaagggatttgctgatgacaattggaaacaaaattttttacggagggagaaaaggttactgtacgcaagtggaacctgtaaagtaatataagaacattttctcctaatttcagagtaaacatttctctagcagagtggggaaagagatgatactgggcaacattatttgaagagttttagctattctttgtaaccactattttaatagaataataataattgttattttcttagagggtgggatggcagggaaaggtactttttttaaaaagcacattaagaatttgcgtcttaggctttttcctgaactttttttgaatggtgtgattaattttaatatgtaaaatgattgctgaagttgcagtgttagccctctttgtcacctaagttaatttttatccttattttgttaagtgcataacatttaaattttggtcgtgttttattttgtcagttttaagggttagagtttttccttaggaccgtgatttcagtttattaatagctttactaccaccaggtggcagcaagttgccatagtaacagctgtacaatgagaacaacttttgagatttaagattatctaaacccacatcctttacttcagatgataccatgactgtaaatggaagttcctaacttatactacactatcttaaaaatactaaatatatatattagcaaatttttgaagatttttaaagatggttttttaatagaaaataatttgagataaaggaatatatgtttcccatttttaaaacttgtgctttagtagtttatttttaataccagcctttgactagataataaaagataatcgtagacatttattgtgcactttactgtatgccagacatgatgtcagtagactttttcatgtctcaccttatttaatcctcacaacaggcctgggagaagattattatcatcactgtttta

SEQ ID NO: 115658 - DNA, 1041 bp, Homo sapiens
cattcaccctgtgtaattgaccaatcatttgattgtctttcctttgtttctctttgcgaaatgaggcggatacatattcatttggttttattttctccttattgcagtacataaacaaatattgaatattcgaaaactattaaataggctatgccaaatagtgttttatgagaacatatggtggcctctgccaaaatgacttgtgtatccttaagaaactaactggggtaagggtggggtaggtcaggttgtagggctcatttatgttactttgcaaaccagcttactgttgatgcttattaacaatgcattattttagatatccagtgttagaaaaggatattttgtcaagaatataatagatcttacaatttcttagaatttaactgacatatcaatattcttatagcagaaataagaaggataaaaagagagaaaaagaaagggaccacatcagtgaaagaagagagagagaacgttcaacgtctatgagaaagagttctaatgatagagatgggaaggagaagttggagaagaacagtacttcacttaaagtaagcagcagtcattcggtgtctggcacttgaaatggttctttattgcatacaaatggttttagactgaaagctctttggggaacagtgtcttgtacattgttggcattttatggcattttaaaatatttaaaatatttaattggtaatttaaaaaaactaaatgttgaagagataagagccaattaaaactaaaaaaactaagttaaatcctaacatggcatgcaataagaaaaatttaagaaatcaacagtaacaaatgtatttgattttatgtagataggatttctgcctgatgccattttcctcaatttatgtttcagcaagtttgaaaagactttgtgtagttaacattaggtttgttgggttagaatacctaatggaaaaccacattccaccaagtgagcttttttgtcacttggataaatacttcaagtagttgtgaattaagttacttacactggtaaagtatatttgtatttggaaa

SEQ ID NO: 115659 - DNA, 3515 bp, Homo sapiens
atatgggaggttattggttttatgtttaaggatacgtttacttgagtttaagatacaggtcatccatcattcttaggctcactttttacagaaagtatgcaaatagtaaagtgacagcactgctaatgtttttccccagtactataacttgtggtttctgaactcattattgttgtatttccaaaaaagtaataccttttaattagtgtattaaaagttaagtataattattttaatgcaatctaatacaatcagattactcagttgccttacctcatgggaagagttacttttttagatctaaaaagctgaatagcatgttagttacttggtttcaacttgagttttcttttaatgttaataagattgaaactttagtatttagtggggaatggaaagagttgcccttgttgcaagtaatgaagcctgatttgattatgaagctgcttaatcactcttcatgtgttcagaattactgttttttttgtttgtttttcctttttgtcactgtgtacattaaaattttggaagatgctttactatgtaaagtatagatggtcattttaatcattcagccacatacggttggctggtaaacagcttattctgatacaagaatgcttgggtgcatatggaaagattgtgaaagagtgtgtcttgcatcaacagctgtcttatttatgatatataagtagaaatagagcaaatgttggaatctgttatttttagtaccatgtctttaataaagctaagtattttagaggaaaatgtttgtttatgcatttcaaaaaagcattttagttttatcctgctcattttagttgtcatagagattgttgtgacgtggagagtgcatgtttgtgtggtgtctataaaacaagtcatttaaagtatgagtgttttcttgtactctggacctattacatgtttctttatgttggtaattaacatttaatttggttcttgctgctaattattttctctgctgatatttattaagctttaaaataatcgtactataatcttgaaacactgatttgtaaaaactaagaatgagtaggaatacaagagatctggaggaacaaatcagattgttattagggtttgactttttttttacatgggcttatggaagcaaggcattctagggtctagagggatgtgtgtgtgtgcttgtgtgtccatgtgtgcgcatgcgcacgtgtgtatctgtttgagacatactttctctgttcacttaaaagagctcatgttttcatttgtttattcttttctttcagggtattttgtttttttctttaagacttctttttttaaatcccaggtagatgttgtcagataaacttgaggtaaggccaagaagacagacattttatgcttcatactttctgtaattatcttttgtagcttgattacatagagtaccctctcttccttaagttgtagttgctatttatcattgtagacaaattctgttgcctttcagcaacgtatgctgaactagtatcataagatggtgcatcagttcataagctagtgcataagttttgtgtcaaaacttttaaatcctgaagttctgcagttatcatcttagttattttctatctaattagcttataattgcaaacactagtcagcttgtgatctctgtgtttcaagttcttttcttcacgaggttcagtacctgctatgttgatctttggcagtgccagaggcttaaattttgacctgctcaattaaaaataaacactggcgtttataatgaaaaggtttttttgtcgggggggggggggtcaagagaatttattttgtgatagtaataattttcaagaccttcagtcattcctatgtctatgttgctatctttattttaaaacttagaaccctgatctaactcccttctcaagtgaagatactgtgtagattcaagaattataatgtagagtaataggcctttaagtttttttttaatctgttagaaataaagagcatgatttaattattgttgaattaacaattaaaatgaatccctttggagggatggcattgaataacttataatttcagtgaatcatttacgttttcattggaagacagtatctgatttcaactggtgcgttacgaagtagagccattcccacaaagtaaatgtgcagtgcccatgtttcttgtgtttaaatattttttattttcactacatatatattattttctcatgtttatttactaatgtaattttcacttaaaattagatgtttattttcaaattttaaaagctagtgctcttaaaagagctaaattatatttctggaagcaggagtttagtataaatgtaataaaattttaaaataaaattgacttccctacttaatcttgggtttgtgggtgagtttgtttttagtacactcttattggtggttttgcctgaagagtaatacattattattattacttttctttttgagacagggtctcactctgtcactcaggctggagtgcagtgacacgatcatggctcactgcaatcttgacctttctcggcatggatgatcctctcacctcagcctcttgaatagctgggaccacagacatgtgccaccaagcccagttaattttagaattttttttgtagagacaggatcttgccatgttgcctagactggtctcaaactcctgggctcaaacaatctgtctgcctcagccttctaaagtgctgagattacaggtgtgaggtactgcacctggcaatacgttattttaaaagtaaacgctaagccatttatgactttggttatattcagtcagttggatttagtaactaataactagctttcttccattctaaggtacttttatagtttctagcaattagtttgttacaattagcttatatcagatataacagttcttaatataatgtttataaaaggttttaagtctgttgcctgatttttaaatttatatctagttaacattttaattttaaaattgccaacttttgggagatttcacatattttacctctatattttatttttccaggattggtatggaggagtagtaccttctattcttggtttatttttatttgctagacataatttcttaactacatatgtaagtataaattcataaaaatcacactgaaagaataggttgatttcaaccattttgagggtactggtaggtaacacactgttggggaataaactaaagaatttctgatttctacaatagatttaagtatgaaatttgagtatactgtgtagctgtgtagatcaacttaatgcttaaaaaattacctccttaatgattagattaatagaacagtgttagattatcaagggaagagtttggaatgtaaacataaacatgctgcataggtggtggttatttgtgagtaggactacttttaaatggtactagtaaagatttatcaaacaatgctgctattatgttgctatatttttaataaaatgaaaatcttaaaatcttgccactgttgagtagtaatt

SEQ ID NO: 115660 - DNA, 1059 bp, Homo sapiens
ctgaggtaaagcgaagttcatgagccgagactgagctgagctgtccaaattggtttcagctgatggcctttgttagtggagtttgaattcctgctatctgtcttgttatttttttcattttctttccaaattcatttctggagcttggggcctcaaaaataacaagttgttaaaatgactgagtatgctgtctggctccaccgagcccaacctcccccactatgtgtcctaagcaggactgtgagtcctcattttccagatcaagctcaatggagcagtggcggggaaccaggtctgttgatcctcgctcagctgggggaggagggtgaggcaggtggggaggagggacatcaaggttgggagggcaagaatgtggaggtaaaatggtgagtcagaggcaggtggagatgctggcaaatcctggcttatgttccagagcgttctttagcaatcttaagatggaactgaaatctggaattaaagagtgaaagtctttcgtaacagaggcctctttgttctggctcagatcctcctggaccacagtcactcgaggaagcctaccccacacttacaaagacaagacctcgccacacagcatctgtcctcttcaagatctgcccccaccaagatgtgtctccagaccaaaaccacagtcagattgaagcacaggccagtgcagaggaaatactgaacacagaggaaaaaatggcaaggccctaaatagtaggttcagcaggccccagggggccgagtgtggaagtggatcttgagggcttggaactggtgttggggagaatagaagggtgggaaggtgagaatttactcacatggaagccctcccagcaaagacacctgggcccatcctcactggcgcccggttgctttcatagccgcggacacaacttgggcccacagttaacgaggaggaaggcagagcgtgctgagcagagcaccaaggaagagagctcggctagccgggaaggtccgaatggatttatttggtgaggccaaggaacccactgcctccacggtgttcctccaggaggctcctcccttcac

SEQ ID NO: 115661 - DNA, 1394 bp, Homo sapiens
ttcctaaagaggaaagggtcactaccaaagaacgaaggcttttaccctttccactctggtctgaagtactccagggaatgtcaaatacttaacattttgccagtgttttagagcctgtgacaaaggctatccactcagacctagtggatacagtgcaggagtccaggcggatttttttttttttctagtttggctttgtaaggaaggtcatggaagtggggtataaagatgataaactggaaaaagaatcctcataggacgtgtcccacagtgagaagggtccatgacctggtggcttggccttagaaaaagctgagtgggggctagggggtgtgcatcttagaagagatgattgtgtgttttagatgaaaaccaccctgcgtgttttctggttatgttcttacattctatagtgttgccagaaagggcttgcattcttctccttcattcctttagagctagcagccagtgtttccctgctttgaggtcagagtctgtagtgactaaggggacagactttggctaggttcttattgctgaggctgtttcctcatctgtaaaatgggcctgtagtttttattcctgagggtcattataaggattaatgagatgttttatggagagtacccagcatggtgtgtggtgcttagtaagcactccataatggtatttgctactattaccgagtgtggaaaagctggtttatgcagggtattggtaccatcagcaccataggcaggtacataataagcaagaaacctacaagtcccttgcctgatggattatgcttctagcatattttgttggtagtcctggcaggctttcattcatgagtaggtagatatgtaacagttatcccttttaatttcatgggcagagcattcattatgaggtactaacagcaaagctttattgtatatgattcattaacccttctgttaagacaccgtttctcttttgctcatggaacctgttcttagtgatcagttattaaataatatcctgcaagattttatgaacatgtaaattactagctgcacccagagatttagtcagaaggcagtgtgtcagccatgtcctggggctagtgacatgaccatgtacttcatttcagcttcctagaataatgatttgggggatgagaaaggagtaggaaggaaatcaggtgattatctggaagtcaaccttggttcatataagcatgaaagatggtgcaaggcagatggtatgcagccatcccaacttctcagaggggaaatctgttaggaatgcaatagaactttcaaaaatacaagaactcctgtatgcagattacctaacacaaattctgttttgtctccttggaacagtataaacattttggtttttaagacaaaaatgcaaataacctagta

SEQ ID NO: 115662 - DNA, 1039 bp, Homo sapiens
ggcctctgccttagaacttggctagctcctttttttgataagctgagaatttaggtgtgttcctttctggctggtgattttgtgcctctttgtgtttgtctaacaaaaataatctcagacttccttcttaacatttttcttttcaggcatttctccatacagagatagatgtacttgctgcaatgcaggaagggcctcagggcctcatcagtggtagggaaactaagtcaaattgggttaaaattggaggttaaactattaggtcggtgtacacagtcactgagactgacattcacaaaatcctcacatttgaaattacttcttagggcagtcatagccagcgaaattgcattatggtattgaaatggaatgaagttgtgatgaaatctattttgtgtataaaagttcaacaactaatttcacaaattagtttatgaaataaattagttccctataagcatatctacctcctacataagacaaactcacaaaatttgctttttactcacatacttttagctggagtggcttgattgaaataacctgagccctcacctaggcttcatttgaagagtggctctgaggatacttagatgcagccaagaagaggaggggaggattgctctggaggaaaactcaggcccagagaaagaaatacagaaaggttttacttcaagaggagagtttcagacatcctaaatgagcagaatatatacctgcaaaacccaagaaaatgttgactttcccgtcctcatggctcttagcagactggtaagtagaagcgccctgttaagtctatgcaacctgagtttgaaaattgagggtgcctgagcaggagagcgaatgagaggaaaattacttgtcaagtaagactgtccctttgccttatattttggtactttactgttcaaaatactacattggtaaattttaattcacatacttttttctttccttggaattacttggttatttgttctacagtcagtgaccaagtctccctaattggctaccctggtttattgttgcttggggagtg

SEQ ID NO: 115663 - DNA, 1058 bp, Homo sapiens
tcccagccacgttgtggctctggggagcctcttgaagacatggccatgacctttctttgtctttaggacatcttcattggatgcccaagactccttcacaaatgggggcaaataattttaacacaaagctaaatgtctcctactgcttttcagctcatttctaacaggagatgccagtgaaggctcagaatttaagagacaaagtggtcacttcagaaaatccatcagaatgcctttaaaaataaaccaagtgctattactagaaatagttacagccaagggccctttgtccataacattttttttctttgtgtaacagaatttctttctgcaacatgttctcatttgcatgttctgtctcctgcttaccagcagactttaagactttaaattctctcatggtttttctttgagtttaaactcagatagtgggatagctcctgtagatgaggctttaaataattgccacatgtccttgttccagcggcgaccttacactcaagtgtgtgtttttaggggcctctttgtttttggaactcagacccacagagtttgtggacggatgtctgcatcatttcaatgtttttatttattatgctgcaagctgctggttttctctcctcttctctgcttcctctttctgtcctcctctcatgagagggttaatgctgcattgtggagttagtgcaatttgttcttctaagagatggcaaaggccccatcaaagtagtctatagtcaagttctagcaatgacagtgattccttcagagcctctcttgatatctctttagggatcttctgtggtgtttaaaaggaaggtgaaatatgggttttaaaaaatgataaagacagtcttaccagttgatttcataatgagaggtgtaagccattgctgggatacatcggaaggtgctcgctttgtactcctgaaaaacctgtaatcagatgggcactgtcttgaattgttaaaatactgttacctgcagtttttagaaatttattttgacatttaaggacatctgaaggtgtatatttaattactactgctgctttcttt

SEQ ID NO: 115664 - DNA, 1068 bp, Homo sapiens
ttagaatggtagggagctcaaaagtggaggattgtgacttcagttgtggcttaatcagcccaagcaggtgcattctaagtaaaagagatacggttttaatgcaactgtcccccctaattcagagaaagggagacaagtataggaaatgacacagcagttaagtcagaattgtttctaaatagattgttttttttttccctgaattctctgagcaccagcagcagtgtcttgttaaagtgaagagagatataaatgaagaggagttgaggatgactgtgttaattttttgttctgagggatcagaaatacttaagaaaaatgaagtcggagatttacataaataggtgggagcctcagtagtgtcatgttcatttgagagtagaatttgattctggggacctcaaataacagaagatgattatattcaaaatgtccaaggcactactgtaaggcaacttaaatggcatgtgccttaacagggtggctttgtagtgaggttctggaatttttctcattcttttgtctcgcagtgtgctattgtatgagtagcagtgagaaaatgtttggatagcatgtctaagaaccagagcatgcagagaaaacagggcttttattctactttgcatcttagttaatttggtttttagagaagcacactattttgacttgaaaggcattagccatatcttcttatttacttgagtggtggttacaagagtattctatatttatttattacactttgctcttatgttttaggtattttttgcatatttcacaataaaaatggttaaaaaaagtcactagtgtattctagacctttcaagtcaaccataccaatttattcattcctccgtctacccaacaaatactaattgagcacctactgtgcatcgggtactgttactggcactgggaatacagtaatgaacaaagcaagcaaaagtccctggtctcatggggtttatattgcatggaggggaggcagataatatgtcaggcaatgggttagagcaggagttgacagtcgtcttctatagagggccaaatagtaaatacttcaggctt

SEQ ID NO: 115665 - DNA, 1111 bp, Homo sapiens
caatggaatattattctgcctttaaaaagaaggaaatcctatttgcaacaacatgggtggagccagaggacattatgctaagcaaaatgagacacagaaagaaatattgcatgatataacttaacatagaatctaaaatataaataatctaaaatctaaaatgtatagaagcagagaggagagtggttatgggatgatattagtcaaagggtacaaagtttcagttaacggtagatgaagttctgaagatctaatgtacagcatgtcgaagataatattttattatatacttagaatttgctaaaagggtagatcttaaatcttctcatatacacacgtgcacaaatgataactgtaggggtaatagagatgcatttcacaatgtatatgttttccaaagcatcaagttgtaccccttaaatacacagttttcatgttcacaatatctaaatagagctgttaagaaaaatcatgggttccatgcactactgatggttctcactgtatatcttggagaaggtgcaatactcttccgctgcactgttagtacatttaagtaacatgtaaaatacagcaccaataagcaatttaggacagtaatatctgcttaaaatgttctgtaaattctcagctagaacatttgcaaattgtttcccaaatgcattgcaaatttatgacagttaaagtgcagtaatgatttaaagactgtaagcagtgtttcctgtatcttataagacaaatgctttagttttacctttatctcattagagagttatatgtcagtgctgaaaatgccatgctgtaaggtataaaaggtataaaatcctttcaaggggtgagggttgagatttctgttaaacacctaagtggagatgtgaggaaaaaagttggataaaagcctggaagtcaggaagggacacctaagcgagggatgtttggggagtctgctggtagggaaagctgtgggaccaatgggatcattgggatagttagcagtgcccaaggcacttcatgacttacaggtcaggaagatacgaagcaactagcaaaggatactaagtcaaatggccaaagataggaggtttgtattagtttgttctaatgctgctaa

SEQ ID NO: 115666 - DNA, 1052 bp, Homo sapiens
tttttgagacagggtctctgtcacccaggctgaagtgcggtggtatgatctcggctcattgcaactttgcctcatgggtacaagcaattcttgtgcctcagcctcctgagtagctgggactatgggaatgtgctaccatgcctggctaattttttgtattttatttttagtagagacagaatttcgctatgttggctagctggtcttgaactcctggcctcaaatgatctgcctgcctcagcctcccaaagtgctgggattacaggcgtgagccaccgtacctggtctcatgatgtattttaaaaatgtattttcttgttcctccactaaaaaggcttagaaataatgttcagtccagtggcagtgagcatccctagtgctcagattgtggtctctaaatattacttcccagcaagaggaactaggctttctgggagaaatggctgattccagctctggagtggaaaatataaatgatgaatcagaaacagcttgtcaaaccagaaaacaaggaagctgtcaaagactagtgaggttgtattcaaaaggattcaggagtctctcattagctataaatgtgacagtttggagatcaataaaaataacaactatagagggttgaaacacattcagtatattaaaatctataacttcaaaattataccaaaaaaacctagttagtcacctttgaaggattggcttgttactttgaaaatgataaataggaaaaaataaccaatctgcctttccagtcggaattgcacctccggatgatgaatagttaataattttctctttatagaagtattttagctaataaatgaagaattgatacatttagaatattaccgttttgcacaccctaataaaataatggattcaggcaatgatcattaataactcctaatatcacacggagacaactagacattatgtatttcctgatggaagtagacagcaccacctaggatatattcttgaaaaaaaattgaatctaattctgttcaagtctctagatctaactgccaatttataagaaatatagtggaaag

SEQ ID NO: 115667 - DNA, 1049 bp, Homo sapiens
acttgatatgatgtctggggaagtgggcaaggacagaggaaacaagaatgactgccgatttgtaatggaagctggatttctctacttgaagttgtttcttttaaaagtgactcttattctcacccccatcaagaatagctaggtataattatgatgtcattactcatgattatacacactgagaatactcagctctgagactattcaaacaaaattggtggctgagcattttgtcaaatattggttctgaattgtgtattgcactctcttacaacacctggtgtttttcctctgggagtttaggatgggcgtgatgttaataataccctggactgttatttgctgtggtttctatgttgttatttcttatatagctggaaagctgggaagaaggggtgccatgccatgagtgtaaattgaaccataccttttgaacataaaccatcatgtaaatacgaatttcagaacatggaccgtttaatttctctttgaatggactgaatgtttaaaaaatatatatggctgacacgctcagatctgtattctagggtagaaatgttttttgcttgtcagttatctgacattatagaattaaacataaaagctacttgcaggataaacttagaaaaaatccgcttgatatgtttgtgtttgcctcccataaaatgtcgggaaccatattttctcagaagaagggactatttggacttccaggagtgctgacttcaggaaatctgtgcggagcttcccttattattgagttgaagctcagtaatatctgttgaagctattgctgtgtccctgtgatatgaaagagactattataatgcccacatttgtcttctatttaaacatttttggttttcagcattactgtcacatgtaagttcaaggtagcaaaaagaattaaaagagccacagtttaaaactgaaagtaaacaaaatcaatatttgagaggattttagtgagagtgtttttcagtaatttattgttgtgcagaggacagataccccatattgcatcaccttcagaccaggcctcaggctgt

SEQ ID NO: 115668 - DNA, 1068 bp, Homo sapiens
ccttgagtacgacatcaaaacattttttttcgttttcattgcaaaatatctaagaagttgtttttaccaagtgacagtgggtattgaataaaaaatcaataatgtataaaggaggttcaaagttattacccaaggttttatataaataaaccaaatctaaaaaattttatccagaattatctgcattatttcaaataaggaaaaaaaatagaagttaaaatgtcctaaataatctaactgtggtgtaagtggtttgtagtttgattgaagacttagtattggtataatcaaacaaaattcctgtggtatgggagtgatgtggggttcccagctccagaacatagcacaggaagtaaatgctcaattatatactcacacctggccagctcctgcctcttttgccactggcaggccataaatgcttcttgagaatttactataccattcacttttcatgcctctactcttattgccttaaacatagaggaaaatatctggattttttagttgaactttagaaatatagagggaaaggtgggaattaaacctaattctaactatctgtaccttaattacttctgataagtcatttacattattgatgctctacaacttgagggaaattcctgacttcatctgagtggttaatgtaggcctgtgtgtgttaggtaatgtgtgtgtgtgtgtgtgtgtgtgtgtgtgtgtgtgtgtgtgtgtgtgtgagagagagagagagagagagatttagtatttcctctttattttcaggctttgtggcaatgtggtaatttaggccataatatataaaaaaaaatcacaattctgaagctgctttttgctatagataccagtcattttagggaagctttactcagttatttttactggagttttctgtgctatgattagaacaagaagatttgggaaagtttaacttggcatggcaaagaaggagctgagcagaaaaatatttggtgaaaaaagaatcaagtgaacaggatgctcaagagtgaagttcgacagaagcaggaaaataaaacagggcgcctgtgttacgtctcttccata

SEQ ID NO: 115669 - DNA, 1051 bp, Homo sapiens
tctaggctcagcttggctggtggctctgcttcaagctgtggtctggccaaacttgtctccttgctctggcttgggctcatatctgcttcatatatgatccttctcgggtgccccaggatgaaagagcagagactactaggaagcatttctcatggtgatataagcctacctggctctatggaagaaaagatacagcctgatttgtagcatttgcccatttctgtggagtaaatactcccaccacagccaatttcaagccaccgatatgacatcactggaaagaacagcacagtagcatatcattgtataatatttttcatcatacagctaaaatagacaacctcaaaagcataagtaatagtataatgtaacataagttatgaattttgagtatcattgttttgctataatttaattataagctactgtaatttttattagtatgtttagccaactgccatgtaagttcctgaaaatttaatgagcatcatgagctggtgcaaactggctccagtatatcagtgggttagcccaaatacacacatggaatactctaatacagcagtactccagaacatcactgggttaacacaaatacataacatggaatactccactttaatacatcagtattctaatacatcactgggttaacccaaatacatgtggtaaaacctaggctccaaactggcacattgtcacttctgttcatatcccgttgatcaaaacaagtctcatggcagagctcaaagtaactggatgggcaagcacgctctgactctaggaggaggaactgcagtcacatggcaaagggtgtggctacatggagggtgaagaattggggccagtgattcagtgaattactgctgttacatacttgccgtgtcacatagtagagcaaaatctatattatgttaactgcacttaatcccatctttgaagtgtttacatcatactgctgtgggagtacccatggctataagttctgttagcagatttgattgagaatctttttttttttgaaaaaagtacgtctcatacagtgtaatag

SEQ ID NO: 115670 - DNA, 1055 bp, Homo sapiens
catctaatagaaataagcatgaaaccactttggtgtctcttcttttcaaggactgctgtttttccataaaatgtgtaagcccacagtttgatactgaagcccctataattcatgcagctgtgactttatcgttttaaatattactttcctataaattaatagtcctgagaaatgtgaggccatttaaaaatcacagcatgcaaatgaaattttggaataaacttttggcatagctagtaaaggggccaggtgagtaaacaggttgcctataatgaagtgttgccaatgctagggtaagaataagggttggtttgtgtgcaaccaggtagcagggcagtgactggggcttgactggcagcctgccagaaagaggcggcctctacagtgagagctgcaggatgaggaggcgtagccagatgcaaagggaaggaaagaggcgaacatcatgctttgggctaaggggaagagcatatgggggtcagaaaacagtgtggtcaaagggaagtttgaccatacctgtgtatgcctgtcttgcataattatgaatagcccctttttactcagaaaaatgaactgctttagaccatgagttatatatctagtctctctacccatgggtgaaatggaaacttgtacaaaggaatgatacaagaaaatgtatgggcgtttgattcattagttgctcttctttcagatggcccctcattcacacctagctaattactccatttagaaatagtaggttatacttaatacactactgtactgtaactgttggtatcttgttcctctgggagaaaccttctttgtcttgtttttctttttcatgagattcagtcgcattttaggatatgtgatgatgtttgctgcttattacatttctctcatctttttatgtggccagaactaggtccccaaatgctgctggcagaattattgagtgcagtgatatccacttagcaaccccagagtcatagttggtcgccaattctcacctagttaattctttgtccttgttgatgccgagttcctactccaccacttatggtcagtga

SEQ ID NO: 115671 - DNA, 1032 bp, Homo sapiens
tcattcctttggcatttctcctccctgttctctaacctctcttttagtttattgttctggagtaatgaaaaactgtctgagggtaaacactgccagatatccattttgcatttgctcaaagtttatgcctttgttcgtttattcaaaatgtggtcagcaacatttattgggcgcctactgagtgtcagggtactagtggtgatttaaaaaaatccctctctcctgcatctctgagactagtaagagagatagaaaaggaaatctaatgtgttgtctctgctatgcaaagggagcttgggatgcccagagcagagatgtgtgtttgaggaatgttcccgaagaagtgatgtttaaaccatgtctggaaaagtgagtagaaatgagccaggcacacttaaatggcagggtgactccagtagagagattagaatagcatctgcagaggtttggaggaggaggtggtgggcctggagatggatttggaaagcgtgaactttagggcagggttcttgtgatgtagctctctatcagaattgcccgatgaacttgttgaaaatgcagattcccgcatccaatccctccccctccccttaagatcagtttttctggcagtgggaccgggcatatctgattgtgaagtcaggaagagtttgagaatcttcttctataggaattggaagcattgaagaatctaaagctgcaagtgctgtgaccaggtgagatttttaggaagatttttctaatctaatttgctgcaacatggatgaacctggaggacattatgttaactgaaataagccaggcacagaaagacacatactgcatgatttcccttactcgtggaatctaaaaaagttgaactcacagaagcagagagtagaatgggagttgtctggggctggtgggggtgtgtatggggggaatggggagaagttggtcaaagggtacaaagttaggaaggataagttctgaagatctattgtaccacagtgactatagttaataattatgcttaaaaattgctaagtagat

SEQ ID NO: 115672 - DNA, 1015 bp, Homo sapiens
agattcataaactcaagttgggcttatttggggggtgggtgaccatgcctggagcatcagttaaggtgactggttactccagagaaggcaggaggacaggacagccagacagtctatcgtgtgtgtgtgctaactgcttacatgtgtacaaaggtgtccaggctttatttcacatcataaacacatgtgctccctgacctacatgagggcatctagcttagacaggcctgccgccactctctgggatgaagtttcacatagaagttataaggctgccccataggtcaagaccaagagtagtcgtgagtggccccacaccccagaaatggattagagtccacacctggctttgagtggttggtgcctgaactgcagaggcactgaggttaatatcatcagcattttcatgaatacaaattgtagtttacgtgccttcttgttcttatgaattctcaaagaacagtgtgaggaatcgcctagacgttaaatgttttcacacatgaaaggtgctgtgtcagtgctgctaacagtgaattgcgtcaacagctgagctgaagataaagatgggttcagttgaattagggctctggagtcagatctgctttgaatactgggcctactgtgtgcctagcgttataactgggaaaagaggacagtagtaaggactatccttagaactgttatgttagataatgcataaaagcatctactgtagtgcctggcaaagagtaaggagagaagtgagcattaggtattgttgccttagagagtgccgttggtagcaatctacttatctgaagaggtgaaggggtagggaacaaataactgcataagtaagtgaagcagaccattttttttccccttaagaaaaagaggtcttgctgtgttgcccagactgacctcaaactcctgggcttatatgatcctcagcctcctgagtagctgggactacaggcctatgccactgcaccccgcttcatctggattttaattcctcaaaggcccatctttgaga

SEQ ID NO: 115673 - DNA, 1082 bp, Homo sapiens
tcttttttatgttctattctcaaagagtactagttaataattcacatgcagttaccaattaagtagaaatttcatttgaagcgacagtaggttcaattaaatgcgtttggaaatcgggtgcctaaattgctctggaaggagtctgaatatttatgtatatatgcattgtgaatgtgggtagtaggtgcatatatgttttatacatacacatttgaataaaagtcagggttgaaaacctgcctaaagggctaattgccagtcacatgtctaattaatcacacatgtaaaatgtaacccttgctttgtgggctataagcagagagattttaattttcatcccagagttcctggaaagaataatgctagtaattttggggggcttacaatataaaagctggggaaagaggaagaggggtcactgtctcagtttagaagtgctgcagagagccagcagttgatggttattgagtcagcacctgctgctcagcgcttgtgggaggtaaaagggtgtgatgctgactgctacaattccagtaagttcttctggcataagagcaagaacaaatggctatggggttgggcatgagtatttataaaaagaatagctggccaggtggggtggctcatgcctataaccccagcactttgggaggccgaggcaggcagattgcttgagctcaggagttcaagaccagcctgggcaacatggcgaaactctgtctctacataaaatacaaaaattagctaggcgcggtggtgcacacttgtagtcccaactacttggggaggctgaggtgggaggattgcttgagactgggaggcagtggttgcagtgagctgagatcacaccactgcactccagcctgggtgacagagtgagaccttgtctcaaacaaaacaaaacaaaacaaaacaaaacaaaacaaaacaaaaccacacaccccaaaaacccccaaaaacccccaaaaagaatagcaaaacacacagtcaaatgagttcttcacagataatttggtgtattttaaaggatcagaatataaaagagctggaagaaattcatagggattaacaaaacgtttgca

SEQ ID NO: 115674 - DNA, 1034 bp, Homo sapiens
gcccttgtaggagttcagaagggggatgtcagtggctttacaaggaagtggccagatgggaccagaacctggacctatttgaagggtggacctgttaggattcattatggattaaatgcacatccttgtggctcccctcccctgacgaggtggctggcgtagcactgctagtgcattctccatccttcatgagtgtgttcctcatgtggggaggggagtagggggtaggaggctctcagcttctcaagaattcctttggcattttgagaaaggcttgattcccagcaaacagattcgggaagaagatgacgctgacatgataagagttcttaagttttaagcttactttgtgcagcatttatggcatgagcagcctgaaaaatgatgcctttaccaagtcatgtaaaagcagtaatattgaccatcttatatgtatgcatggatgatcattgtcataaaatcactttacattttgagtaatatctaggtttattagttgaatcggtgggagcatgggggtgtagggatagggaatgggagtagcaagatcagcactttctctccagagccagtgacccaacttctgcagggtgaactctatagggatgcagcaatggatgcagcagtggagtgttgttttttaacagctttattgggatatactttatacacataaaatgtgctcatcttgtgtgtaccattcaatgattttttagtaaacatacagagttgttgccctcatgctcatttacagtcactccctgttctctccagaagaatggttttgttattcttaggcatgtccaaggttcggaaatagtcattaagctagtatacaggagatcaaatcaggaggaaagaagtatgtttatctctgctccagtttgatctctttaggcaatcagaaaatgtgagctgccttggaaacacaaagatcataacattttgagtcacaaacttttataggaacctgaagcattaacacaacaaacaacattaccttgtccatgttttacataaagtataagagtgtt

SEQ ID NO: 115675 - DNA, 1142 bp, Homo sapiens
gggagatgcctatttctatggtttttaaaacatttcttctctaattttcttatgtaggcaaaggtcaaagtggatatttttactattataaattagtagctatgcctatattcataaagaaaggcctcctttggcacttttagttttgactgttttctagcaaattgtgggtgagtaccatatccaatgtattaattttgacatatggttacacctagtgcagtctcagccaggcagtcccttggggttacaaaggcatagagttaaatttcccaagttggaaaaaggctttcagaaatgagtttctcactccacttgaagtggctttgctactgtttccctggggaggttgctaggcatttaatagatctccatgttaggaaaataaattctttctagcattgaagtctaaggtgttgttcccccaccccttggcctcagatttgtgtggtggaggctgcagctaatctcccttatgtttatatttataaaacgtttccagatgattatctcttcctggtatcatttggctagtcccaggtattcattgtctcagtcattcccagttaggcatagccctgctcactgcctgagggaaggaaggaggccgtgggaccgctgggtctaagcctggttcctaccacctccccacagctgttagccttcctccatccctgagttctcactgggacatgagggactgcgtttcagctgtgacagtattttgttgctcttggccattgcacagtggcttacatcctgtgtgctttaaaaaaaaaatgtctctttcaaaggctcttttcagagtctatgggatgagatgcacagagacagactatatatatttaaaaccagtgggtttttttttcttttttttttcttttttttttgctttgctgagaaaaagcataagcaaatgagagggactctatttgaaggttttttttgtttgtttttttgtttttttgttttcaaagcaccttttacagcttgtctttcggtataaatgattaagttatgatgtcatcttgctccttagacacacggcttcttctacatgctggcatttttgtatggtgaagtctcttttggtgcctcctgaacctgaggaccccatgagtgcctgggccagttcaggtgcc

SEQ ID NO: 115676 - DNA, 1060 bp, Homo sapiens
aagcttgggcacagaagccagaatgtgattagtcatttactactagatagtgaaggtttaaaatttaacccttatctttccctttcccttcagagagttcattagttcctaattatagtctacagaaaactatttgcccctcaccttctgttgtattaagagcagcagccagaggagagctgccagacagacgaccatcttgatttctttattaatctgctgccatgtgcccagatttggatgccatatcacttattttgacgtgtcactcaagtacatgttagtgacctttcctgcttttggtaccacttgtcgaaccacacagctaaaggggcattaaagttgatctgtttcgtgtttctgcctcatttagattggattatatcaaaattatctctgccgattacaactaatagacctgagagagaattgtgctgaagaagtgggaatgtacaccttgtataattttttctttttccttcttctcttcagctttctcttttccttgtcttcaaacaaattgacatttgcggaggtgcgttgtgcagtagaacattcctcatgctgatgatcctctcctcctggcctctctgtctaccccttgcccctgtcgtagagctgtaagccatccttcccccgactccgcctgacatgtatcatggcacaccttcgtttttgttctttgtgtttatgtcgaatacctccctgctagactgcaagccccttgagggcagaattcttgtctgatttttactttctacttttcactgctctcaggacaatgccttgcacatagaaagcattcagtaaataatgttgaaggaataaataattatttatggaaaagtgacttttttttttagttgcaggttgagcacgatggtgtgattcttcatgctgtaatgggtgacctaataagaccatccatctaaaatctctatggctttgctgtccagtgtgcatcttacagttgtgattggccttaaagtctatgatacaggctaaatcccattgagtttcacatcagccactcaaaaaatatggtgacaaaatttgtgaa

SEQ ID NO: 115677 - DNA, 1056 bp, Homo sapiens
tgagaggtattaatatgttagtaagatataaatgaaggccctgaggtttggtaggtatgaattttagtaaatgcatgacctttagtgatttaaatgccataggcaagcttgaaggtattgctaactaccttctcaaggaggagattaattcctagcctgaagtatctagttttccttggctatgctaaatatagttgtgttccctttcccagacacattgggcatttcagataaatggcatgttgccagttcatcctaagtagcctggtagctggcagaatacatgctcagccagtgtccgcctgctgggacaccagccgggagtgctgatgaagtgtcagatgtatacttcatatacattaatctgaagaggggaaaactcattttcccatttgcttcttccatctttctgtccctccccacacacatgggtagtttatcacagaagtcatagtcgtcaaaagccaggggatttatacagatgctgctttctggcaagaaagatggaaatttcaggaggcaaaagcaggaccagtggcaacttatttctttgtaggaaaataagggtgtaagccttgatgatggaagtttaaaatggctacgtggccatcatcagaaatattcactccatttgtacttgggagtaatagatagatggcagaagcaccatgaacattagtttctggtatttttctccaattttctggttggttggaatcctgtgcctcatcttttttgtgtgaaggtttcattcacattcttcccattgaggttttccttgaccatcctgtttcaaactgttccctatattgcttgccacatatttcatttccttcattcatttttcgccatagcttatcactgtccagtataccatatcgtttgcttattttattatatatctcttactactctaatgtaaatttcatgaaggcagagataattctgttttccaagctgtctcctcagtgcctagaatagtgcctggcacatagtagggtgctcagtgaacttgttgaatgcataaacatatgtctcctttctgtacattttcag

SEQ ID NO: 115678 - DNA, 1052 bp, Homo sapiens
gtatataagtgatatttttctttgtgaaagaatctaatcattagccattgttaaactcttatatattattttgatattaaaaaaaatgcttggaatacagaatatacagcacatttagaaatgtttccttaatattaagtctttgaatttcagctggtctagctgtctgctttttgttctaagtatcaattattaatactaatattcatattactataatattaatataggcaacgaaaggattatttgcagctaaacaaaagagggattagagaagttggggttacataccatctattgttcaaacctaagtaaacagactacctccttaatgaatttcagtgtggtcattgtttttgaatgcacagtgtggttagtcactgctgtggatttccttttctttgttttcatcacctctataaagttctggtaatgcacagctgtttgtgtccacgtcctctttggggtcagttgttaaatatggaaaggctctttgttaaaaagatgattaactctgttaaactctgaatagttcagattattagtgactggatagtaattcttctgtgagttttctctttcctttaattcattttaaatgatctgaaaatgtttttcagaagaaattccttttttaagtttttgttatttctgtaatatgtctgttatcacaacttcagaggagatagttgaagcatatagtgcttgtgaggggcatggttttcatgggcctttaattttagaaataaaggaatcattatttttcattaattaaaataatggagctattttctatttaaaatatttgctacaaaacaaaggaatacttgctaatatattattagagtgctaggtttttattgtacttaatatactttttctacacctgccgtcctctgtataatggataaggaatattttctcttctggatgagataagtcttcatgctgtgaaaaataacaacataaaagtgcttgaaagttctgccacttcatggttacaactttactgtggcttaatacaaaacctattttgcttttactcccattgc

SEQ ID NO: 115679 - DNA, 1008 bp, Homo sapiens
cacatacccttggaggaggtgctgctgtcctcagtttttagagaagaaaactggagagttacctgacctttagtgaattcatagaattaataagtgacagagtctagcttcaaacttagatacctggattgaaatccagagagtttggccgcattcttaatggtcttacccttttttgcctctctgaagcaggccagactgatggcccaacttacagttatcatccactgtgacaagttcagtagaagttgtatctgggataacacggaagctcagagatgggtgtggttagggtatctatgcgaaggtggttagtttggtagaaaaattgtgatgagttccacatatccatacttctccaatagccttgaggagctaaagctatgatgtatttttttcaattgtaggcttagagagggatattagttcttgatattttatccatgagaggcaggatgagataatgtccattatactaagaggcaggctttcctggtctatggaggtacagctagtttgttgctatagattaatgacttgagtcctggagaaaatagagttaatccatgactgtaaattataaagtatgtaattctatcagaagaggtatgttatggtataaaatttctggaacattctcttgaaggctgaattccataaattagttggtatatggagagtcaggctggtaaacagaaaaatgaataaggccagaaaaaggagatttaaaattttagttgctgtttaagttaattttagttcttgtaagataggatgaaagacatctaaggggctcatggaggtaaaatggtgtctggaacatttattaattttattatggaaaataattttgagttgtatataatttgcctataactttgtatgacttaactaaattcagatcttcctgcattagaacgtgtggtttcctggtggtgtctacctccctggcactcatttctccagtgccttctttatcagcccccttttttccatttgggaaagatt

SEQ ID NO: 115680 - DNA, 1044 bp, Homo sapiens
ctcaaactcctgggctcaagcggatctgctttcctcgacctccaaaaaggctgatattacaggtatgagccaccgtgcctggcctattaactccattttatagaagaggaaaccgaggctcagagatgtttgacaaattccctggacaccgtaacgcttgtctgtgtggatacaaatctgtatctccttggcttcacaatttgtaccatggtctggccctttcttaccgcaaaatgattttgagggagaagttgggctggatttttgcacaactgaaattcatttagactgtacttttggctacatttttcccccaaattagaaacacagataaatcttttgtatagaaaataccattgcaatgcaagttctcggagctccattgtgtcagtgggtttaagtaagttacagagatagttgtcagtaatcttcaaaggatatcctaatgaaatgtaaactatcttccctccctaaatagaattctcattatattccctttggtgcgtgaagaaagagggatgcagaaaatatgatgagctgaggaggaagactgtaggatcctgtttgaaagtggaaaacagaaatgacatactcttctcaacagtgtcatagtggatggtacaccctggtcaaagcccagagtgagtcttaagaggagggtggttaataaatcaagtccctttgtgattttcctcccatatattctggtttctattccttagttcatggccttgtgccatgactggtagagtcaagttattgcttctaatgaaagtgaacttttgttcaagtcatgttagttaaagtggattctattaatgggaagaaaatagaggcatgttcgaaaagcctgcataaccagtgtgataatttaatctacccggagtaagtgtaactggtctagtcataggtttaataggtcccgtgtgtgtgtctgtgtgtaggtcactgaaaaatcatttccccatatctttgttttctatttattctaaatgatcatatttctttatgtaggatgcttaggattctgtggaaaagctgatg

SEQ ID NO: 115681 - DNA, 1013 bp, Homo sapiens
tgcgatgcaggcctccctgactcccgattgtgtggtgtaggtgtcagctgcacttgcagacagagcactaaggcctgatcccaggtaggaccttgatggtttggatgggaaaatgtgggagatcagagacatggttagctttcacctggaacttaaatggagaaatccttttgtatagtagttactggaagttttaagttgatttatttactgtttccacttgaacagaaagaaaagtgagatattggtctcagttttgaagagttattaattgccctcacatgtgccagtcaatgtcagtgctgtctggaggaaaagattagaagttcctgtgtgttgcctttatcaggaagacacatactgactgattgccttcctgattttaaatctgattttgcttatatctgattttgagtcaaatactgtgcatttgcacaaagacagcccttatgcccatattactgtaggaagatctttggattgtgctttttattaaattagactgtcctcttgttttaaatattgacctggacaagaattatggtgatatggctatatgtccagctgttaaatgcagtctttaaaataatttgaaaaggttgtgaaatgctgaataacatagagaatgatataacaaacacctctctatctgacatctaaaattaaagtttacattttgtcatttttcttcagagagtactctttataaaagcaattggatattataaaaagaagaaaacttaaaacataaaggaaatgtaacaggaccgaaaacccctcctcagtcttttgttcccttctctgccctccctcccagaagcaaacactgtcatagatttgatatgcacatttctagtttgtgtttttattctgtcatgtacgttttggaactttttttccccactcagaatagatttttagatatctacattgattcatacaggtttagttcattcattttaagtgctggttactatttcatctcatgaatataccacagtttatcctttccc

SEQ ID NO: 115682 - DNA, 1079 bp, Homo sapiens
aatgtgttttgagatttttaaattttattttatagatactccctttccattacctcacatacctttatctatttcctgcctgaaaaagagatttgcctctgatgcgcccaagtgtggttttccttgaatttatcctgcctaggatttgctgagcctctagggtatgtggattaatgattttcatcaaatttggggatgtccttggacattatctacttaaatacatctttaaaccactttcttttctctcctgggaccccatttatatctatattaggaagtttaatattgtcccacagatcttaggcgttctttatatttttgttttgtttttgcttttttttcttggcaattcatttgggataatttctattattttgacttaactgtactgatcatttattttgctttactctgccagttagtaagcccatttcattgttagtaagcccatttcattctaatatattcttcaggctagatttttcttttttgtttttataatacaatctctctgctaaaaattcccacatcttctttatgttgccatacatttgccactgtatcctttagcatactttttagtctgtctgataacaccagcatcttgactacctctgtatctgtgtgtcttctcttggccatgggtcataacaatatccaaacctagctcaagcagggagcagaatgactcagcaccctactacagtgtatgacgcagaagaggcatacctttttctgaagctaagtagtatttatctcagcatcagtttctaccgagatttaaaatgtttagcacctacttgaaaaattaccgatacaagaagaagcaaaaactcctatttctgagatttcctttaccacttaggaggtagactatgaccagggaccattgctctcactcctacagtcaaaataacctgggtaagtaataaaaatcatagtttaaaaaatcataaaatatgctaaggacataaataaaccttgaaaatgtaaattccagaaatgggcaaactcttcaaaggaaagaagaggcccatggtttctctcacccctggtggattggcaggaggaggagg

SEQ ID NO: 115683 - DNA, 1090 bp, Homo sapiens
aagtttctttatttgagaaaatgggatctttagtgaaaaaagaataatgacataagtttgtttggagcctatcctttggaaacatagtaagagaaagtctgaattacatcagagccatttaaactcccctccctattaaaagtcaattgagcattcagaagatgagcatgaagcacactgtatatgtatatgtgaacacacatctgcttttttagtgaattctgggaaaattaatactttcaagtgaggtaaaccaaaaataaacatgctattttgtattttctattaagcacaaatattccccagagaattaatgatgcctcatatagctgtgctagaacccagtgtcactcagcatttttagtgaatactgtacagaatgccagtaattactctcctcatgcaaggttcttttatgactttgagaaagggaaaatactttttaaaataaatgctagagtgattttatacaaatctaatgaagaaaggcacaaatatatctttattagtatcagttagccaacataatagtacctgagaattaaacctgttaacactctcttagtttatttactgcatacatgcctcctccataaatgctttgaaatctttttatatcttctctcagaaagattggggtttgcttctgctgttcttttcagtctttttgttgttgttccatattaacagtaagcaactgcacatagcgtgatgtatttcttattgtctttggttatacagcaatgtgatccaacttgttagagagtgtgtaccttgataaaggctgaaaagccctctattttgatatatctgctgcttcagattgtatgtcttgaaagatagtagctttaaaattgcattttcagcattctgaaacttacggggttttccaaatttttttgaaaaatttgaatattgctttaactaagcttaaaggtaacttttatatccagaatcatggtaaaaacatacattaaattgaaagctttcagaagtgaaagaccacaggaaatttttttgttattagttgaaagtataaaaaagcaaactattctgtctagaaaaagaaattcacatccccactaattta

SEQ ID NO: 115684 - DNA, 1154 bp, Homo sapiens
attcgttcagtcagatgggggacttagaattttatatttggttgacatgtttttatgatttttctccattcaccctttcattattcctctgagagtggttggagtctattagggctggccttggaataagtgggctagttatctactggcatttgatagtttcaggtctgctaggaggtcaatcccctctgaccgcaaaggggatttccatcttaaacacatctaccacatgtcaaacattccagtattagaaattcattctgctggatcttggagatgtctttggtacctcactgaaatgtatgtacctttggtcagggcaggttgtcgcccaaactaaatttagcacagcagaagacaattcattaatgggatgcttctggtgaagtggcaagaaacaaggctagcagaaagttgagcaggtattgagaaccattttaccatatgactacattaataaatgtatgaaaagaataatgaacttattttaccactttctaattttgcctttcttggttaggcacagtaaagggtgtccagagatgagatggaagatgagagtgaccaacagagggagaaaatattgtcaaaaagtagttaggactacaaagcaggggaacttgatggtagcttctgggaggagctgggcctgctagacttctgaggtagagtttgtcttatagtagatgtatttgttggagaactttttccttagttcaactaaaactcggcttttatcacacgaccaggaaagattaagcttgtggacatatagaagggtggggaaaatggaatttacttggtgaaaaggaaaaataactctcagcaaagcgagagagagagagagagagagagagagagagagagagagagagagagagtcctgctaggaggtttcccacttcacagatagaatcccaggtcaccacacaggaacagaagaggccaggcttctccccattgcaaagggtgcaaacttcccgaggctttacctcatcctcccagggtgcaggtgggcattactcagaaagaatcagtggggaaagggtgggcttcatccaggatcagcagttcggtatttcagcctccaggctgttttatgcttgaaagtaggatttcgccagggacccttggctgtctcctgtctcaatcat

SEQ ID NO: 115685 - DNA, 1065 bp, Homo sapiens
tgttaacgacacggcaacaaaatttttaaaaatgtattaagtattcatatatccctgaatttttttttttcagattgcagtttgaggaagactggcatagcatatactaagagtaagaattggtgcagattacttttagtggattaactgcataaacctaagctttgcattttttggtatttggctttggctgtctctttttctaaacccagccttgctcttagctgtgtcatctgctacaggtaaactaacctggcagcaaagggggaattcaaagggtggggtggcagagaatgttgtcaaaccatgagctctgatgagtaaaaaggtctctgccgtcagtggtaacatggtactctttactgggtgattctataatttctgtaaatatgtttcccaaagacatatgcatttgaaagtgataattactatagttaggatcacgtccacagtgttttttcagtaggtaaggatgtcttccaatctagttctgccacttagtagctgtatgactttgcctctgctaaaatgggaattgtggaaataggaccaatctgaggctttcgtgagagagtgtatcaaaaatgcttttcacagttcttggcttacacttggcaccagtggatgtttgctcactcctaatgccactaccagtactacaagaaaaatattcccagtaacgattctttgaattcatttaacatgcagagaatacaagtaaaggtctgagacaggcatccccatttctcaacttgcggttagtcgttagattttgatactatgtggtatgatgtttttagcgtagaaggtggtgtattatcattagcttttttatgagagtaattaccatcttctagggtacctatggaggccaattatattggaaccttgcaacctcattactaccctctgaatctgaccttttgcccttttccaacctggttatccctcctttaaattccctcagctgtcgttctagtgtgtcctttcttccctttctgtcccggagaagcctgagggaagcctgtcagctcagtactcagtgtcccacttattgccaaagca

SEQ ID NO: 115686 - DNA, 1049 bp, Homo sapiens
attttttttaagcaagcattgagtacagggaagtttcaggagcctaaatagatcttttcgttatcccatgtactctatagcatacagttgaaatctatttatataaaattaagatagtagcaaatttcaacaggctcatttgtttaatggaacagcttggtgaatgcctttctccaacttttgtgtttaagcaagaattattactaatagtacttaaaactttttagtatttatttgaataattttattatctcttcaggaacactaggatatcaattacagtgctgggaaatgtgtgttcagcgaaaaaaagtgctgccttttccctgtggtagcgttctgaaaggttttgaggctacacttgatgagcatgccttttttcccccaaagaatcaaagttagagcatgataaatgaaagaaatttcaaaatcattatgcaaggtgtgttttgtattcactggtcttctctgatgagtcaatttccatttttaaggaatctcaagcattcttataacaatcttgggtttgacatagaggttgagacttcttaaagtacaggtaaccatctccccgttctttgctctattgatttgttagagttgacgtgtaaaattcctagttttaaaacatttcgagggtattttctgattttgctatttttaaaaaatagtttacaattcctatttccttctgaatatctttggtgcagctatttgctttctgcatggccacatgagttgcattgcatctgtttctaaaataatgtgtttaattttccaccagtactgcaagttggtcctgaattgccttatatgataaacaaacgggtttgtaaagttgcttcaaaggtcaccatcttctaccctttggtggtggttctgagtacttttaaaataaaaatcttcaaagccatctttagatgatacccttgctttcaatcatgataatgaaattaaaaatgttattaaattggtagtaacttggctttaaattgaaagtatattagcataatagaaggctctagaacttctttctaaataagactttc

SEQ ID NO: 115687 - DNA, 1059 bp, Homo sapiens
cagatgtttgtctggagttcgttgcaattttgcttctagtagttttcctgcctttgggttctggtagtattcagaagtattactaacaacgcgttacaaatgacactcactgcaaggcacttgtcacggacagtggaaacattttatgatgcatttccttcgtctccagcttctctgaacagaaggtttggccattttagaaataaaaaatgaaacacttgactatgttagaactttttaccatggaatctaatgctggccactaaaaattgagtagagtaagggttttattttctaaatggaaaaaaataactatttgttctgtacataataccttgaaagctttcatgggatttgcaaagtataagagttgtttcttattttcagagaatttctattctagctgagatgataagaattaagagtatgggttgggaattgtgcattaacacttaatatagctgatgtatgtcatgggctgaatggtggccccaaagatatcaggttctaacctctgaaacctgtaaacattaccttacttaggaaaaaaggagtctttgcagatgtgattaatttaaggattttgagatggggggattatcctggattatctcaatagttcctaaattcaatcataagtgcccttgtgagagaggccaagggggatttggcccacagagaagccagaagatgcaaggagcagattctccctgagagcctcacagggagcctggcctattgacatcttgatttcagccctttgacactgatttcagatttctggcctccagactgggagaatatatctctattgttttaagccaacaagtttgctgtcatttgttacagctgctgcaggaagcaaatgcagtggtaaactgcattctcttgtttttcctgggaccctgaaatgacaaagtgaggacagtgtggtgagcactttcacgttcatgttacagaagaaggagcccaggagtaagggagcccagtgacttaaaccagcttttccaactctgagcccagtgcgcctttcactgtggccccctgcctcctcctagt

SEQ ID NO: 115688 - DNA, 1034 bp, Homo sapiens
aacgcggggatctctgcctggagagggaatgctttcacttcccaggggcccacaggcggagctgcctgagcccctcaggagctggggttttgtgtattgggtgacactttgaaaagtttatgccccgctaggggagggggtactgtttcaggtatttcttcgtccttgtggtttcctgggtaaccctgataaatgtgcttctcataggttttctccttttgaaatgtggataataagacatttccttgtgagaggtgggggagaaaaagggaaagaggaggagatactttgtctaagtctgtccctttgacctgatcatgtttatccatttcattcacccagtcattgaggcttctggtacttttcgttgagcccttcagatgttcctctctattaaatatttgacctttataagatgcagatgtacgatgcaaggatagcccaggttagctatttcatactatctgtggagaggcagatctacataactttgtcattttgatttttcaatggtttgctggcatttattactaatacaggagtgtccttttcattttgtaacgtatatttgatagaaaagatggggaaagaaaaagaattttaatgtcaagatgaagctcatgccacaagtgacaggcagttccaagagtttgctgacacttgtgttgagagactatgactttgaaggaggcatttctcaccacatttgtgtccagcacagaaaagtaagattgttgtacttttagaggggcacaccttttgagttgtgttaatactgattctttgttttccttcaaaacttgccttgcatgtacatgtgaacatgcatgagagcaactttgcagtcagataaacaggatgcaggctctcagatttggagcttcacaatctctatgcttcagtgttcaaagaacccaagaaaatggttcgttctttttggttatacctgtaactttttgtagtataaatgtggatatgtgatactttagaaaacttagtttttccttttgaagtttttcatggtttcttacatt

SEQ ID NO: 115689 - DNA, 1033 bp, Homo sapiens
aggtttgatttcaaagctttttaatagagaaactaacatgtttggaggggattcatggcccaacatttatggattttgttgggaagtctcaggtgtgtatttatcttaagtatatgttaaggctattagacaaaagtaattgtttgtgctttgctctgttttgtttttgccgtctagtcctagactgaatttcttaagattatcttagggattggactgggagggagtagttccgagtcccgaaggctatatatctccactttcagttccttttctttggctgcctaaagaggagcactaaagaggagtcaagtgattataaattcggccaaaagacagagaaaccaagagctggacgattaacctctgaaacatgggaagttaattacatttacaaatacttggaggggctatttatgagtcatgcatctctctgtgacccttttactgctttgggagcttgtggatgaggctgaatcactctctgaaacctgataacctgataacctagtttggctaagtttggcttctgtgaacagggtctgaggatttatcacatcacgtcattttttcatttgtatgccaaatatttattgagtaccttttatgtgaccagggctatgattatcacctgggaaacaaagatatgtatagcatgatccttttcttcaagtagctcaatctagtgggctttagacagtaatacaaagaattagagtaacatgcggtaactggtagatctgccaacatcagccgaggaggagggagggggaggatatctgtggagacagtttgatatagtctcatttaatcctcacaacaattctgtgaagaatatgttattatatttattatacagatgaaaaaattgaggattagagaaattacttaactgtccctaaatctcaccactagtgagtagtgaatttggataaaaactttactatcttatggccaaaagaaatacagctccaacaacattctaattactgaaaataatatttgtaaagcaagattttagtacctttttaat

SEQ ID NO: 115690 - DNA, 1047 bp, Homo sapiens
gtattctgctgtaatttcctcatcttaaagtatcacagtttatgatggtatttaaatgggtttgtgcttttaaattgaagctttacttatggtgtcgctctgcacagctgctgtcttccaggcctttgaatgattaacaccccatgcactcaggcttattttcctgagctttccctgtatgtattataaaatcctgcacattcacataagtgtatatgttatctacacatttcaaaatccatgccgatcttgtaataatgcatatagttcatcccttagaaaggacaaaaattctttctgattatggatggcaatacaatgggtatgccagaaaatatctgttgggagattttagagatgatttacttataggcttctttccttttaaaaaatgtaataattcgtcttgaaggtgctattgctaactgtttttaaggaggagatgactcgatggcactcaaatacaccttttcctttgagaaaattgctgtgtttagagaacgaaaaagtaactgctttgtaatacataaaacaattgcataagaatagactataaataatctacaacacacaaaggacacaaatattgtgtccagaattctctaaaccacacacacacagaaaaactttactggccatctcttagcttttggtgatacaatatgtgagctgtttttgaggaatagctgcccctacctaaggacggaatgaaagaagtcttccctttaggaactttgttaagggttaaagaaagtgtgtcttattactattaacctaggcctaagagttactcagatgtgtactgacacagggtttaccacttgtatcaggcaactaggtgttagttttgttttgttgagacaagtttattgagatacaatttacacatggtaaaatcatcctttttcaggtatgtagttcaataagttttaacaaagttatgtagctaacatacaaggaaagatatagagtatttctttctttcttttttcttttcttttttttttttttttgagacagactctcaccctgtcacccaggctggag

SEQ ID NO: 115691 - DNA, 1122 bp, Homo sapiens
agccaagttagtggacccagtgagttctattcatagacatcttggaagtccacagactccaggtcagaagttctctggtgtctccagtgggttaaacactagtagtggagtgaaaggctgacccaggtggcctctggagtttgttatgaaacttgattatcaggggcctggcataattgaggggatgttatacaaaaaaagtaacctttgatttacctggtcagcactccagtcagaaaagtgctggctttcatcagttatgtttagctagcatgtagctaggaaagcccggagtatattaaaacaaagaagaactataggaaaggagtagagtaattatcacccacatcatgtgcctctggagggccccaaggcccggacatgtggaaatgtgactgtgtcccctgtacttcgtgtagtactttaaaggagtctgtatctgtcagcatctcaccattcctttgtcataactgcatgcttttccctaattaaatgtggccatgaatgtataaagattgtgtactgcacctacctacttgtcaggcttgaattggtgctgctcagctggaaagtaaaatctttgaaatacaaaaaagctaaagaataatattgataaaacacttctcatctgttagtcttaaagcagttttctttcctagagtttgtaagtgttttaatgatcaaggtctaaatatacaatgaataagagaagtggcgagcaaaatttatcctaaccttttcagaggagtgaagacatttcttcccattacctatatacctaccaccttcgatgctacattttagaggggaaaaaatattttaagaggcaaagcctcaaatgcttttacatgccgtgccacttgcctaccacaacagcatctcacaacagtttctaatggagaggagcattctttttggctttacagctgctgcataaatgcccctgtgttaatttgggtacagactcacagcctgatagactggggagtagagcaaagtgcagagattgatttgtctatctgctggtgaaatgtaattcatgcaaccatcagcagaatgctttgtaaacatggaattattttcaggttataagatcctctactaaattagataggaagcttg

SEQ ID NO: 115692 - DNA, 1093 bp, Homo sapiens
gtgagagatcattgaaatgtggaagactgtaatctaggcaaaacaacaacaacaacaatacaaaacaaatagctatcgtacagagactcgagtgagagttgaggagcaattccattagagtggcaaacaggaaatgtactctgagggtaggaggtgccactgaagggttttgtacaggacaataagatcacatttgcctgtaggaaagattcctagcaatgagggattgaactggagttgtgcaaaaaggattccaggatctgagttagagcaagcatcacgggcttctggggcagatggtgatgatgccacaagcaggctggtgaccgtgagaatgaagggagacgctcaggaagtggattctgaaagactggatgactaactgagtgattagagtgaagaagaactaaagtggaggttgtgctcatagttctgctttagcctgttagacaatggtaccaattactgaaattgggaacacagaagcaagacacgttggatgaagatgatatcttcagtttgggattcattggactggagcttctatagacacacccaagtggagatgctggatatgtggatctggatggaaggcaagagagttccagattggggattaagagtcatccaccgccgggcatggtgacttatgcctgtaatcccagcacattaggaggcccaagtgggtgaatcgcttaagccaaggagttcaagaccagcctgggcaacatggcaaaaccccatctctacaaaaataaaagataaataaattcgctaggcatggtgtcatgtgcctgtagtgccagctacctgagatgctgaagtgagaagatcacttgagcctgggaggttgagactacaggcagccatgatcacgtaactacacccagcctgggcgacagcacgagacactctctcaaaaaaaaaaaagtcatatacataaagattaatgaagagtgccaaaggtaattagtgttgaatatttattttccagcagcttcaagtatttatggtctgcttagacccaggtcagagtctaaggtttctggccctctgcattcccaagagaaatggaggtggggatggggagaca

SEQ ID NO: 115693 - DNA, 1121 bp, Homo sapiens
acagatacttctcctttttgaagaaactatacaggcaaaaaaaaaagcagtcaagctgagctagtttggcatagtatattgcaacataggcataggcaggatttatattctaaaaaatattctgtgttttttggccaaggaacagaaactcctggtcaaagtcataaatgaagcagcagattcagaagtagctgagtgttagtttacattagtgaaacagttacaatgctaaagcagtgatgtgtggtgccctatgaattttgttacattacagtgatctagatttcgttatatgataagctgattaactttgactctcccgtgggaagacagtctgcctgtgggttttgtttgtttgtttgtttgtttctctttaccattgccacctttaccctggcttttgtaaccacattcagtgataagcaaaataagtttaggtttcaaagaaaagtatcagtttattgtcaaataatatggcattgtgaatccgcatctacgtatgccatccatctgcagatggatgtaaacaatgaagtatgagaatagattttttaactcttatttcattttagatttgtaaccctgtttatctatttggtcttgaatgaaagaagcccttcacagcagcttactctttacagcagaccacatttcaaataagagattagagcataaaccagtcggccggtgacttaagtacaaaatgtcttatctagctttgtacagtctatccatttaaacaacttgcctaaaaggcctatatcttttgttgtgttgtcatcacaagccacacctagagagttcgtaattgttccttagagcttcttcagatgttttctgctaagttggctttatgtaaggtgctgaaagccacctgaaccctgaactcctgacataattgaaatgctctttgtcaccacaaaagcctgccttttctgcaacctatatggaaaaggctcaagaaggaaatggacgggatccatgtcaggtgatacttgtgggcctctttaggctgggtagagataggggtaggggttacgtaacaatgatttcaaacccacaacatcccttcattctctctggtgctagattcctaacttatgtgtttgctccatcagttc

SEQ ID NO: 115694 - DNA, 1153 bp, Homo sapiens
aaagcagacccctctaggcttgagaagcttacccattgcactccctgtgggagtgtctcaggaaagagcctgggttgggacttgcttttagcatgcttcccaacatccattccctttcctgggaccaaaacgcattaaatacccttcaaggcccaggaggccagactctgaatacaaagacttggtatagaggaaggaaaaaatacttttcattctcttcctgcagaaagaataccacaaattagtatctcaataaagtatcctgttacaggacccattgcccaccctctctagcttctgcctttctgcttagaaattgtggctagcaatatttaaaaggacatcagcttttctttgtaaaactcacattttccaggttaagaggttaaaatattcatgattaaaaatttttgaaagctagagtacaagcatacctacattcatactcccatattcctgccactgagaagtaatcactattatgatttatgtacattttcttcctattcatcttctttgcattctctatgcagtagtccctcagtgtcccgaggagttggttccaggacctcccttggaaaccaaaatctgaggatgttcaaaatctgatataagatgacatagtatttgtatataacctacccatatcctcctatatactttaaatcatctgtagggttcctataacacctaatgtgatgtaaatactgtgtaaatagatcttataccgtattgtatagggaataatgacaagaaaaaaattgtatgtgttcagtacagatgcaatttttttcaccaagtattttctgtctgaatttgtttgaatccatgaatgcataactcacggatacagagactgatgtttaatatcagtctttggatgctatatattttctcttatgtctttgtaagcatttttggagtaatcccatcttgtggtgatagtatagcttgactacattttattcagggtttttaggagaaagagactaatcatttgtccctcactgtcttttgttcattgtcatcccagaaaaaggccaaaaagaaatgtatgtataggggagatttgttgttaattggcttgattagaaacaaaaacctgccacataaaagaggtcgttaattccagggtggttgttgagtggtctcc

SEQ ID NO: 115695 - DNA, 1743 bp, Homo sapiens
tcttccagacctaaaattctgttaccccacaaataacaacagcaaggaacactcattacccagactgaatactgagcatcttaaagaccagcgtcttctggtaattccccagtcctcctgtctttagcaacagaattggttccttgtggccaatttcatctttgcaaaatgagagaatgactaagaaaacattagtggatgtaaatgaggaaaagaaaagacatctgtcaagttaattaagggaaaacattcctttgacctctttttttttttttccgcgcttttcaccaaggtgggctattcttcgctccttagagactacttcccttttcgtgttagaaacaaatagtagggaccaagcactaaagtataggataaacacgcaactaattttaatatccgtttggcagttttcctgttgcttctccattcaggaaacattttcttctacttctgcccattatcacagctttgacattcatgtcattaacagaatgtcattttgcaagatactgaattaggagcagctagcaacaaaacatgctgaacagaaagacactggctttttgccacatgacttctcacaaaaaagaacaaagtggagctctggtgtcggtttcttatatttgtatgtttgtgttccgattgtggaggcacatgaaatcagggacagttcacttgtgggcagaacgttatgccaaactgctatataaaagccaaatgctgtagagctgggaggtgttaaatagtcatgctgttcattctgggcttgaaataaatttctgttgaatgtcataaaaggagatttggtggtcacggaagtaaacccccttcccttttgtgggtcaaaaagaagtggtccttgggtcctcggaagcagaaggaaggaagagacccttttatttttttggttagtgattagctatgtagctaaattatagactaaaatatattcaccaaattaaatagttctagtggtagcaagttaaactgagatttaatttctgtatagagaaggctgaaatgggtaaaactatattataataatttagttgctatgtgtatattcaaataagttttggatataaggacatctcccaatcaagctttctaaagccaatgaccatttcataaaagcaatgcaattgggacatgaggtacaggagaaaaaagttaatagtaaaattttactgtgttatttccaaaaaggaagattggaacattagatttaagttattgcattaactctggcttgggactgccaccactgtctaaggtcttttcaagagttacttccttatccctggccatttgaaaataatctaatgccattaaattaaattgattaaagtaattttaacagtaggactttgaacttggtttttctgctacttggaaaaagatatatcaaattgtgaatttaatatacttacattgagtacaaaaaacggaagttaaaaacaaaaaacaacttgtttatgtcacacacatcttccctacccccagcacacacttgtaaagtagaggtttagaaaaccattaatttgtgttttgtgtatcttttcttaattccccagtatgtctgttgacttctctttggtccctaataataactgacctatggacagccaaccacttggatgtctgtctcataggtatttgatctgacctttccccatgttataaaactggctccaccacctccacctttcccccaactttgctactttgataacccagctc

SEQ ID NO: 115696 - DNA, 1049 bp, Homo sapiens
tcaaatgttcatcttctctaaaggtgtgaggaaatagttagcagatgttcatggacagtaaagctttggtctatgatgggtctcctgtgcaaatttatcaaattttcattaggacgatgtaataattctagctttccagaattaccggggcccctcttactcaattcactatattattactgcccctcaatggtggttagtcttattttttactgaatgttgacctttcaagtcagctgtcaatgtaaaaatcactgcctgtcggggtttcctctcttcatttttcttgccatggtcagaaatgatcagaatttatgtctcaaagtgaatgtaatttaaaattaagttggatttcagctactcagagtaattggaaaaggccacagcctggtgggcttcacagctttcagagacctggtaggggatggctaacaggttcttctgccaggagacaagtggcagacccaggtgtgaaacttttacaggtcccaccaagcctttcttatggagcacagagcataaggacaacttctgcagaaatggaatggggtacttggaaccaaaaatacatacacctcctttcccacctgcctccagcttagtagcccatagtcctctttgtccctcacactgagccaggcctgacttagatgatgaaatgcatggcctgtctcttcaccttcttagcaaatgggaggtgctgttggcagtaattaagaaattgagaagctccttgtgaaactgttttcgcgatggtaatagtgaactcagggagcaggtgtggtgcctctttcagtcctcatttcacctgcctgagcaaaaaccatgcagacaaaacacttcctggtggtgacctcatgtcactccaaagcatctccacccaagcacctgttcagctgtgacattcttacacgcagtgttctgtccatgcctgctcacctcctgcccctcaggggcagccagtcctccctcaaggtcctatcatcagaacatcttttccccttcccattcttctcggattctgtagtcagcaaggtgcatttcttgtg

SEQ ID NO: 115697 - DNA, 1041 bp, Homo sapiens
atcagtgaccacctagaaagtaaaaggtacatttaaaattcttcctagtcacctctcactcttgtggttttgagaacatggtagtctgtgacaggacagtttcggtgaccgtcacagtgatttctgtggctttggcttttctgctcctagctcactcgtcagcagtttactctcaggtttatctctgaatttgagttagaaatcctcagctgtatgtaaatagagactgtcttcctccagtcattagctggtgagagagtgtggatttgtgtcacaggcaaactaactgttccacagagacaaaaggacttgaggcaggggctccgttagtgtgaggatcagccagctgtcttcattaagtgcccagtgccatagacagaaggctgaatgctcaacacagccacagtggcctgtacccatcaggcaaccagtaagggaagtttaaaagtctgtatcttaaaatcaagtatatatgctaaaaagcattttctttttttggcacatttaaatatcatgtacaggaatgatatctgtatctttgaacttattcattctggcataattgtagtttcagctttatgatgctttaatgcagattttaaaaactgactacagcaatgtatgagtacttctctacaaaagccgtgtaaactgcaggctttgaagttctaagctttcatgtttggagtaacagtgagtaattgcagagcttgtcatgaagtgttcaggtgtgcacacactgtggcaacccagaagtttagagggttcaagcctggggaggaggagcccatcaacactctgcactggagttggtagcatattttggtttccctagtcaagggaggagagaggtagataaaatttagaagtgtataaatacaaaaacagtcatatagttttaggggggagagatgaattttgcttgaaaaaaatctgaactattttagatgtttttaaaaatatgtttaaaaacttctatttacaaaagctgtatatattcagtgtagaaaacttggaaaatataagaacaaagaagaattg

SEQ ID NO: 115698 - DNA, 1377 bp, Homo sapiens
caagccatattatctgtcaaagaacttgggtcccccacttaaatagatagtggtggtggggtgggaagaaacctcacttttccaaaaagaaatacaggcattttttttgtttacagtcattttgttgtgatatttatcatttatgggatgttttaagtatagaaaaaattctagtattattttaggaatgaactatattgctgtggtacattaaaatagtagtcaagagataagcaaggtaatagtaagctaacaggtctcatgcaactaaatcatgtcaagaatagtcagcaggagacggcacccacctgagaaacacgtgggctgagagaggaaaacttcctaacctttgtaataaaaaccatgcatttcctaagtattccgctgaccctcctgctgacacccttctcgttggtggagagtcgctgatacacgtatacctaaggacgtccccaaagcatgagcattctaaagtggtccatgtattaaggtatcagatgttgatgaacagagagactggcatttaattacatggactctgctcatcttttatccttagatataaagaagttatatttcaggttaattttcttaaagttttatcatggtctgctaacaatcaaatatgactttgaacaattctcttaacttggctttaatttccttttctgttaaaggaggagattggatatatatatatatatatatatataaaattttaaaatattccttctaaggctgtaccttcatatttctagttctttggctttaaagaagattttctttcaccctgtgttctcaggattaatatatacctgccttgtgttctccattggaggcatgcttttagtattccaggtctgatgacaaatgacactctcagcatctaaaatattaaagataaaagaatgggttagctggttgggcccaacagacataagatgtgagggcatgcccgagtgacccccagcatgttctggatatgcactccgcatttcatcagcatctgaggatggatgtgccctttggaaggaattttgagaggaaaacaggttgtcctgtggaccgtgcctcccaggaactttgaaggccaggtatccccttgtttatctggagaagcaacacatcccagtttgtggtagttatatctatccgctggaacaattaggcctaaagcctatttttgcacatgtgggaatgtactggaagtcctgcaatagttaccagagtgaccggccagtgtctgaaggaatgaacgtagtttcgaaggctttgagagaaagtgtgtgtgtgtgtgtgtgtgtgtgtgtgtgtgtgtgttcctcagcaaaagaacatgccctacttcagtgtttagagatgcaaatcatcttaaat

SEQ ID NO: 115699 - DNA, 1827 bp, Homo sapiens
gagtgcaatggcatgatcgtggctccctgcagctttgaactcctcaggctcaggtgatcctcccacctcagcctccttagtaactgagaactacaggcgtgtaccaccatgcctggctaactttttgtatttttttgtagagacagggtttctccatgttacccaggctggtcttgaacctcctgggctcaagtgatccactgacctcagcctcccaaagtgctgagattacaggcatgagccaccacacctggctttggagtgttttttttatgacatgcattgctgaataaaaatgtgattggtgaggagttgagttaattaatgtaaaatattacaaaactatttagcagaagtttgtcatctttatcttttagaaaaaaaaagtaaattaaaaatggcctaagaaacattgttctccattaggattccaaaatgataaatctgctagcctataggggaaaggtcaaaattttgttttgctgtaactatatgtcataaaatataaaagctaagcactcccttaggcattatctcacacattgttccacttgctagcacatttttaagtttttaaaatcatactatgaaatgattagctattataacatttgaagtttttttatttttgaaattataatttaattaataaccaaatgtagatcttgttatttattatctttattacatgtcttggtaaaacagagccaggaattcctattgtagtagtcctgggaaactagtccaggtgtaacattgcccatgattaattggtgatgtactcaggcctgacaccatcccactctactgctccactgtgggagatgcaccttgattgcccagtggcctaatctaatccaatgacctctttctgggaaagaaaaaaaaaattgagcatgagcaccctgcaggatttgataccaggaaccatttccaatttcttgagtagttgtcttctcttgcttcctgtggtgcttgcttctgtatttctgttcttgttggctccttttgcttcttgtgccattttaactattggaatcccttggatcacattctctgtcacacttaattgtggcataaactcttttaccaaggtcctctctttcatgcgtgtgccagtttttcccacagctttctcttgggtctgaacctttctcctgaacacagatgcatgtgtctgtttactaatagtctctccatctgattgtgtcctaccagcacctcaaatccagctgttacccaataacaaatttattttctccaatttctgtttattctctctgttattagcaacatcatccaccttgtcactcaaactagaaatctcagtatcattttttgttacaccctctctcccactttccctctgaaaagtgttttatacctgacccccctccccagtgccacagccactggttccaggatgtttcagtgacagagaactgggagcctgctttggcacttcctgggctccacctccatcaaatctctctcagacatcgaagctcatttttttgaaagacatgaacttaattatgtcttttacctaatgtaaaacatttcatggttcatcatgacatacgggagtatagtggttattaaagtgattcccagatgagcagcagcatccatcgccaccgccacagactagttagcaatacaaactctgaggctccaacccagatctactaagtaagtaactgtgaggggtggtgcccagcactctgtggtctaacacattttcaaggtgattctgatacactctacagttggagaattaactgccctgtaggttctaaagcctggctgtgcatttgagtcacatgt

SEQ ID NO: 115700 - DNA, 1073 bp, Homo sapiens
ctaccaggggtctgcaaaaggggagggaaaagtggcagtactttactgtccagcttcttagcgctagtctgccttagagtcgtcacacctgacctgacgtacaaaataattcaccatttctaaccccttgagtattctcagaatacgaagctttggcttcattaaacacagccttcagaaaggttagcattccattgcatccattgtcactgccaagatcacttgaaggaagccccgggtatcatttgtctttgactttctggccctagcaaagtgtccagcatatattaactctgcataagtgctttccaaatgatttaaaaattttaaatatgtgccttttatgtacctactttttcattcaaagagggatttaaagaccctgtcatgttctttaagagaataatcacaactttttttctcccatctcagttcgtcccagaatacctgaaggattcaacaccttgcaatagtaactgtggctgtgtaaggtagtgattctctgaaggttgacatttgtgcatacagaatctcaagagttgtgtgtggcttaaaacaagctccactaatcacacttatcaattattttcagattgtctactaaagatatcatggatgcatgtacagaacataaatgaaaggaccggaaaggccatgttcctattatgtataaaggcaaattatgttttatgcaagaaggaatgataagaattagagtgaatactcttagttttgcttctgataatcagttgttgaatctagatcccgtgccttgattttaactgtcctaataattttaaatattataatattacatggaccgtataataggcattctgcctcaaaaaaaatgaaagcaagcatgagatgcacagattttaagtcaaatattcatgtttgttagatatgattaaaatgaaaactggtttgaacaaacatgagtaaagttgatagtgaaaatgtaaacattatggttaattaatgttttctttaattatatatattatataatataatatataattgtatatattatataatatatataattgtatatattatataatataata

SEQ ID NO: 115701 - DNA, 1038 bp, Homo sapiens
ttgcagcttgcttctatgtggcaaagacacaggacttctccaatctaattacaaagcaatcaaacaatttaattaatctggaaatcactttcttaacaatagctgctgctaaaatgaggcaccctgtgtagtgccgttaggtaaagtatgtttttcctacactgtttatgtattagccatgctagttccccagggggatcatggagttaattacctacctaatgcctgaccactactaaggtttactttaccaggtcagaaacatcagcagcgataccagcagtctataaagtgtcctagcactcaaacatccaagagccagcaaatccctgggagcagcaggattttagttataagcaagtgctgcacatatgggcagagaattaactggcaccagttttcatttgggagtctctcaggtattgctttgcagatgggtggatgaattcagagagcagtgctatgaggagtgaaggtcatgtataagactcgggtttcactccttcttactctcatcctggggaagcactgtgcatgtgcacagcagtcaagtcctcatcgctgagtttagaacatataacatgtgctttataatttggcctgttctaaattagcagtattttgatcactgtataacaaaatagtattgctaagtcttcagagactgagtaggagtcaatttttatttcaaataagaacaaagacttcagagattgacttctacctgcctaatctgctagtcttataattcctccctaaggaaaatggaggaatttctgtaataagtaacacagaagtctatagaatgctcattgacccttttcttctgttaccaccacgactccatttctctcccaaaatttcctattagagggtcagtcattttcccaatctacccacattggaaacatcagtcacttttttagcctgtatcctttttcactcgtttctaatctgctaacgactatgcttggtttgcccaccagaatatcctttctcttgaccttccatgtcctggtctaggtccctcctcctctg

SEQ ID NO: 115702 - DNA, 1050 bp, Homo sapiens
caatgtaaaattgctgtaagagttgccacgtgcttacgcttaaaattgtatttatctcatcacgcacagatgacatcgtggactgttcccagtccacaggctgccctttgacttctctacactagagtataaagtctctgtggacagggatattatctgctttgttcacctaggatggtgtgtgacacatagaaggactttaatattttttgagtgaatggcttctgatacccctcaactcactgacatcctccttattgtcatatccactggacattttactggaatattactgtattcagcagtgttaaaaccctccttttctctgccttccttttaatttattgttcttgggacatctctgaccatttcttctctgcctcttccagggatttctcttccaactcccgttttctacaagttttctcacgatctcatctttagtctactcctcctccctctctcctagggatcttgtcagctgtcttggattagagacctatagactctaatggcttcaaatccttacctcagaccagtagtcatctctcacatttcagaatcatggatccacctgcctactgaatatctttctacctgggcagcccactgaagcagcagtcccaacctatataaaactagacagcatttcctcaaccacacatgcttctcccacattcttttcatccatcattggcactgccatctatccagtcacctgctagaactctgagaatactagactccctctctcccttcatcaagcaacccattagaccttcatagtttacttcctaaatatttctacaacccttctttcctgttctataatcactacctggctcagaccctcatccagctcagaccctcatcctcacctatctgcctccctccagtcttaactcttcaaattcatacttttatgcagctgcaagaatatctatctaaaactctttattggctctatcttgcccataagtaaaactataacatggcctgttgctgtgcccttcctctcaatgcatttagccataatgaattgtactgact

SEQ ID NO: 115703 - DNA, 1050 bp, Homo sapiens
ttctcagtagatatgaaggaatggaacacgagatatgcaccacaacttaagaatcattccctagttgttgtcggtgctgctttgatgcccgccagagcctggaaagatgtgcctctctcagatacctgattctaagcagagttgttgacccaccgaagcctttccaagctgtggtgattgcatcagccaatgagttcctatgcccagcctctaaagttcctatgtctaggtgtttgcaagaaatggagttctggggaggagtgtgtagtgaacaatttcaaaataccaattgctgcctttttttagatttaagattttcccatgggcacattggagtatagagcaatttttttaatatgggagaaactatttttcttttgtttcagcttagtattcttatccaattgcaatatttttattaagcttaactttttttttttccaacttagaaatggctcatttgggaaactacgatagtgggacagcagaaacaccagaaacagatgaatcagtgagtgtaagtatatttcttgatgaaatatgatgttggtttttctgtttagcatctggagactttggctatgttagtttatttgttcaacaaatgtttattgtgcttctatgtgaatatatgaataagaatatggataagatctatgaagaaaaaagaccatgtgctaccattacgtaaagatatttgccatagtctgtccagtcccagaagatttcccaaggaaatggcacttgagctaaatgtaacagattactagggtaagaaggggcaaaaggaacattccagacacaggctacatcagaggactaagcaagggagacagcagaaactagagcacttgagtaaaagctggatgcttaggtccctgttgttcatgtttatcaggttttttgtttttgttttttaagagcaatgggaaatgactgaactttggaggaggtgtatgggtatatgagggtgggaggagtggacagggagataacccagtcagagttatggcttgaaaaaaaatcacactgactgcagtgcagaaagca

SEQ ID NO: 115704 - DNA, 1551 bp, Homo sapiens
gatttttttctgcttatttttattacatatcataaaagtactcatcacaattagtcttcttacagaaagaaatatatattcttttcagtctatagtatgaaataaaatggaaaaggagatacattcaagaaaatgcagccagtcttcccgatttttagcttttttttctttctttaagaggtttatggactaccttttcaatgctccaagtaatcttatttccatcaattttatattaagtttctgagttcgagtgaccatgacttgttgacataaagttaataagatgaatagatcagtaacaatttcaaagcatctaatttaagctgttgtcattgaacagaatcccaaaactataaaactcaaagaaacattagatatccttttagtttaacctttgcatttcatagatgagcgaaataaagtccaagaaaggaagacttactagatagagtggtagataaaagacaaaaacgtagcttgccttattttcacccagtgtcctttctaccacaccaatattttgcttttttaacctttgttgtggttatcttaacaaaaacaattactaacatttatcacacatttaatatgtgatatgtgttgggcagtatcctaagttctttatatagattatctcatttaattctcgtaagaattctaacaaagatggtattattaccatcctcgtattacaggtgaaggaaccaagagtcgtttgcctaggatgtctcagctggtaagaggcagagctaggatttggactcaggtagcctgattctagaatccatgttttatgctggtgtattttaaattgttaccatgatcctaaaattatgctagccgttctttaaagtacagtttcacttcagagccaaacctcctctcttatgaatactacttcttaaataaaaatctgtattttctccatactgtttcttagttagaaacatgataggttaacacatagactccagttgtgactatgatatgctgtgtctatgggtagagatgatttcaccttgaaattctgcagtctaaactgattttctacattaagccttcatcctatagctactaactctttttcctgtgttacagggggagactgtgctactttaatgaaaaacatgggtcctctccctgttgatatggccagaatgtactttgctgagacggtcttggccttggaatatttacataattatggaattgtacacagggatttgaaaccagacaagtatgtacacaaatgaaatatatgtcttcttttgcccaatacaaagttctcgtatgtttataaagatgttttcttttagtcaatgtacatttttaaattattccataatgtccaaaatgagttgttttaacagtatatatggtaatttgtatgtaaaactttaaaagatatgcttattggaagttcaggaaactcatggaaaaaaggatacaatgcatatgtatatatatattttattatactttaagttctgggatacatgtgcagaacgtgcaggtttgttacataggtatacacatgccatggtggtg

SEQ ID NO: 115705 - DNA, 1021 bp, Homo sapiens
ataggtaaaactaccaaacagggtcagattctcaatttgaaagtaaacattacatataatttaacattagagcagaactgtaaacttcccgtctttggtaataattcttttcgttggtattttaaatatctttttataattggtgctcttaagttctttgtccatgtggttccatgtggttgagcaggtgcattctgggcaaaataattggtgactagccatcttgctcattttaattcatgtctaatattccaattattctaatattgcaattatcttttaggtctgtggcacacctgaatacattgcaccagaagtgattctgaggcagggttatggaaagccggtggactggtgggccatggggattatcctctatgaatttctggttggatgcgtgccattctttggggatactccagaggagctatttggacaagtcatcagtggtaaatatcatcaggagttatctttaggtcactgttgggaagcagctatttaatgtaaatctgttgagtgtcacagtttttactactaaaatgttaacctttatcaaacagttgagccaacaaaagaactcactcatcaaagcatataactgacattcttaatctcaagagagcaatttttgttgaaaattgatctgaagaaatgttgttaacatagaatttggaaatgtactagcaacaaaaccattttttatagtgtgctttttctgcaaaggaaattggtgtgggatttacaggcaatttaattgccgtccagtcttcctttccatgataggaaagttacaccagggaagaaaaggttaatgtgggtaacatttacataaatagggaaaatggctaatggcataatgaagaagttaacaaaaatgtaataaaccctaaaacaaatgtctaccaaataataaataatgagaatgggaaagaagcaagttgaatccacagattgttaatgatttcattggtagttgttatggcgtaatgttatttctgtaacagctgttcatctttcattt

SEQ ID NO: 115706 - DNA, 1180 bp, Homo sapiens
aactttttggaagccaattctttgaaagaaaaatacatttaaaaagcaaattaaagatctgcttattgaaatattctcttcctaccttgtaaaaaatctatgctacttatgtcttgtaaaataatgcttctcaaacatgactgtgtttaggaatcgactgaagatcttgttgaaaggcagactctgatttagtaggtccggagtgggcctgaaattctgcctttctgacaaattcccaggtgatgtccatgttgctgggacctggaccctcttgtgaacaatatggttataaacaacttttcttccttctagatgagatcaactggcctgagaaggatgaggcacccccacctgatgcccaggatctgattaccttactcctcaggcagaatcccctggagaggctgggaacaggttagagcccatgtgttttaattttgctaatatgcaagaaataatgtctacatggagcactctgaagcttttgttgttgttttgctttttgcataggcaacatctgttagttgatgtagaacatgactgcaacacattatagcaataatattttggattttgttttctgattcaaaacagtgtgtacgctaagagggttggttgtttgtctttgttttttgttgtttttgtgtttggcaaagcagaaattatgcttaatttgtttcaataaataaagcttctctggaagaaaacctcaaaggcacatgtaactcttctatcccgaaaagcatgcatcttaaataacttgaaacagaggattcgatatttggaactctttttgtttttgtctttaaatatacatccccatacggatttgacccagcacgttactatacacaagctttgaaatgggttatcagtacttggactaattactagaaatgagtgtctggggttgaaccatgctgtcctgtcacagtgatcagcaccgtgacccaagaaagagaattaaaaaccactgtctttcaggattaacgagatagtagatttgtttcttgctgattattttttctgactgttctgccagtattttattcccttttcttctctgtattctgaatagacagacttagcaatcccagtatagagtcccagtctgcccaagtatgtgaatttatgtagatgagactaaatattaaatataaatgcatatagtctagccagc

SEQ ID NO: 115707 - DNA, 1019 bp, Homo sapiens
aggtaatcacagtatgaagtgggcggccatggtgtttgggaggtaatatttgattcatggcacagcctttcatggtatggggggggtaggggcaccagaattatctctgcaaggtttcaaaaatatagattgttgaaagaaactaattcctctggttacatggagtcatggattgagaattagcagacttgtgtacaggtagaatgaagcctgaatagatgcctcttccatctcttcctcctccacgtcacctttctcaaagcaatcacatgttgttaatgttcgcctgacaccgtctggacttactggccacataggagtatgttctctggcgtttactcttcctgctgtctctctcttcccgtcttcccacctctcctatcctggattttcctgaatgtgtttatcccttcttctttgtacagttggcagtttttcagagcacttggatcagataaatggacgaagcgagtgtgtggacagtacagataattcctcaaagccatccagtgaacccgcttctcacatggctcggcagcgattagaaagcacagaaaaaaagaaaatctcggggaaagtcacaaagtccctctctgccagtgctctttccctcatgatcccaggaggtagagagatactacttgcatgaaattgtgtgatttgtgcatgtggtcccatccctcctctcccaatttggaatgctgaatgagatgcaagattgcttgaagtaataacgggtcatgtcccaggacagctcttgagagcttctgcctgcagactctgaattcttcctgcaggatttgtagggccgccaaggagcattttggcctatttcatctcactttctgcatcaggggtacaagagaggcttccttcccatgaaagcttgtttctgttttgtttcctttcgttttcttttctccctccaagttaaatgataaattttccttccttgaataattttttttctctagagtatgtataatttatacactttatagagctgtttacaacatttg

SEQ ID NO: 115708 - DNA, 1083 bp, Homo sapiens
tgtctcccctgtaatatgtagacactaatgattctgcttaatacttggggggtggtgtgtgggggcatttgagttcaataaagatcttcccagcaactgtattgctcggcagtcagccaattatttgggcagaggctatgttcagacacatcaagcctgtgaggccctaccttctgctgcctgaactgtgtgtgggttgtgaattacaactatctaaattgtgtgtgggttgaggaatgccgcaaatagaaaagttttctgcaaatgtaccccattcccctgtgcgagaattgcttgaaatggaaccagaaactaccaaatttagcccggctgtgagaacttacaaagggaaggtcagagtcaccatagaagtagcaggacaggagaaatttaaaggtgttggtcgaagtaacaggattgccaaatctgcagcagcaagaagagccctccgaagcctcaaagctaatcaacctcaggttcccaacagctgaaacccctttttaaaattcaaaaaaaaaaaaaaaaaggcgggggggaaattacttaaattggaaggatgacttaaagttgatattgagctaaatgcattgaaggcagaatttaaagtttgtttgataacaagatagctaacagaataaaacatttagcatatgtatgcaattttggaactaattgtagtttcagtttttgcacaaacacaatcttgtcttctttcctcacttctgctttgtttaaatcacaagagtgctttaatgatgacatttagcaggtgttcaaaataattgacagagtttttttgttgttgttttttgttgttgttgtttttgagtttaatttatgtcagctttgcttagtgttagaaggccatggagcttaaacctccagcagtccctaggatgacgtagattattctccatctctccatgtgtgaagtagtgccaggcctgcattagttgataagaatagaatgattgaatagaatgataaggttttcgagaagagaagtgcaccaatgttgtcttttctttccacgttatactgtgtaaggtgatgttcatggtcgctgttgcacccgacagtaag

SEQ ID NO: 115709 - DNA, 1113 bp, Homo sapiens
ctgggacaccatgatttggaaggtaaaccatttttaaataatgatttttttaaagactgtatgaatttaggtgaggagcttgacctagactctgaactagcacactgaagttaaaaagatggactgtagagagatatgggctgtgggcccaggaacccttccataccctcctgccttggttgaagacccatttcgtgctgccatccaatgcctaactgctaatttcattgggagatagaatcacatgacttggatatattcttgattaatttaatgtgatttaaaaatatcctgtattcctgcctgtccatcaagttctccaaattcttgtcatttctaaatggagaatggagtaactcaacaaagtcagagagggcttttttgtttggctctttgccaaaatgcctataggttagagggttacacagaaaatctactttacagcagttgtacgttaagtagctgtggattgctatttgtcaaacatcagaaacaattttattttggggaatagaaagagaatttctctgtatgttagcagggacagaaaatatgcttctgattaatgggattgcaggcagtcattagaaggattgaaagactggagaaaaattccttaaaattttgaactgttgcatatgatattatataagagtaagttagtttacttgttcgtaggattcctttataccctttgttacaataacttatgcatgcactagcttggagcctatatcacaaaactgccttggttatttgaaaatattacattgtagataatgttatctacatataaaaagcctttgctatgtgaataatcatgtcagaactgggtaaaaatagtttagtgggcaggtatatgtagcaaaagagaatagaggcatgatagagtgaatctgaggaaaaatcctgttgatttggatagtttaggctccaggtcgatctcggtaggggtggtggttacacaggtattaccaaatacctcaggctgctgggtcttctgcagtactgtgaagaatttgaggatgagagaaaagagaacttcccagtcctctagatgtgacagtccttgtggcagtgccatatccccctaaggaggagctgggttattgg

SEQ ID NO: 115710 - DNA, 1059 bp, Homo sapiens
gctgccaccctggtttgtgtcctcactacctcttggccagacctctgcaacacacctttctcgcacactgtggttagattgatattcctggagtgcagctctgatcccgttgctcacttttcaccaagccctttccgtgttccacactgtgggctgaattactcacaaactcagcatgggcatgcgtgatgtcctacagcccctacctaaatctctaaccccaatcccactgctccctctttggctccagacggattggactgcctgttctagctcttctcagaatatgacattttcttggtcacttctgtaactagcgtccgaccacacatgccattctgtcttcagattcctgcagttagtgtgctttctccctcgtttgaaccctgcagtgtttagtttctgcctctcttatgacatgtactagtgttgtggctctgtgtactctgagccacattatcagcgataatgtcacattatcgctaagacattgcctcatgccgacactcctcccctctgcccccgcccggtgttcttagaaggcagggactgccttactaatctctgttgtgtcaagcaatagcacactggcctgtgtctgtctgccaaatcgattaagtacttgttgaatggaagtagaaattccaattaacacagatggcaaagtgtgctgttcattcttaagtctcgtttttttcattcctaggtgaagctcgtgtgtggagtgccacggtacaatcagacgacagatggacagtgtgacaaaagtgtcagaaaggattgggcctcgctgtgagagtcagcctggattcaaagtgttgacaagttgctgaaaaggaagccagtgagaggactgtggcacgcagaggaagtggagccctgtcttcggtcacaccattgatggaggacagatggacagccgtatggccagtcacctctcctcttaaacctttggagagtggtcctttgtcctctgctggacacataataggaattctaacacattctctgaattcacttttcataaaaacgtaaaatcagactgctctgtacaaccag

SEQ ID NO: 115711 - DNA, 1036 bp, Homo sapiens
tctgggcagaagttaccttggcaactgcacctgaattgatgtgtggtgcataaaagcttggtcaatcattacacaactagaaatttgtgtttgtggggttggaagttgttataaaaatagggacacagtatccgagaacctgtttagtgagtgtcgttgaacactattattatagttgtcattgaattaaacatctactatatttcttatttttgtaattggcattataggcggagtattcctagtctgaaaatatgaaatctaaaatgctgaaaaacccaaaattttttgacacccaaaggaaattctcattagagcattccagaattcagattcagtggtcaaggggtataatgcaaatattccaaaatccagaacaacatgaaatctacaacacttctggttccaagcatttcagataaggaatactcaacctgtgtatatctaataataattttgggaaagtggagggtaagtctaatataagtatatttaacatgatttgtatggaaaaatgtagagagtaataaaatgaccacagaactcggctgagaagaaaccattgtttttataacctggtatctacctcttggtttcctctccaggatcgctgtggccaaagctgaaacccaatcctatagttagtataaaagtaaagggatttcacttcctttgtgggtagtgtcatttgtagcattaatgcctatagtctggttcgccttcatgagggggaagaaaaattcactgaatactttgcttaaatggaaaccaccttcattcaaaaaccacttattgcttattggagatggtccatacttgcgcttcaggcacagctgtgtctttaaggtttatcttctgttcggtttcacacagagacaagccttatgctcagctttgctgttatcagctttgtcaaataccggtttcctcactagtaaatcacacgcatttttcttttttctcttgtgtagtcttctttcttagggtctaagaagggaatgggaaggaatggtttaagatgggtgggcctaactgc

SEQ ID NO: 115712 - DNA, 1022 bp, Homo sapiens
taaatattcctatgaagcgagaattcaatagctcctatgagttgcatgttgaattcatatggaaagtagttataaggacaaattttatatgttagaacctgtgagactagtttcttttgcctccgtttgtatttctttgaaaagcttttgcagtgacaaattgtgtgaaggcaagaaatgatagttctgttctattcttaccataattgaattctttagttcttttctttttttttccttttaacaccctccacctccacctgacttagccagtttttcatgttatgctgtgtttattgcatttagaaggttattcctcaccaacccccaccccaggtctaggaaccacatgcagttttgttttgtggacttggcacacctcgttaatgggcagcagggtagacagagggtgcgaggacagcctgcatgccaattgtgtgtctgtgtcctgctgagccttgctgccctctctgtttttaaaaggaaattgtccttagactctggccaagagtacgttctgtgagagattcctccctgtacgatagtgtcttacttttccactttgcttgtatgttcttggaaataaagctgtgatatttaactttttgagagaaagagtcaaaaacccattaggaaatcttatatacggcactgtactttcttccaatacattttgcatgcagtttttaggaagccctggcatatagattgaatgaattgttttaattggataattttggatgtttttggacttaaatacattcagtaagcatggtctgagtccttattttgtgctggaaagcaaagataaaagatgaaatcaaggctcaagagccagcatgccctgagatgctctctcatgcctctcttccacctttggagctgtgctttttctcctctgctagtacagctcttcccctagacatctgcctgactgacccactctcacttctctgctcaaatctttcgtctcatggagtctggctctactcacgctattctatgctgggacctacctctct

SEQ ID NO: 115713 - DNA, 1109 bp, Homo sapiens
taaatagatttaccttcgtttctgttgtttttgaagaagttaaatgtctgctttaaatgtttccctgagtttcaagttttcttatttcagactcataattatatcattttgattaaaatggagcacagactggagttattacttgcttaaaagccaaaaacttgagggtatccagcataagaattgtgtgttttggtctgtggatagcagctgcttgaagtccataaaaacaagaaacctgaagttgattcagatgaatctgaagtcttgtacctgaattatgtcaaggttagcagtaaatgccatttaaaaagactgagtacaaattgccaaattcctttgaatgccaaaccatatttctcaggaaagttggccactgccaaatttataacatttgtgtttctgttacctgaattccaagggcagaggggtgattgagggggtaagggaaaggcacaggtgaattttattttcagatgtctaataggacagtgtgacattgcccagagatagtctctcaaaggtagtgagtgccagcagaacttctcgaatgcgaagttgagaaattttacttatttacttattttcccattgaaaaaaaaaaaaaaaactttaaatgttttctgagttaaaaaggcctctgactggtagtcctgacacagcttcttgagagtctccgagagagcctcttctcagtacaattcctaagaagataggaagaaaaaaaaaaatattcttaacacataaaactagaattagtgggaagaaatgcctactgtaaactcaacagaaccggggttaaaaaatataggataagttttgactacctaaaagtagcagggcagacccatctcttccctaactctgtccataattcagaaagggcccagggaactgtcctcaggaatgctcttcccccctcttccttgtcctctccgacagagcctttctaatcagtaggaggtcacaacttagaaaataaccagagagagctggaatggtaagttaggggctattactgttatattctgagaatcctgatccatgaaaataaagtgctgaaggtggggtagagttagaaagacctgtgttcactgagggttttgagt

SEQ ID NO: 115714 - DNA, 1049 bp, Homo sapiens
ccttgtttagtgataaacaggaaaaacctaaccgagcctactgaaccatgtccatctataaaagaaaaagggagatcatactggagatttgaaagaagagtagacctccagaactgattgattataatttatttctgttatagtatttccacttagtattatgatttatttctgtccctcatgaaagggacagaaagtagtcaggcggttatgagatgaaaagacagtaagatgggatgaaatcggagtgaaacaataaaaaaaagactaagttaaaaatgtaatagcatattaaaattcatgtgtaagggggtaatgagctgaaaataaagtctgtgttttgaaggagaaacaagataaagctctttggaatccaaaggataaaaacataaaatgagggagaagatatatagagagaatatctaacaggagaattacaagtgttgataaacagggaaccaagtgaaatagaacaacatcattataagaagttttcatgcacgtgtgcagatttgaaagtgttgccgtatttttcatgtgaaatcaatgaaaaatatgtttgggcatttctatttaagaataatgttaaagtaccttgccaaaatatctggcaagatattagctaccagggaacaaagttgtttttcttctcctttctagcaataaatgccaaaaaaaaaaaaaaatagtgcattgattttagtagagttttgaggagaaaagatggtgacttaagaacttactgagcttcctccttatatgttatgtggaaaggcaattgagaggcattcgttgataagcaggagctcaggaaagatacactaaacctcttgttcacgtgggagtacctaaaggttgcctttttattgttaagctttataatttaaaaaggtgtaaatttaaacttaattcattttggttaacttcagtaattatcaaaataataaaactataaagtatgtatcttctaaacacctagaaatatatattccaaaagataggcaacaaagaaagaataaaaataatacagggaaaatgtttactatata

SEQ ID NO: 115715 - DNA, 1043 bp, Homo sapiens
actgtttttagttcattacattgagatgctacattttccttttcttaaatacatgcaagatgaaatgttttacctctgagatgaaaaatttgaaatttctttaatgtgactccttactaacacaattgcaggcaagcattgaacatttgctttgttccaggcaccatgtgctgtgtgctctacctacctaatctcacttagtccacttagtgctatttgcaggttgaggcttagaaagaaaaagaaacttgcccagagtccaacactagtagctggtaaagagctggtctttgcatgcagcctctctcacttcaggatgggtgcttcccagcaccacactgtaccaccctcaagacgagttgcaggaggaaaggaacctctagtggtattaactaaatcttagcaagtagttgcctgtaaattgtagacttttaaatacaatctcacatttctgtgatctttacccatacaccagttaccttcaaactaatttaagaatcttatagatattaaaaatgcttgattggccaatatctcatttctgtcaaaatcatgtactagaagcatgtatcaaatcagagacttatttatgacaatttgcacacacatttggataaaatgcatcaacttctttcaaagtttacttgaaataaaaagggaagaatacgaagtatcacaggttaaagcaatgccctcattccatttaggcaaaagtgttgtgctatttgaatagtgttagtttgagaatatggagttgtactccttatagcaattccaacctagaaaaatgtttgtgttttaattgatgggttaggcaaaaagttaatctttgcatagaggaaagaaacagctctgacttagaggttttggggctagaacatggatcaagtgtctgaagtttttcatgtggcctcaagttgaatcttggtcagagaatacacggtggtcaaacttcacaccatagtcataatgtatgaagccaaaagaaaagtcctagttgctgggtgcttccattatatcatcaacctgggtttaatgatttt

SEQ ID NO: 115716 - DNA, 1187 bp, Homo sapiens
ctggttatatcccttgttaatttgaagttttcttccttcgttttggaatgatagttataaggcaacatgcattttagaaaaatgcacttgtttgaacttctcagatctaatgtgactctgtgggactagatgttaagaaaccatatctttaactgaacatcatctatgatattccatctcataacatgttccatgagttttatggacaatttctaagaaatccaaagtagcatgcagttttatcaacctctctgcatccccttggcacaaggaataatttttctgttattgaggggcaaaacagaggggtaaaggcactcatacagttaaatgccagattaagtcaggcatccaagtcactctgctttgggttgattctctgagactcagctggctgacttcaaaaggacgaaatagatttcaacattggaaaagaatacagtatagaatatatgatgggtcttgttagctatctcttattttctaatccaaagagcctcctagttggaggaaaaacttgaactacataagtatatcagcaaattttcattatattttataattctttattgcattatacgtgaatatatttagcagtggtagtacgtcttggaaagtttaagaatttagacaaatatgctttttttttaaaaaaaaatagttgagttttaaatatgctgtttgggtccttatgagcatgtgggagatatataggagaaagagtttgttgctgatgttatagaatcaccaatgcagcattgcacttttgttcttttccattcattgttcttgcttacatggagcacttgcaaataggctggacgtctcagagttctgaacaatgcccttggctaaccgttagtcctaattgctgtgactaatgtgctgtgtgacctaaagacggtaacatacttaaccttggttttctcatctgtaaaatagaattgatgacctctaccaagccaaggatttcagtgaggcactcaaaaataaaaattaaaaaatacatttgggacaaacatgaaaaaaattactttttagacttaagcaatgcatttaaacctgacgaaaatgaaaggaattgaaattgtttagccacagaaaataaagaccaaggaccaatttaaacagttgaaaattatatgaagcagtgttttatggagagtagtaatgaactcttcttcacc

SEQ ID NO: 115717 - DNA, 1585 bp, Homo sapiens
ggggaagagcccctccccccccgccatcataatattgtgaatgtaaagagagattggttcacaatgagaatgtacagtaggctcctataagggtgacaggattatatgcagaatgactttgaagagccaaaattgatttatttatgttaagtagtgctaagaaggaatatttgtcccggagtgaggcatttgagatagagggggaaaagcaaaaaaaaaaaaaaaaaaaaaaaaaaagtgattacatcatcttcccgttcaagcagtattagtagcgaagatgggttcatcagtgaaatattttgcaaagataaatatacctccactctgcattctgatctatagcctctttctttttggaagaagcattttctttgcccagtttttttaggcagtcacattaaaattctcattaataatgttgacagacaattacgtttattatttctgctaataggcatctgcattcctattcagaattttcattgttagtctataaagtctagttttaactttggaatgtttggtagaggaggacatctatacattttcttttaactgtcctttctaatgtggtacatttgtgacagtgtttgaattctgggttttcagtgaattatggaggactaaaataccaggagtagtccgtactgcttctcttatacatgagagatatctaaggactataaaacataacttaagtatacccttttaatgcctttgtaagatttttaaaccaaggaatgactgggctatctataaacccagatgcactaagtggggagaaaagctcggagctgcagcatatcagcttttgtcaacctgccaacagcagagcgtaccatgctgcaaggagtaataaacaaggaattagaaaactcgctgctggagaacagtcaaattaaacacctttttgaaaggatgagcatgtatatattgcagttctattaaatgtagcttcttagtgaggttggcattatgttaaggctggtatggaagagaactgatgaagcaggagtggtctggtgacatttttctgacttgattggctggggcgtgtgatgtaataggtttcagtgcagccccttataggttttaaaatgaattccaagacaccattacaaagaaagccggactcttttcttataactgagctcagccaaggaaactcttgcacaaatgtacaatactgtttggaatatggaagacctggatttagaatatgccaagacagatataaattgtggcacagacttgatgttttatatagaaatggacccaccaggtaatactgcagtattattgtagagagttagttaatttcgtggctttttaatttttcgaaagctactgtaaaagatcctttttggatttctgtttttattaatttgtttcattgataaaaattagtttgctcatggcttaaaaattaaacagattgtttgactgtctgtggaagcaagcagctcaggctgtgtgtggtaaatgcttattcttacttgaatggatatgaattgaactccagtttttcactggtgtcttttgttaatcgagatccttccctgggtgagttatgttgtgggat

SEQ ID NO: 115718 - DNA, 1986 bp, Homo sapiens
tatcactctggggactgtggtggggtggggggaggagggagggatagcattgggagatatacctaatgctagatgacgagttagtgggtgcggcgcaccagcatggcacatgtatacatatgtaactaacctgcacaatgtgcacatgtaccctaaaacttaaagtataataaaaataaaaaaataaaataaaataaaatatgttgagccactccaaaaaaaaaaaaaaatgacaggaagagaagccacgctttacctaaggaaaactgctgggaaaccatagtgaaacttttcataaactttggggaccgttcctgatgtacccagataataacaaatacgtttcttttgcctgcaggattatgcataattatgataagttgaagtctcgaatcagtgaaattattgacagtagaagaagattggaagaagacttgaagaagcaggcagctgagtatcgagaaattgacaaacgtatgaacagcattaaaccagaccttatccagctgagaaagacgagagaccaatacttgatgtaagtatttgaaatggaatcctatacatgaataattggtgattgctacaattcaggatgagttaatgcgttctcttttcaaaactgtttttcaggtggttgactcaaaaaggtgttcggcaaaagaagttgaacgagtggttgggcaatgaaaacactgaagagtaagtagttactaaagatggtgatagcagaagatttttctcattttaggaaaatgcatgacttgctttgtttttagaacaagtgaggaattttactgagtttggaacatcttgtaggagaaaatgtataaactcagtgccattatccagaattttaaaaaaagaaagcttagctaaggaggactaggatttatttttactcataatgctgtgaaacaactctctgtgtccataatgatgtccctgaacatctgaaaaatcccaaaatatttttggaacagtcagagaaaaaataattatgcttaatatattttaaagcttaagtatatactttgtttgaattagtcaaaaactggcaatctgcctagtcaatttcctgatctaaactggataaacgagattgttttaataccttccactctgcccaggtacctgagtgtggttgcttgaaaacagaaatagtacagttgattggtaactctttgtcctgggaggttgcactggaggctgaataccaggagaggaaaactcaggtcgggcagaggcaggcatgtgatggccagtctgactggcttggtaggggccaggagggaagtgacgggggtatgcctagggaagacagcaaggcaggctgatggctcctgcactcttcatttagaaactttctgtcctgcctgcctagccaatattcactggtggaagatgatgaagatttgccccatcatgatgagaagacatggaatgttggaagcagcaaccgaaacaaagctgaaaacctgttgcgagggaagcgagatggcacttttcttgtccgggagagcagtaaacagggctgctatgcctgctctgtagtgtatgtatctccagcaaacttttctttacaacatctcatgaagagatgtttcatttattcattcattgagttttgggggcaaagatttgacatagttttagtcttgaataagcttacagtacaataatgtagaagagaaaccaaagcagctgtaataccattttaaagtctagccagaagtgtatgttaatacagtctaatagatacctactgtttagttggaagactaggtttggattcccattcagtgctaattaatcatgagaaatcgccaagtctttttttctcatctttaaaatggaagtggcagtgcctgccttttttgcctctcaaggctactatagttagaatctgaggtaatttatgtgagaacatcacccataggaaaaatactcatcaggaacaggtgaaaaaaaaaaggattctgatcatta

SEQ ID NO: 115719 - DNA, 1022 bp, Homo sapiens
taaagccagaagctaagctgcagtgaggctgtgattgggcgtagaagtgggagcattgggacctcacattacacacacgagagatcataaccatgtgaaaaggcaaaaagcatgtgtttgcaacatctgataacttcatggcctttgataaatgtatatatgtatatgtgcatggactgtgtttccagtacacctttcagccaaaacagatccacagtagttgttgagttcaagtacataaagtacataacaagcgaacgtctagtacaattcttacttatgtgtatgggatttttccctttgaggttgctttgttttgtcttacaaaggtgaaaattgtttgtaagtgaagtgagaagttcatatttctttggcttttttgtgtttttaaaagttactccttttagggagctggtctgatgacttgcttagcttggaaatccttgttttcagtgtgtcgagtcaaaatgtgtttatgtgagctgtcactgtggggaaccaattgctttgtcatatagctggttatgaactagtaacatgtttgggaagtcctactgatgttcctttggaagaaaaaatctgctggttttaacaactgtgcttttgctatgtatggtatccaagttagttgaaacgcagacactgagatctgtttgagtttagggtcatttttagaaaggggcagtttaaagcacaatgtctcacatgggacaaagttccaaaatgccaaattcttattttttaaaaagctagttctataaaatactggtattatgggtggggaggaaatagaattgagtcaattggaaagactatccaacttaacatgaaacttgtcaccatgagatagcattagctgcccaggatgctgctatatatatatatatatatatatatgtgtgtgtgtgtgtgtgtgtgtgtgtatatatatatatatatatatatatatatatatatatatatgtgtgtgtatatatatatatatgtgtatatatatatgtatatacatatatgtatatata

SEQ ID NO: 115720 - DNA, 1057 bp, Homo sapiens
cgaacacagctcactgcaacctcaacctcccaccttagcctcccgagtggctgagactgctaccacgcaccataatgcctggctaattctttgtattttttgtagagataggcttttgccacgttgcggaggctggtctcaagctactgcacctggcctcaaaatgttaacagtagggcgcggtggctcacacctgtaatcctagcactttgggagaccaaggctggaggatcgcttgaccaaaggagttcgagaccagcctgggcaacacattgagaccccgtctctatgagttaaaaaaaaaaaaaaaaaaaagtcaacagtagttatcacgtggatggtgagttgtttggggactctgttttgtttcattttgtgtttatgtatatttctgtggtttctgtaatgacctcttgtttaaaaaaccagattgatgagctgcttgtaatttcagtgatactaaaaattgtttctgcttttatttttcagattaacaaaatatattgtgttactatgtttcactaaatttttgaaggctgtgggacttttcgaatcatatgatctcctaaaagctgttcacattgttcagttcatttttatattaaaacttgggtgagtgtgggggggggttttttcttgatattttttatttctttgaaaatcctgttttaacagagtatctttaagaaactttacatacaatattttgtttgttcctcctgacaagtatttgataaacttttttaactgggagtatacttaagattagaggtacaaagagactgaaaagaaaacggattgttgtgctctaatcacttgcctaaacacaaactttgatgagatttttgcaaatttagtttttgggctatttattattattattattcactgcataatcctttcttagtacagagtcctcatgtagtgtgaacattaatttattctacttatacgaaatgctttttttttttcttttttgagacacagtctcactctgtcaccaggctggagtgcagtggcgtgatcttggctcactgcaagatcactgcctcctatg

SEQ ID NO: 115721 - DNA, 1791 bp, Homo sapiens
aaagcatgcccaagagcctagtacaaatgtcactggaaagctgacaaagcataggggttaagagtgtgatttctggagtcagacaaagtcatgttctgtctgtcctccttactgacccttactttgggcaagttacttgatttctctctaccttaatttgctcactgtaaaatggagataacagtaacttcctaacagaactgtgaggaaaaatgaattaatacttatgaagttcttagaatgatgcctcatcatcattgtgacaatgtgacaccctcatgatcattgtcactgttctctttaggcagctgtgattcaaactagaaatgtcctacattttgcataatcatctcacatcgtcacttctttgggcagcagttataccatagtacatgtttgctttatgccatgacttacaaacctgcgtcataatttttttattagaaagacgaatttaagtacttctgtttcagagaccaagaacattttttaaaatatgattaatagtctaaaccccattttaacttttttctctcctttcagataattggatcactaaaaattcctggtagaaaagaatttaaagacaaaaagttaaatgatcctaggaaactagtgggaaactgagaaatcataaaattgtactctgaagaaaaagatttcaaaatctaccagcagacaagaatatagataatggaaaacagaatactgtcctttttttttttctttctttttttgagaaagagtcttgctccatcgcccaggctgcagtgcagtgacacgatcttgtctcactgcaacctctgcctcccgggttcaagcgattctcctgcctcagcctcctgagtagctggaattacaggcacccaccaccacacccagctcatttttgtatttttagtagagacggggcttcattcaccacattggccagcctggtcttgaactcctgacctcaggtgatctgcctgcctcggcctcacaaagtgctaggattacaggcatgagccacagcacccggcccagaataagaatactgtcttggaaatctagacttagtcaagggatcttatgttttctatttacaaaatatgtaatgatttcacctttaaaatatttgttattattatctttctgtattttatttaaaatttggatatatagcaaaatatatgtgactgaaatttttaatttttttgtttccatttatagtggatcaaaatatttaaacatgcagttgctgggtgtattatttcactcttgtggttttttggcctcactctttgtggaccactaaggtaaataaaaatgcatattttgaatgtgtgtttgtatttcttcattttgaatattatttttgttccactgtgttttacgtcaaatatttatctgtacaaatgtgtctagcacttttatagcatcagagagaattcaacagatagaacaaacctgtttagtttctggactagttctttagtgaataccattaatatatttattcatgatttgtcatagatattttactagttagaattccaagtttcagaaaatttttagcataaacggctttttaatcatttattcatgatccctgttaacagcttagaagctataataaaaggtctgaagtggtaaataaaattagccaataagaaggagaacaaaaatctctaaaagcactcattttttgcacaattttgcaaatactctcataaataaatgtctcagaagtagtatatcaattatcagattaaatgcgtggtggataaagtaaactactcccatttcata

SEQ ID NO: 115722 - DNA, 1058 bp, Homo sapiens
cctcagcctcccgagtagctgggattacaggcatgtgccaccacgcccagccaatttttgtatttttagtagagatggggtttcaccatgttggccagagtggtctcgatcttttgacctcgtgatccccctgccttgggctcccaaagtgctggattataggtgtgagccaccatacccagccacattgcctgtatttttttggattactgcaaacagtgctggtatgagcaacctggtaagtgttacctgatacatacctatacaagaataagaaatctgtatgacataattctatgagtggtatgattaggtatttgtagcttcaatctttctaaggtagataatgccaaaccattttctaaagcagttgtacctatttatttttcttatgttttgtgaaatcaaggggaaatgtttttctttctctaactctagttgaattcatgcgtcttgataaagataaattacatttcataaatgataatgttttatttttgtaggactttgctgctatttgagcacagtgatattgttgtcatttcactactcagtgttttgttcaccagttctggaggaggaccagcaaaggtagaattttccattatcagttacttggaaatggaaagtatgtatgtcacatattatccaaaggaataaaatcttatctttcaccatttaaaagaatgcaggaggctgagcgcgatggctcacgcctgtaatcccaacactgtgggaggctgaggtgggcggattacatgaggtcaggagcttgagaccagcctagccaacgtggtgaaattccatctccactaaaaatacaaaaattagctgggcatggtggtgggcacctgtaatcccggctactctggaggctgaggcatgagaattgcttgaacctgggaggcggaggttacagtgagctgagatcatgccactgcactccaacctgggcaatagagtgagactcagcctcaaaaaaaaaaaaaaaaaaaaattccaggggctttttccgctagttttacatttttcttacaatttttttgtttttgaagaat

SEQ ID NO: 115723 - DNA, 1866 bp, Homo sapiens
ccagctcctctggaggctgaggcaggagaatcacttgaacccgggaggccgaggttgcagtgagccaaggtcgcgctattgcactccagcctgggcaacaaaagcgaaactctgtctcaaaaaaaataaaataaaataattatcagtaagttataacattgccggccatttaagtagttacgtaattgagtatatgggaaaaatatactagttccatttccttaaatattatgttagcatggtgtggtggtgtgtgccagtagtcccggctacttgggaggctgagacaggaggatctctttgatcacaggagtttgaggctgcagtgagctgtgatcatgccactatacttcagcctgggtggcagagcaagaccctgtctctggggaaaaaaaaaaaaaaaaaaaaaaaaaaaaaagatcatgtatttaacgactgactgttgaactgtgtgtgtttctaatgagacttatctaattttactcacagggtggagtattattgctagtactggctttgtgttgtaaagttggttttcatacagcttccagaaagctctctgtcgacgttggtggagctaaacgtcttcaagctttatctcatcttgtttctgtgcttctcttgtgcccatgggtcattgttctttctgtgacaactgaggtaagataagagcaagaatttattggtattaaattgctagtaaaatgaattgctattaaatttttagttcactgtattcaataaattatattttaatttgaggttgaaagtggcttaaattgtctttgctttttctttgtagttttttaaaaaaaatttggagttaattttattgtttatagaaaatacaaatcaaatgctattacatttacatatccctcacattgctatggcccaaaggaatcatttgaagaaggagcaattaaccatgtgttaggcttaaagattgtgtgtcgcctagtgttcatcgaatgattacacaatagtgcttttgttttttaaaactttggagaatactgagaaaatgtaccaatatcttatagcttttatatgttggcatattatgaatcatattgaatcatgcgatttttatttttttaaaagattaacagaaacatcttgtaagatgtgaactttatacatgtatagtcttgacaattcttttttttaatttctagagtaaagtggagtcttggttttctctcattatgccttttgcaacggttatcttttttgtcatgatcctggatttctacgtggattccatttgttcagtcaaaatggaagtttccaaatgtgctcgttatggatcctttcccatttttattagtgctctcctttttggaaatttttggacacatccaataacagaccagcttcgggctatgaacaaagcagcacaccaggagagcactgaacacgtcctgtctggaggagtggtagtgagtgctatattcttcattttgtgtaagcattccccccttttttttattttaacaaatttctatttatggattttgatggtcacatcatttacttattttgggaaattcttcagtgcttgcatttagtgccgacagttactgtgttggttttggtagcttaaacttcgaaaatttaaacaatattgttttttctctttgtagctgccaatatcttatcatctccctctaagagaggacaaaaaggtacccttattggatattctcctgaaggaacacctctttataacttcatgggtgatgcttttcagcatagctctcaatcgatccctaggtttattaaggaatcactaaaacaaattcttgaggagagtgactctaggcagatcttttacttcttgtgcttgaatctggtaagattttt

SEQ ID NO: 115724 - DNA, 1117 bp, Homo sapiens
attcttactccttttttagaaatttttattgcactataaaaaaaatggaggaagtactaatcatttattttgctgaattgtttattctgattgcttaatataagtaatgtgggtaatgtcaaaacttgcctcaagtatgatttttgggaagcctttccagacaaagtacaccataaaatttggcacgctgtgtcatgagtgcctatgtccttatatttttaccactgtattctgaattccttgagggcagtgaccatgttttaggcattttgaagtactagccagtagcagagtatgtggtgcacagtaggtatccagtaatattagtagaatgtattaaaaaactaaattagatgtgccttaatttttaatgtccttatatattttatttgtaggtgtatttctacatgttttggcagatacacttggcagcattggtgtgatcgtatccacagttcttatagagcagtttggatggttcatcgctgacccactctgttctctttttattgctatattaatatttctcagtgttgttccactgattaaagatgcctgccaggttctactcctgagattgccaccagaatatgaaaaagaactacatattgctttagaaaaggtactgtatgtaatttcttcactactttcttccttgaaaatcacatttttgaagtctttgctggaagtaaaacagacaaccaaataaataataaaacaaaacgaggccaaaaaagaaatataaagtagcatttaaaatttaataagttgacctaacaagaaatatgcaagatataaatgagaaaaatacagttttacttaaaggatataaaacagggaccgaatagatggatgagattttcttggatgagaagactctttattataatgatgttgattttattttatttagatttcaatttagttgccttcattggatatttttgtttatggtttgggatgttctaaaattatttggaacttacttggaagagttagcgcttgagaataagaaaacatacataaacttacagaattaattaataggatcctactttgcaattataaagtagcagaattaagtgacaaaactaacagtttagatcgagaccatcct

SEQ ID NO: 115725 - DNA, 1322 bp, Homo sapiens
tttcagattttagagcgtctcagatttcgtattttcagattaaagatactcaacccgtatcaactatgtacagcatattaagacgtgtgtactaaatgcattactctaaatgcttcaaaatatctggatttttataacaggttacaggaatacttaaagatgctggagtaaacaatttaacaattcaagtggaaaaggaggcatactttcaacatatgtctggcctaagtactggatttcatgatgttctggctatgacaaaacaaatggaatccatgaaatactgcaaagatggtacttacatcatgtgagataactcaagaattacccctggagaataaacaatgaagattaaatgactcagtatttgtaatattgccagaaggataaaaattacacattaactgtacagaaacagagttccctactactggatcaaggaatctttcttgaaggaaatttaaatacagaatgaaacattaatggtaaaagtggagtaattatttaaattatgtgtataaaaggaatcaaattttgagtaaacatgatgtattacatcatcttcaaaaatagatatgatggattctagtgaagaccaaaattacttctgtttactttctatcaggaagcatctccattgtaaatatgtatttacatgtttattacaaagacccaaatgaaaaatttttagtccattttttgcatagcctaaagataaaataggaataaaagttctatatttatggattttctgtatataaaactggtttctaattataacttaagtccattaagtaaaatctgtattgccactttaaatgtaaactaaattatttgggagaaacttcaaccactgatatgagataagcaatgagaatagggaagtgtataacatcacagtttttgatgtattacaaaaatcaaccactctataaaataaattttttttacttttggtaatatttgcaaatgaataattaatttattagggtaaagaacttatactaagttgtgtccatgttattcatttacttaccatgttcctttaaagtagaatatttcctttcttgttatatatttgacattccaagctgcttatcaagctggtatccaagcagtggtaagctttcatcctttcttagctccataacgttgtgaaacagccagttaagagaatcgtaaataattgtcaactcacagttgaattctctgcctatgtaggtaacttttttctaatttctggaacatatagatatataagaaatatcaaagaataggtagttatttcaaagtttaataagtaaaacttgttcataaacatt

SEQ ID NO: 115726 - DNA, 1040 bp, Homo sapiens
ttcgtggatcagctcttaaagtggtcttgcttctttcagaactcgaaaattaatgctgaaaataaggcgaagatcaacatggcaggcgcaaagcgcgttcctacggcccctgctgcaacctccaagcccggactgaggccaagaacagctcttggggacattggtaacaaagtcagtgaacaactgcaggccaaaatgcctatgaagaaggtaactctcttcctgacctaacttctgtaagagcccgccttccaactgtggcctttgatgcagaaacatttcattctctctgtttcatctacaggaagcaaaaccttcagctactggaaaagtcattgataaaaaactaccaaaacctcttgaaaaggtacctatgctggtgccagtgccagtgtctgagccagtgccagagccagaacctgagccagaacctgagcctgttaaagaagaaaaactttcgcctgagcctattttggtaaacttattcttaccattgtagagtctgttgattatttcttgtcccttatttcactgatacatgcaagagcattcaaatgaatagtaatattaataccatttattgagtgcttagcatgaggcaagctctgcctaacattttacatgcattaactcacataatctttacacgtactctctgaggtattgtcacctctactatttaaatcatggctttagagaggttatgtcagggtcacacaggtaagtggcccatatgggattcaagctcaggctgtctggcttcagaatctatgcttttaattgtcaactgtcttatattccttcgttaatgatattaagtagtagctgtctgagccaaaggctttgttatccaactacaagccatctctgcagaatttattggcgtaaacatagaatgttctcttgaatttttttactgctgcatatggctactaaataataagcctgtaacattggaatatgcaaaggagtaaaacaggaagaaggcaacttttcagggagtggttaagaagatgaattaacacttagcctcaaaaata

SEQ ID NO: 115727 - DNA, 2417 bp, Homo sapiens
ctggagcacaatggcacgatcttggctcactgcaacctctacctcctgggttcaagcaattctcttgcctcagcctcctgagtagctgggattacaggtgccagccaccacacccagctaatttttttattatttttttatttttttatttttagtagagatggagtttcacgatgttggccaggctggtctcgaactcctgacctcgtgatctgcctgcctcggccttccaaagtgctgggattacaagcgtgagccaccatgcccgaccttatttctttactttgtctactaaattcagagtcctttgaggatgccatgaagtcaatgccttgtagagtttgacttcaagaaggtgctcaataaatgtttgaacaatgggataaagggagcttgaaggaaatggttaatggcgatgaagttagttaatccttagtagtcaggatagaatttgtgttgagtagtgagaagcagtttatattatgaaataaagactaaagactgaattgtcatttatttggactaacttcacatgttgctgataaaaattaattacttctcagtttcctttgcagcaaagtctagaatgtgaatttatttgcttccaactttaaactgactcactctaagttggcatttcactgtttttttttttgcccaggctggagtagaatggcgcaatcatagctcactgtatcctcaaactcctgggctcaagtgatcctcctgcctgggcctcctgagtagttaggactgtaggcagctgccttcatgcccagctaattttttgtagagatgagttattgctatattgcccaggctagtctggaactcatggtctcaaaggatcctcccacctcagccacccaaagtactgggattactggcttgagctgttatgcccaacctcattctttttaattgaggaattaaatgatcacttttttcttttttaacagagacagggttttgctatgttgcccaggctggtcttgaactcctagcctcaacctcagcctctcaaagtgctgagattaaaggtgtgagccaccgcgcccaacccaaatgatcacttttgatgttaatcacttcctaaaaagaaatggaataaatctgaaaagatacttttcctttaaggaaatgaattgtatgccgattcagcagaatactagcttgagttggtaccaataacctgaacttcatgcccaaactatagtgcttacttctatttgctatttcaagatatctctttgtttcaaggttgatactgcctctccaagcccaatggaaacatctggatgtgcccctgcagaagaagacctgtgtcaggctttctctgatgtaattcttgcagtaaatgatgtggatgcagaagatggagctgatccaaacctttgtagtgaatatgtgaaagatatttatgcttatctgagacaacttgaggtaagtattatcattcgttttttttctaaactgcatctaactttatgaaagtattttccatcaatagtttataataatacaagcaggacgtgggcagcatttcttaagagatcgcactttcaaattctccttcatggaatacctataataaaaagtcactaaataaaccaatggagtctatttgtcactttgtgcaggaaagttcgaagttagggtggatactactatcgctttctaaaggaaaatccacagattgaatttgatatgtatatatgcgatctccaccacgtttggaatggttaagtcccaaactctgcattttaggtgataacgggtcaggaagtggatgaggatgtagaatatactcaaagactacagccacccctaacacaaggcattttgtgttagtgtggctgatgtgcatccagttgttggtgaaattatttgtgcccaaaaggagtacactcaaaagctacttttttggttcacttcaatttgatcccacttttgaaactttctattaatggcatttgccctttccctacaaatacaagcactctttatggcagcataaacatagtaacataaattatactgttaccacatttacgtagtttttttgttgttgttgttttgtttttttgagatggagtctcacactgtcgcccaggctagagggcagtggtgcggtctcagctcactgcagtctctgtctcctgggttcaagcaattctcctgcctcggcctcccaagtagttggggttgcaggcacacaccaccatgcctggctaattttttgtatttttatttggttttggtttttttgagacagggtcttgctctgttgcccaggctggagtgcagtggtgcaatctcggctcagtccagcctccgcctcgggtcaagtgattctcatgcctcagcatcccgagcagctgggattacaggtgcccaccacaacacccagctaattt

SEQ ID NO: 115728 - DNA, 1063 bp, Homo sapiens
ggccatttatgcaaagcaacccctcaagtggcagaggagctgagaaaccaaggaattaggcagataaatggagtttgctggtattgggtgactgatgagggggaatttacagacataagtatggtctttgatggctgtaagatgtagatctctgcactgtaacccctcgtacccacggcttgggtatgtatacattttcttgggcaaagtatacatgctctagaatcaatgtgtgggtggctgacagaatgctgcagacatcacagcctataatgtatacaataatatcaagggctgttttggaggaaaggccaaacttaaagtgaataggcagaagtcacattgaattagtatttaaaataaagtcactgttgtccccacagttcttagctatgttgctgttgggatttaacccaggagcaggcaggagtgttgtagtacatgggttccagctgccctgggagttactgatattttctctacataaagctcaggttctaagtttagaggcttaagtgaaaagatctgagatgataatgtagtatctttatttggaagggagtggaccagcagcagttgtggtgaagaatatcgtaagacctgacaatataaaaaagctgtcatactgtcctatctaatgtttgccttttttttcttttttttttggggtggggagacagtctcactctgtcacccaggctggagtgcagtggtgcaatctcggctccctgcaacctccacctgccaggttcaagcaattctcctgcctcagcctcccaagtagctggaactacaggtgtgcgcaaccatgcccagctaatttttgtatttttagtaaagacaggttttgccatgttggccaggctggtctcgaactcctggctgcaagcaatctgccaacttcagcctcccaaagtgctgggattacaggcgtgagccaccacgccagccttcatgtttgctttatttcttggtgatggtgttgtttgtggttgaccatatgaataattgaattaagaactgatatagattataaatgccccagtgctactgtaggaactaa

SEQ ID NO: 115729 - DNA, 1386 bp, Homo sapiens
ctctactaaaaatacaaaaaattagccgggcatggtggcgggcgcctgtagtcccagctactggaggcggaggttgcagtgagctgagatcacgccattgcactccagcctgggtgacagagcgagactcaaaaaaaaaagaaagaaataaactgactttttcaactaaaatctttcttgggggatatggtgtcattaagattttgctatgggagaatgtctttctacctctccttcatcatagctctgtgtctccttttcaaacattttattcaccctattgaaattcccattgcagaataattgtgtgcccaagaagatgctgcagctggttggtgtcactgccatgtttattgcaagcaaatatgaagaaatgtaccctccagaaattggtgactttgcttttgtgactgacaacacttatactaagcaccaaatcagacagatggaaatgaagattctaagagctttaaactttggtctgggtcggcctctacctttgcacttccttcggagagcatctaagattggagaggtacaggtttcttgagaaacctctccgtatgggtacattagggggaacactgctgctgaccaagcacgttgaattcaactgacctgtattatacctaactacatggggaagggataaagttgttctttatttctagtcaggctgcatgttaatattaggactttccatgggcatttgagagtttgtagacaaacatttgtagttaaagatacatatgggcatgcaggttagtgccaaaggaaaattttctgaaagaaactcagtaacatgggttttgtttcaggttgatgtcgagcaacatactttggccaaatacctgatggaactaactatgttggactatgacatggtgcactttcctccttctcaaattgcagcaggagctttttgcttagcactgaaaattctggataatggtgaatgggtaagctgtgtcccacagaactcctaagcttttaaattttaaagagtgactaaatacagaacttttgttattaaaaggcaattcaagtggttcataaatatgggatctactgaaggaatagttaaaaaagatgtcttagaatgtttccacatctttttgtttttgagacaaggtctcgctctgtcactcaggctggagtgcagtggtgcagtcttggcccactgcaacatcagcctccagagtagctgggattacaggtgtctgtctagtttttaaatttttttcatgtcagatgggtaatatgcccacattgtaacaaggtttgagggtggcacgtttcacatgttcacatgaacaccaaatcatcacacttatgaactacaaaagagtcgcccaccagcctgggcaacatagcaaatcctcatct

SEQ ID NO: 115730 - DNA, 1608 bp, Homo sapiens
gggtgggcaagtcagcaattacaaaagtgcaattaggtttgagcagaggaagcatgagagcacctaggaaaggagtctttagctttgtcttaaatttcagttatattaattatacagtacccatctcttttccactcctgaataacatctaacatctagaaactttatgaaaatcattattgatttgagcatttttaacattaacttgttgccttagacaccaactctacaacattacctgtcatatactgaagaatctcttcttccagttatgcagcacctggctaagaatgtagtcatggtaaatcaaggacttacaaagcacatggtgagtcaatatagtggcattgtaagatgctgaaaagtgtaataattcaaacttaatgcctgcaaatgcctggtttatttttaatgagttaatgttttaaatgaatacctgtatcattgcatcttgtgattttttttcttttgcctctttaattgctatctttttgtcttccagactgtcaagaacaagtatgccacatcgaagcatgctaagatcagcactctaccacagctgaattctgcactagttcaagatttagccaaggctgtggcaaaggtgtaacttgtaaacttgagttggagtactatatttacaaataaaattggcaccatgtgccatctgtacatattactgttgcatttacttttaataaagcttgtggccccttttacttttttatagcttaactaatttgaatgtggttacttcctactgtagggtagcggaaaagttgtcttaaaaggtatggtggggatatttttaaaaactccttttggtttacctggggatccaattgatgtatatgtttatatactgggttcttgttttatatacctggcttttactttattaatatgagttactgaaggtgatggaggtatttgaaaattttacttccataggacatactgcatgtaagccaagtcatggagaatctgctgcatagctctattttaaagtaaaagtctaccaccgaatccctagtccccctgttttctgtttcttcttgtgattgctgccataattctaagttatttacttttaccactatttaagttatcaactttagctagtatcttcaaactttcactttgaaaaatgagaattttatattctaagccagttttcattttggttttgtgttttggttaataaaacaatactcaaatacaaaaggtatcttttttaaaaagttagtttactgcttccttaggctctttctaaatcccacccacctgaaggacatcaattatggatttatccttcatgccttgtataaatacagatgtgcatatgaatttttatgggttttttaaaaatgtggttcattctatatacataacaattactttcaacatacataagcctacctgtatttgtgcattatattacatggtacagataaatagtcatgtgccccatgaacattttggtcaaagatagattacagatacaatggtggtcccataagattatgatgccatatttttactgtacctcttcttgtgcctagatacacaaatactgacttgtgttataattgcctgcagtattcaata

SEQ ID NO: 115731 - DNA, 1128 bp, Homo sapiens
acgctgaggcaggagaatcacttgaacccctgggaggcggaggctgcagtgagccgagattgtaccactgcactccagcctaggcaacagtgagactccatctcaaaaaataataataaaataaatgtttatatgtttcatttttgtaatttaagagggaaaaatatatgtatttcctacctattttggcaacccaaaataagccctcattacatgatgccacttgaaacatctgtagacagctgttattgtcatacagaaatacctggaacatttcactaagggcattgctaagtacgaaattaaaatattgttattttgcaccagggaagtcattttcagatcgtaataaagttgcaacctaaaatgctgcttattaaaatttttctcttgactaaaataaccaagaagtgatctgcttcataatttttcaagatccttgtttatagaggtattatatatggtatattattttatttttaacctaacagaattaaaacaagcttcagaaagtaagcttttagaaatacagactgaaaagaacaaacagaagattgatttggacagtatggaaaactcagagaggataaagatcatacgacaaaacctacagatggagataaaaattactactgttattcaacatgtgttccaggtaacatttatataaactagcaagagttttaatcttgttgcccaggctggagtgaagtggctcgatctcagctcattgcaaactccgcctcctggttcaagcaattctcctgtctcagcctcctgagtagctgggattacaggcgtccaccaccatgcccggctaattttttaatttttagtagagacggggtttcaccatgttggctaggctggtctcaaacccctcaccttaggtgatccgtctgcctcagcctcccaaagtgctgggattacaggcatgagccactgcgcctggccaactatttgatgatgctatcatacagtattgacttaactttcagctagtttttgatcttgatgaaataattcaatgtttaatattggtctgtttgtatatatctggaatgtgtgtatacttaatgtttaaggtcttgatttttcttttttcttttttcagacgcagtcttgctc

SEQ ID NO: 115732 - DNA, 1045 bp, Homo sapiens
gcgcccgccaccacgcccggctaatttttgtatttttagtagagacagggttttacaatgttggccagtctggtgtcgaactcctgacctcaagtgatccgcccgcctcagcctcccaaagtgctggcattacaggcgtgagccatagcgccccgcccgtaatgtaattttgggggaaagatatgagtggcttacatttcaaatatttctgaatttttgagttatctcaacttgaagcaaaggcccagcagttcgatatcaggagtaataaacggtaaagaaaacagaaacaaattacaatcaagcaatgccaatcagcaagagagtgtgacatggccctttttaagccagagtaaactcttgtgagcttgccactaactcccattttaacgaaattattcattttaggaaaccgcaaggttttttttttgtttttctttaatttttttaatctttgcaagagctgtcagataagaaggttgtattatttatttggttccagataaaattttgaactatatcgaaattatagactggctttctggaaaggaaatggtcctagacaatttataggctaatgagcagagacccaccttaacaaaattttgtccccaaaacgaaacaatagaacacacgtgggtggatcctagtagggagaaggggtgggcggggtcaggcacagggggcggagccagccccacggcggaggagagcccagtccggtctccgcctccgtgacgtcccgggaagcaccgcccacagctgcccgggactccagtgatcgccgcggctcgctcgcgccccggaaactgccccttctcgggggtcatgatgggcagcaagatggcgtctgctagtagggtcgttcaggtaaagcaatttgtcgcgtttccgcatcttgggcggtagggacggtgctgactatggcgacggcgtcggggagtaaaggcggtggcagaggcagagcggtgaccgcgcctctgcggagggccagtgacggcgcccgcgggtgtgtgtgaggatgggactttgagcctgttggacc

SEQ ID NO: 115733 - DNA, 1030 bp, Homo sapiens
cgggaatggtcgggcaactggccccgcgtactgcgtcctcgccggagcgggttctccccaacctctccaagcgtctggctacaggccagatgagggaaatagaaaagtaaacttaagtttaattagtatgtgtgtgtgtatattaatgtgtgtgtgtgtgtgtgtgtgtgtgtgtataagcgttggtttcacaagcctattttcccctggtttagatagacagctaaagtaactttgttaatccacctatcagctactaactcctgatagcctttttatttgtttcttcagctgtggttctaacttaggtaaaattattatataagtggaacacaacctccacttttgtggttggtttacatagtctttgaaccctgaaactatattattttataattgacttttatctttgatatgagaagtacattccgctttatataagtacatctcttaaaagacctttttctaaattcctgaaattgttgtctgaatgataatcctagatcccagtctttggtcccattgcaatgaatgatccttacttattcagtaggtagttactgagcatcaactagttaaagattctgtaaggactgagagactgacaaaggtctgttatccataatatataaccatatgtatcaataatatataacaatttaaaaatgggtaaaagacttggcgtgttgcacaaaagatacccaaatgagcaatgaacattttaaaaggtgctcaatatcattacttgccaggaaaataaaaattaaaaccatgaggtcctacacatccaccaaaatgactaaaatttagacgtcagtggtgatgagaatgtgaagcgtctgaaaccctcaatattgctggtgggaatataaaatgttatagccactttggaaagctgtcagtctctaatagttaagcatgtatctaccgtatgacccagcaattctactcataggtttattgcccaagagaagtgaatgcacatactgtctctgtacgtaaatgttcacagaaaaaaaagagttactag

SEQ ID NO: 115734 - DNA, 1483 bp, Homo sapiens
cttcataaagggactggactaagaatactcttgaccagcccgtaagaacttggcactcgtctcagtaatctgagatagcagggtttggcgtccatagcaaccacggcgacaggacgcgctcgagcaagaaccaaaaagcgagaacaggtacaaggccaaactttctacattcacagacacctaccaaaccccgaacatggaacaccaaattagaacgctgaccagttcctggtaatgtagaaaacacccaagttaaaacggcaacagagtgacacagcagccattgaagatgccccacttcaggcaccgacaggcgtcacgtgacgggtggggaacgccaaccgcctgggcctagcgcagcttcctccgcccaccacggaagtgaggcggggatactaaagcgacggagcccggtggacggaagtgggtgttggaggctttaaggtagctttaaattcgtgttgtcctgggagctcgcccttttcggctggagtcgggctttacggcgccggatggctctggacgtgaagtctcgggcaaagcgttatgagaagctggacttccttggggagggacaggtgaggctctctggaaggacggggagggccccaagcggacagccccgcgccgcctccacctttgcgggttttcccgtggaggccagaggtctggcttggctgctcgttctcgttgggggaaaccgtccagacgcacttgctgcccattctttacatcctgggggtgaatccctgaggggcctctccttgctgaagagtagcctggagctggacggagactgacccgccacgtttccagccgccgcgagtctgctcaggaactctgggctctttgcttcgcgaaatgtaaaaatgcaaaaaggcaaacacaaaaactcccataaacttatgttatttctatttttctttctagtttgccaccgtttacaaggccagagataagaacaccaaccaaattgtcgccattaagaaagtgagttacctttttatgttgtttttaagtctccttgaagatgtctgtattattaattgactgatagccattttattagtcttgaccatactctgataatgagttactcatgtcattttcagagacaaaataattaattagtgctttgtgttcccaaacggaactctagggttgaacccgttttaatttctattgaaatgaagaagaagctgtatgttatttttactgcataaattcatatgttgtgggcaagtactgcccatcttttcggtcctcagaactattggataccatgatctttctaggtcactgtttatacctcacctgcatccactcagtgtgtcgtatctgtattttctgtgtacggatttaccatgaaagactttcactagcatgaacaacattgatgtgaggtctaaaatgagttcagtagcttcttatattcattcaaaagacctgggtcggattcagtagcttcttatattcattcaaa

SEQ ID NO: 115735 - DNA, 1034 bp, Homo sapiens
tgatttggaatgtttctctgaatatccagtaagtaaaaatcaccaaatactccttctctatgctgagtctatctttactcttcggggaccctgcagtaactctatccagaaccattactaacttattaattcatactttgctcgtttcttcagtgagaatgaaaactttatgctgggcatggtggctcaagcctgtaatcccagcactttgggaggccgaggtgggaggatagcttgaggccaggagtttgagagaagcctgagcaacacagccagacctcatctctacaaaaaataaaacattaaccacaagtggtggcacatgtttacagccctagctactcaagaggctgaggtgggagaactgcttgagtacctaagtttgaggctgcagtgagctacgattgtgtctcagtactccagcctgggtgacagagcaagaccctgtctttttaaaaaaaaaaaaaaaaaaaaaaaaaaaaaaggagaaaacttttcctatctgtcagattacatgaaatacttaccatctttagcttctgatctatgtccaagtttgatctggtagaaacggaaaaaaacccaaatatattaaaaatgtgttaaattatttagaatcaatgaataatgtgtaaatacttcaaatacttcgccacagaaaaaaaaacaattagcaaccaatatgtacctactaggcaaaaagagagtaggaatcatgatcagaaagataaaattaacaatataagagagaatcaaatacctacccttgtcccttaagtttctgaactacacattcaaataataaaattaagaaaaatctattttaccttttcaaggttcaatgtggaccaaataactaagggtaccctgattaaaaataaatacgtaacttcaaattaggctacttgggaggaaagatacagaaaataacatgctgtagagttggtaataagcccaataatatgctcttagacaccacatttttcaaaaagcaaaattacaaattgtgatggttaaaatgttgttactctgaa

SEQ ID NO: 115736 - DNA, 1064 bp, Homo sapiens
tttttttttaaaaagacagggtcttgctctgtcacccaggctggagtactgagacacaatcgtagctcactgcagcctcaaacttaggtactcaagcagttctcccacctcagcctcttgagtagctagggctgtaaacatgtgccaccacttgtggttaatgttttattttttgtagagatgaggtctggctgtgttgctcaggcttctctcaaactcctggcctcaagctatcctcccacctcggcctcccaaagtgctgggattacaggcttgagccaccatgcccagcataaagttttcattctcactgaagaaacgagcaaagtatgaattaataagttagtaatggttctggatagagttactgcagggtccccgaagagtaaagatagactcagcatagagaaggagtatttggtgatttttacttactggatattcagagaaacattccaaatcacccacataaatggaaggcagcaagcttaattagtttgtctttctgtcttcattactgttttaggtgttacaagccattgttttttctgtttctgagtttctaattactttgaaaattcaggatacattttcatgaaagtacataaagcttactatggaatagatacatgaggaaattatttcattaaactttcttccaaagtcttatttattaggattcatcataaaatagctcttacaaaagagacccattgtctgtgtaagtgccaatactatatcttatttttattttgtttattttttttgagacagagtcatgctctgttgcccaggctggagtgcagtatcgcaatctcggctcactgcaacctctacctcccgggttcaagcgattctcctgcctcagcttcctgagtagctaggattacaggtgcacaccaccatgcccagccaattttttgtatttttagtagagatggggttttgccaccttggccaggctggtctcgatctcctggcctcaagtgatctgcccacctaggcctcccaaagtgctgggattacgagccaccgcgcccggcctgtatctaatttttaatttt

SEQ ID NO: 115737 - DNA, 1100 bp, Homo sapiens
gtgtgtgtgtgtgtgtgtgtgtgtgtgtgtatgtgtgtgtggtgttttgttttgagacggaatctggcactgtcgcccaggctggagtgcaatggcgcgatctctgctcactgcaacctctgcctcccgggttcaagcaattctcctgcctcagcctcccaagtagctgggattacaggcgcccaccaccatgcctggttaattttttgtatttttagtagagacgggtttcactatgttggccaggctggtctcaaactcctgacctcgtgatccgcccgcctcggcctcccaaagtgctgggattacaggcgtgagccaccacacccggcctgaaaaggttttaagagaggatggaagaaaaggaattggagacagtaagaatagacaattctttgaactgggcagagaatgaggaggcacctattaggggaggtagggtccagagaagtttaagactggaaaaatactggtatgtttgtacattgttgggaaaagtctagtagaaaacaaaagactgctgtaggagaaaaaggagagaactgcaagagtattatatttaaaacttcatgaaagagtatggtatctagtccttaaagtaagggattgcctttaaaaacagaaaacagacaaggatcgttcatccctagagatagaagtgctttgataatttcatgctaaaatgatactaattctttttgttctttaggtggtatcgggcccccgagttactatttggagctaggatgtatggtgtaggtgtggacatgtgggctgttggctgtatattagcagagttacttctaagggtaagtctaaattaatgtacgcactttaatattgttgttgcagttatttgttctgacagtttgtataagaattcttgtcctaggccaggcatggtggctcacgcctgtaatcccagcactttgggaggccgaggcaggtggatcacttgaggtcaggagttcgaagccagcctggccaacatggtgaaaccccatctctactaaaaatagaaaaattagctgggcatggtggcgggtgcctgtagtcccagctactcgggaggctgagacaggagaatcgcttgaacctgg

SEQ ID NO: 115738 - DNA, 2122 bp, Homo sapiens
taccttcagtttatatgtataagctgtatatgaaacataagtttcatttttaatcttggcttccatccccaaggtacgtcatgtatatgcaaatattccacagtccaaaatctgaagcacttctggtcccaagcattttagataagatatattcagcctgtataggctatttaattatggaaaaattagaagggagtctttttttcttttctttttttgatacggagccttgctctgtcgcccaggctggagtgcagtggtgcgatctcggctcactgcaacctctgcctctgggttcaagcgattctcctacctcagcctcccgagtagtggggactacagacatgcaccaccacgcccagcttatttttgtatttttagtagagatggagtttcgccacgttggccaagctgatctcgaacttctgacctcatgtgatccacccgcctcagcctcccaaggtgctgggattacaggcatgagctactgtgcccggccagtcttttaatggaattatcagccaatcttaggatcctaggtatttatttgtagtaatttccatttgcaaatacttgacattaattttgttttgttgggaatgagggcattcacatagtatttttaatgctccctataatcttgaaggtaagattttccttaacacatttcagatactcacctaccttacttttggtatcttttcttttaaaaggcactgaaaatgaagtatttcagtaatcggccagggccaacacctggatgtcagctgccaagaccaaactgtccagtggaaaccttaaaggagcaatcaaatccagctttggcaataaaaaggaaaagaacagaggccttagaacaaggtaagattcccacttttaaaagaaattaaatgaatttagaaaactccaaatagctcgtgtatggctagcgactgaacaacagcaaagaaatgtagcttgctagctatttaatttttataaatttaattgtataaagtagagagactgtgccgttttaggtatgtttactttcattgtgaatacttcggcagcttttgtgtatacctcagaattatgggaactatgtatgtgtaccttgttcccttcataaattccttctgtaaactacatgctaaatgtttaacaagtgctactggaaaaaatgtgtcagtgaaataatgtagttggaatgcagtgactggttaaaattgctatgagaatgtgaactttgttaaatgtgaacaacttttttttttcttgttctttttgcttcctaggaggattgcccaagaaactaattttttaaagagaacactggacaacattttactactgagggaaatagccaaaaaggcaaataatggaaaaatagtaaacattaagtaaatgctgtagaagtgagtttgtaaatattctacacatgtaaaatatgtaaaactatgggttatttttattaaatgtattttaaaataaaaatttaattctggtttttctgattagagtgcaaaagtgagaaaagttcaatactcttgaaatgtagaattgaaaatgcattagggaaaacttaataaaaattattaccagttatttggaagatctgacccatatagtatcacaaatctgtagtagcatgggtagtgtttaaaaataaaaatgttggccgggcgcggtggctcacgcctgtattcccagcactttgggaggccgaggcgggcggatcacaggtcaggagatcgagaccatcctggctaacacggtgaaaccccgtctctactaaaaatacaaaaaaaattagctgggcgtggtggtgggcgcctgtagtcccagctactcaggaggctgaggcaggagaatggcgagaacccgggaggcagagcttgcagtgagccaagatggcgccactgtactccagcctgggtgacagggcaagacacagtctcaaaaaaaaaaaaaatgtagtagtggtgtagtaaatactacccaaacttaacaaatattaatatacggaatgtactaaaaaaagaaaacattacagataaaattgagattccccccaaccttttttctgaggcgggggacaaagtctcactctgtcactcaggttggagtgcaggggcacaat

SEQ ID NO: 115739 - DNA, 1033 bp, Homo sapiens
tcaccatgttggccaggctggcctctaattcctgacctgaagtgatctgcccacctcggcttcccaaagtgctgggattacaggcatgagccactacacctggccagaggttccctcttaaaaattcactttattttatttttttttgagatggagtctcgctctgtcacccaggctggagtgcagtggtgcgatcttggctcactgcaacctccacctcctggattcaagcagttctcctgcctcagcctcccaagtagctggggttacaggtatgtgccaccacgcctggctaattttttttttttttgtatttttagtagagatggggtttcaccatattggccaggctggtctcgaactcctgaccttttcatccacctgccttgacctcccaaagtgctgggattacaggtgtgagccaccgcgcccagccaatacttcactttatttctattttttccttttcactttccccagagggaaatgactctatgaaattggtgtgtatctttccatgattttatgctagtattctgtaagagtgcatgtagtgagatgcataacaatgtacagcattgttttgggtctcaaaattgtatataaattgatagaatctctctctcctttttttttttttttttttgtgagatagtctctgttgcccaggttggagtgtagtagtgcaatcatggctcactgcagcttcgaactcctgggctcaagccatccttccacctctgtccccagtagctgggactacaggtgcataccaccatgcctggttaattttttttttttttttaatgagacagagtcttgctctgttgcccaggctggagtgcagtggtgcaatctcagctcactgtaacctctgcatcctggggttcaggtgatcctcctaccttagcctcccaagtagctgggattacaaatgtgtaccaccatgcccagctaattaaagtaacacaaatgtattagctcacagttctgtaggccatatatctggctcagctgtgttttctgcttaggg

SEQ ID NO: 115740 - DNA, 1018 bp, Homo sapiens
tagtttaccatttgaactgtttttaagtggtattaagtatattcacattgtaatgtaaccttcatcaccatccagctccagaacattttcatctttctttacagagaccctgtcccatgaaacagtaactcctcacttccccttctccagcccgtgtgatttattatttaatggcacagttccctgagaagaaggtaatgctattctcattttagagatgaggaaatcaagctgagaaaagtcacccgaggtcatacagttagtaagtggctgaatgaggattcaagtccaggtctttgctgttcggaagcagagtttgcatggctcagaggccccctgtggcctgcagacatgttttgttaggttggcttagtgtagtcaaacaataagactagtggctgacatttagaattggaagatgtcatgacagatctgcatttctggctgctcttgaagactgtgatgatccagtgacatggactgtgttcttgtgtggcctgtgtgtcagctggcacagaggggtggctgtgccgcatggcagggcggcactcttgctgcctctcacctgcattgctcctggctctgaaggctgtgctctgctcactacattccactgtgtgctcctggactcacttgtcctagagatcaagttacctcttttgctggaagtatatcagtgaggatattttaatgtctcagctggattctcatgttcaattttaggatttccatcaccaaggagtaagaagaccttcgggcagagactgttgggtatgctcccttcagaaaacagttctaagaggatggaagaccaggacagtcctcaagaggtccttaagatgctcatagatttggttagtgtctttgcttttttttgcaggttatggttaagccaagcttgtccaacccacggtccgtggggagcatgcagcccagaacagctttgaatgtggcccaacacaaattcgtaaactttcttaaaacattatgagatctttttgatatatatatatatttt

SEQ ID NO: 115741 - DNA, 1084 bp, Homo sapiens
tcacaaaggcttgccctccagggagatgatggcactgccccccagcttctctgccagggtgcagtggtccttgacctcctcatagtagtttgcttgtaattcttgcttgattcctgtcagcttcttgttgatggcgtccttggagctggcattgatcattttgctcttaaggggcacagactcagtggcccagaagataaacaccaggtcctccttcttgctctcttggtctcataggttgcgtcatagagggcgtagaggcaatccttatccggtagcatcttgacaaaggtggcataggggttgtcgatggtctggtccacattgcccaccagtatctccttgccctccccttcaggatgatgttcttcttgtcttcactcaggcggaagagcaccgccttcttgcgcttcttcaacttctctggtgttgaagacttacacaacttcatgtcgttgaacaccttgatgacaccatcagagacagccacaacagaggccatgtttccagaagcaaaaaggagagggcatggagagctgcagaagacgagagcactgcagccgctgctgggacccagctaaactgataatttttatattagccagagtacctacctctaaagtttcattaagacattgccttaattcttcatttgacaattctgaattcgaatctacttgggagggaggagaaaagaatctattaggggaaaaattttgaatattttaactaattaaacataggacatttgtttacaaattaccaaatacaggtatcccctaaattgcaaagagaagagaattataatagaacaccaggtgcggtggctcacatctgtaatcccagcactctgggaggccgaggcgggcagatcacttgaggtcaggagttcaaggccagcctggccaacatggtaaaaccctgtctctactaaaaatacaaaaattagctgggcgtggtggtgcctgcctgtagtcccagttacttgagaggctgaggcaggagaatcacttgaacccgggacatggaggttgcagtgagcggagatcgtgccactgtattccagcctgggtgatagagtaac

SEQ ID NO: 115742 - DNA, 1058 bp, Homo sapiens
acagacatgagccaccattcccagcctgaagttaagtttaagaaacagtaggcagggataaaaaacaaacaaaacaacaacaaaacctcattatattcaactctgaatagcaggaaggcgtacccatgatgcctgaatttatgtggtgcattgaaaaatattcttagctaactctacaattgcttactctttccttttacagcttttcccccttatattgaccaattccattttcttctctgctgcctgcctaatcctgaccacacccttcttaacacaggccagaggttgcccttaacaagcaggagtctactgcactagaggtaaaacacagcctctcaagggattattctttgattcaataaatatcttcttatctaccttgacaaaataggtaaatctcctttttaaggaaataatcttgtaaaagaaccaagatgattttataaaaatctgggaaaaagtggatccagaatctgttagatgttgctcaaactagatattttagacttttactttaagttctatttgaagtcataaataatagaaacttggtatactctgatgttaatttcattgaaattctccaaataatacaaaacagtggctaagagtgttggctctgacatcagatatctggattaaaaatctgtctctgggccaggggtggtagctcatgcctgtaatcccaggactttgggaggctgaggtggaaggatcccgtgaggtcaaaagttcaagactggctggcccgagaccctgtttctacaaaatgaattaaaaattagcctggcaaggtggtacacatctgtagtcccagctactttggagactgaggtgggagaatcacttgagcctaagaggtcgaggctgcagtgagctgtggatgccatcactgcacttcagcctaagcaatgagcaacagagtgagatgctgtctctcttttttttttttttttttttttttttgagacagagggttttgctttttcacccaggttggagtgcagtgacacgatcttggctcaccgcaacatccaccttctggtttcaagtga

SEQ ID NO: 115743 - DNA, 1120 bp, Homo sapiens
aattttgatttgcatttcctatacagctagagatgctgaacatcttttcatgtccttattagacagttgtgtatcttccttggagaaatatttactcagattctttgcttaagttttaattgggttacaaatctttttattactaagttatgagattttgctaatttactaattcattgggaatttattgagtagctgacaaattgtgggggggggaaattcaaacaaacctagatgctggtttggtgatctttagtttcaccctagtgtcaagaaactgtgtcatataaacaggtaccagtcactcctctctaggtgaagagaccatttctgtaatttttcacgtattgaaaagtgtccagtttctggtatgtttctgaaactccagttaatgccatttattttgcttcttgtttgcttaacctccctgccttctaggggttataatgagaagaaactaacagacaatattcagtgtgagatttttcaagttctttatgaagaagccacagcatcctacaaggaagaaatcgtgcatcagctgcccagtaataaaccagaagagctagaaaataatgtagatcagatcttgaaatggattgagcagtggatcaaagatcataactcttgacttataaggctagctacttaataatcactcttgttgatatctctgccgacatcatagaaattgttcaagtgtcagtaacactttattaaaatcatgttgcagaaccagcaggtggatagtatataggtttatgcctgtgtttctttttctccatgagaaagctaaacatgaaatataatgaatatagtattattaaggattgagacaaaaactgtgattttaatacttaaattgctaaagaataaataaatctgacaaaatgggtggatatcttttaagtttattacagaaaaaaatgcagatgatctcttaaaataaaactaaagataaagcaacagagtattccttttttctttctttaaattagaaaaaaagttaagtgttgtactcgatacaaagttcaaaaggtacaaaagagcatgttgaaaagttaggtctcccttccagaccaccctatccccaggcaccccaggttccttccctttagga

SEQ ID NO: 115744 - DNA, 1276 bp, Homo sapiens
gagatcctcctacctcgtatgggctgggattacaagcgcaaagccaccatgcctggcctgttactgcttttgataaattaatctgcttttaaatgtatgtgagtgtgtttgtatctgttcaggtgtttcctcttcccgccaatctgtagttcaacaaaaatagtgtagtcctcttctagtagccccacaaattctgaagttggttattcactctttttagttggtttcagttttgatatttaaagcagtttcagatatattgcaatccaagtttccctctaaacaaaattccaatttatcagttagtatggctcctttatatttggtgtttatgtaacatttattttgttagtatccacccttgtatctaaaagaataattgatgatacatttcctttcctgaagtctagaattaattgaaaattacttaaagttacttagaaaatatttcaacaagcaattctaaatctcttttagagcaattgtatgatggctatgatgaagagtatgactgtcccattttagatgaagacagagtaagtatgactttttcataaagtatgcatttgttgaatttcataggaaagttgacttcagttttcttaagaagcatttttttttaaacttttcttacaggtagttgatgagttagataaccaaatgagagaaggtggagttattgttgattaccatggttgtgatttcttccctgaacgctggtttcatatagtttttgtgctgagaacagataccaatgtattgtacgaaagacttgaaacaaggtaagaaaggaaaaacattagattcttaaagcataatgttaacttttattcagatttctgaaattggccatgataaaagattgttgttgtttgttttgttttgttttgttttgtttttttgagatagagtctcgctgtcacccaggctggagggcagtggtgtgatctcggtccactgcaacctccacctccctggttcaagcaattcttgtgcctcagcctcctgactaacagaccacgggcacatgccaccttgcctggctaatttttttattttttgtagagatggggtctcccatgttgcccagactggtctcgaactcttgggctccagcaatctgcccacctcagcctcccaaagtgctgaggctacaggtgtgagtcatagcacccagctaataaagggttttatttgaaaatatgactactttaaaatatgggcagtactttttgagtaaattaatatctcaactgacaatctgattgagtaaaat

SEQ ID NO: 115745 - DNA, 2613 bp, Homo sapiens
cactttaggaggccgaggctggcagatcacctgaggttaggagtttgagaccagcctggccaatatggtgaaacccggtctctactgaaaatacaaaaattagctgggtatggtggtgggcacctgtaattccagctactgaggagactgaggcaggagaatcgcttgaacctgggaggtggaggttgcagtgagccaagattgtgccactgcactccagcctgggcgacaagagtgaaactctgtctcaaaaaaaaaattttacatatgattgctaattaggaaatttttcatttcagtcgtcaagaacttttaagggcagaggccaggtgagactctgtctcaaaaataaaaggaaaggcagaaggtggaccgcagtgtgataagtagtatttcacaaacagtatttttctgtggcttgtcttacaggtacaccaggggttggaaaaaccacactaggcaaagaacttgcgtcaaaatcaggactgaaatacattaatgtgggtgatttagctcgagaaggtaagggacactttggtgttagatttgttttgttttttttttaaggtctggtaagtggagtgttagtgctgggtattgtcatagggtacaaaaaacagagattgccattaaagaatatatactctgttagggaatccacagaaatattaagtgtctaatgctatgtcctggttattttgaccattttcccttccgccttcaaaatggctggcaattcttgtgaatagttgggaaggctcctataaagagactggatttcggataggtagaatgtgaataaggagaatgtttttaagttgaacaaacaaaggtttggtactgctaaacatatatatgagcacagtgagtatattggtctcactggaaagagactgttttgagctcaggtgtgggacctgactatgctatggtatcttagattagtgtgagatttgcatgcaactgcatatattctaagatgatcattgtttttatttattttaccctgttttcccctaatctttcatcgctcccttatttgtgtcttcatctttttatagtcgacaatgatttgtacatggtaggaactcaataaattaaagcgaccttaagttgcctcattaaaattaagaaaacatatggtttaaattttaaaaatttttttacagtttaacatagatttaaaatttttttaagttcctgacagttgctactaaagtaactatttcagattgatctaatgtacatatttttttcaaatgatctaaagtctgatcatcggatatcatggagtctggcaagacggcttctcccaagagcatgccgaaagatgcacagatgatggcacaaatcctgaaggatatggggattacagaatatgagccaagagttataaatcagatgttggagtttgccttccgatatgtgaccacaattctagatgatgcaaaaatttattcaagccatgctaagaaagctactgttgatgcagatgatgtgcgattggcaatccagtgccgcgctgatcagtcttttacctctcctcccccaagagattttttattagatattgcaaggcaaagaaatcaaacccctttgccattgatcaagccatattcaggtcctaggttgccacctgatagatactgcttaacagctccaaactataggctgaaatctttacagaaaaaggcatcaacttctgcgggaagaataacagtcccgcggttaagtgttggttcagttactagcagaccaagtactcccacactaggcacaccaaccccacagaccatgtctgtttcaactaaagtagggactcccatgtccctcacaggtcaaaggtttacagtacagatgcctacttctcagtctccagctgtaaaagcttcaattcctgcaacctcagcagttcagaatgttctgattaatccatcattaatcgggtccaaaaacattcttattaccactaatatgatgtcatcacaaaatactgccaatgaatcatcaaatgcattgaaaagaaaacgtgaagatgatgatgatgacgatgatgatgatgatgactatgataatctgtaatctagccttgctgaatgtaacatgtatacttggtcttgaattcattgtactgatattaaacatgcatgctggatgttttcaagttgtgttttagaaaactaataataatgagtaaacacagttaccatacttttcaattgaaatgaaggtttttcatcagccttaaaagtgtaagaaaaataaagttgtcattcattcgattgttggtgctttggcagttatgtttttaaaagcaattttctccttgttgtcaccaagaggagtaacagttggcagttgcagcaatttgcagtactgcagtctatttttgaccactagagtgtcaccttaaacgtcttcagatacatagatcatagtatgatctctggtgtgtacgtcactcttgtgatctgttctctcagattgctgaagtataaccatgactcccctttggagagaccagttggtcaggatttttattcatagtgaattcttaacctgctttgattatcttcctcaattgcccaacttcctaggtcccatttttctgtc

SEQ ID NO: 115746 - DNA, 1100 bp, Homo sapiens
tgggtgaaagagcaagactcgtctcaaaaaaaaaaaaagaataaattttatgagttcaggtaacctctaaaaatctttgtttcagacatcacctccctaatttagccaaagtttagtatttggctactaaatagtccttgagagggacataatgcaaaaattgagaaattatcagaagcggaattgagagttgaagaattaagattctcttatttccatatttgcagatgtttttgtatggaaaaggggggaaaaaggcaatttttaaaaaagaaaaaaataaagctggtttattccagcaagcattattatgaaatttaatgtgcttatatgagacattcagcaaatatttatagaagtaaatatatttagaatgaaaagtcagaaataatattctagcattccagtgattttggtttttaattcatatttgtatttgattttagggtggatctattttattaataacaggtcctcctggatgtggaaagacaacgaccttaaaaatactatcaaaggagcatggtattcaagtacaagagtggattaatccagttttaccagacttccaaaaagatgatttcaaggggatgtttaatactggtaagatttgctgtgaaggtagtagaagtagtggggcaaacctgtgcttaagggagctttcagataaagttctatgagtgcattttttcccatacttcttgctttcagagggatggaatttcacaggccaggtgcgatggctgtcacatgggaggctgaggcaggaggattgcttcaggccaggagttaaagaccaggctgggcaacatacaaagaacctgtctacaaaaataaaaaaatcagctaggtatagtgttgtgtacctgtagttctaactactcaagggctgaggtgtgaggatcacttgagcccatgagttcaaggttgcagtgagctatagtgttaccatcgtgctccagcctgggcaacagaatgagacattgtctcaaaaaataaataaataaaagttatttcaggagaaggaaagaaagcatgtctccaatggaagacaatggaattttttgaagattaagtcttaactgttttgttaacatatt

SEQ ID NO: 115747 - DNA, 1075 bp, Homo sapiens
gaaaaaaacctgatagggtttttgaaaatcaagaggtccaagctattggtggcaaagatgtttctctgtttctcttcagagctttggggaaaattctatattgtaaaagtaagaaatttttacacttttaaaatctgttggatatcacatagtcttaaaatggaaataaaatgtcacttttaaaaaaatgtcatgtattttggttctgctctaagagttagagctaggtcagatactgtttgcctaggcctaagacatagtaggaaatcagaatattttctgaccgtaagcaggattaaaagtaaaaacatgcaattgcaggccatatccatgtgtgtaaatctttaaaattatagtttgctgaaggtaagagagcagatcatctagacttgtagtggcaagtgttggtagcctaaagccctcttaacactgggctccagccaacagagccttatacaaattaccaggtagtttaaggtttctttcaatcgtcttgtatttctctaatttacaagcgttctgtctccccaaccagagatgtttatcgccttttctgtcttttttgatgactgctccccctcagttctttcactccctattgcccattttagtgtcccaaataatccctccttttgatagcaaatgcctgttttcagtctgatgaccctaaaggaaagaaattaggatttctaaatggaaaccttcataccatctgaggaaaatgggcatcacttaggtggcagtgaggacactcctctgtcactggatcctcttactttgaacctgagtgactattcccacctgattcttttctttctctcctttcttttcctccccaacatacgtttatcgtctcttgcattagtgaatggaattcgtattctttcatgtagagagcaacatcttcctacatagtaaataaaagagtaaagaccactgtattgagatgagaaatcaagggaagaaagcaacccaaagctgaaaaaggtgaaatgggagtgcattaggaaatggaatattttaagtctagagaagccataatctaagcatcagaattgttaatttagttcttgct

SEQ ID NO: 115748 - DNA, 1792 bp, Homo sapiens
ttgttgtggtttggtttggtttttttgtttgtttgttttttgtttggagacagagtcttgctctgtcgtacaggctggagttcagtggcacgagcttggctcactgcagcttctgcctcctgggttcaaacaattctcctgcctcagcctcctgagtagctgggattacagatgcgtgccaccacgcctggctaatttttctattttcaatagagatgggtttttgccatgttggccaggctggtcttgaactcctggcctcaagtgatctgcctgccttggcctcccacagtgcagatagtacaggcatgagccatcgtgttcagctcctttttgtattttaagttgtaggaacttattcagtttgtcatttaccttgtagttttgtttttatagttaaagggactagctaaacagcacaatgtaggtaaatgaaagatggcttcataatcatcacactcatggtgtaatttaaaaatcttctcctttggttcttattaatgcctgcactgtgaatctgacagattgaaaatggaagccctgactgacagggaacatggaatgatagaccctgacagcggagatgaagcccagcttaatggaggacattctgcagaggaatctctgggtgaacccactcaagccactgtgccggaaacctggtctcttcctttgagtcagaatagtgccagtgaactgcctgctagccagccccagcccttttcagcccaaggagacatggaagaaaacataataatagaagactacgagagtgatgggacatagaagccagcctgctaatcagattgctacttcacagcttcatttttgtttcattcagtggtacttcagcagagttaatatgcttttctgatgaattacacaacagtttgttaattcttcattcttgtagtatttcatcacaagaaacctactcttctgtcatcttgaagtaaatagaagatcaagccttcaaatctcttaattttttcggtatttattaaatctgtgagtggtttaaggagcggtcagtgtgtataaagtgtgtttgaacattatgccaaatatcaagatgtgaaggactaattcaggatgcaaaaacgttattggggggttgtaaatatcaactattcaacagtttaggatgcaattacgagtgtaaactgtgtgccttatttacactttattgtctcccgcttctcagatagttttgatgtgttgtacagtggaatatcttagatactttttggaaagtatttacataagttatatcacaattaaaatgttgaatttaattttgtttctcctgtcttttaacattatctagcacgcactcgctgccatgggtccttaagcacagtgcaccaatctccctcccccagtgtcaaacttttcaaaagatagggaagaggatggcaacgttgcgatgagaactgtaaactctttccaaaagagcccagtgtgtggtcattgccgcgacgtgccggctggtggcaccgagcagcctgggcccagagcggttgtcgggccgacagatccgggcggggcaaagccgggcggggaaagctgggctcgtcccgtcccggccccgcccccaccccgggagcccgataccggtttcagagtcctgggcagcgtgcgcgctcttcctggcggctgcgcaggtaagtgggaccggggtggggccacgtgaccgggagaggagggcccggcggcccccggcccaggtgtgctgcgacggacggctgcccgcgctcggcgctcagcctgccatagcccgcgggggaggccg

SEQ ID NO: 115749 - DNA, 1534 bp, Homo sapiens
caactcctgcaaagatccctacggagggtcagaaggaacctttagttcccggaaagaggctgacgcagtgtttccccgggatccctatggatctctagaccgacacacacaaacagttcgaacatacagtgagaaggtggaggagtataacctgagatactcctacatgaagtcgtgggcaggcctgctgagaatactgggtgtggtggagctgcttttgggggccggtgtctttgcttgtgtcacagcttacattcacaaggacagtgagtggtacaacttgtttggatattcacaaccgtatggcatgggaggcgttggtggattgggcagtatgtatgggggctattactacactggccctaagaccccttttgtactcgtggttgctggattagcttggatcaccaccattattattctggttcttggcatgtccatgtattaccggaccattcttctggactctaattggtggcccctaactgaatttggaattaacgttgccttgtttattttgtatatggccgcagccatagtctatgtgaatgataccaaccgaggtggcctctgctactatccgttatttaatacaccagtgaatgcagtgttctgccgggtagaaggaggacagatagctgcaatgatcttcctgtttgtcaccatgatagtttatctcattagtgctttggtttgcctaaagttatggaggcatgaggcagctcggagacatagagaatatatggaacaacaggaggtaagtgatttcataatccctcatttgtgtgtgtatgtttgttttttctgttatttgctcccttgttaaaaaatgtatagcgctcaaaacagaaagctttcatagaaatcttttctttcttcctttttttttttttcaatggtctgagattcaaaagtcctagtgcaatatctgacatgctttgactgggataacccactctggtgtttggctgttacataacattgcaagtagacaccagatgtgtaatatatagtttgttggctgcattattatgtctgtctgaagcttaagggaaagatacagctaccgaatttttgcaaagaagaagagtgtactcagtaaaataagtgtctcatcattaagtttgagaacaatcttaattctttaataaaagctcctaatttttcatttaaatgttacaatttactttctcccagtgagttgaataaagccaaataagaatgtggtaaaccatgtttgattttttttaagtattgagagattgaattgtaatgaacatactctgaaaacttgcccagtggttttgataatttgtctttatttgaggaagacgtatggtccaaaatgagaatggaagtcctacattgtttttatatttctagaacttaataggataataatgagaataaataataatgagaacaataagaagaataaaataataataactgaaggatgagataaaagccctacctaaaattattttggttgaacagtagcaaatgttagagtatgttccactggctacattat

SEQ ID NO: 115750 - DNA, 1021 bp, Homo sapiens
gataaccaccttatgatgaatgcagttgcccattttcttgaagactttttcttgtggtttttttctttcttttttttttgagccggagtctcgctccgtcgccaggctggagtgcagtggcgtgacctcagctcactgcaacctcctcctcctggattcaagcgattctcctgcctcagcctcctgagtagctggggctacaggcgcgcgccaccaagcccagctaatttttgtatttttttagtagagacagggtttcactatgttgaccaggatggtcttgatctcttgacctcgtgatccacccgcctcggcctcccaaagtgctgggatcacaggcgtgaaccactgcgcccagctctttaagactttttcttatcccagtgcagaggtcaggattattcccgcatttgagtgcacttagaggagataaggaatttgtctcagattgcgagccagtaaatgggggctgttaaaaccactaggttgtttcaaactcatcattctgacattacagagatcttgcttagtgttgatggccctagccaatgggttagttatcctttccagtgtgtttggtcagctgcaaatctggataagcgtgtctcctccactttgtctgtgtttaccagtggagacctcccaccaggtggacataaatggttcattcttttgtgctaattgggtgccgtaatccagccccttgggaatctgcccacccacacaaggatgtgctcaagattttcaggattctttctctctgcattccctgaagaggaaataataaaggagaaaataaaatccaccagtttggtaaccttcccagaaaaggaaatgaagttggtgtggcatgacttgttcttaacgagctttcttttcttttttttttttttgagacggagttttgctctttttgcccaggctggagtgcaatggcgcaatactggctcactgcgaactccgcctcccaggttcaagcaattctgctacctcagcctcccaagtagctgggtttacaggc

SEQ ID NO: 115751 - DNA, 1027 bp, Homo sapiens
cgtgagccaccatgcctggcctaagtgtgtgtgtgtgtgtgtgtgtgtatttttttttttttttttttgagatggagttttgctcttgttgaacaggctggagtgcaatgtcgcgatctcagctcaccacaacctccgcctcccaggttcaaacaattctcctgcctcggcctcccgagtagctgggattacaggcatgcgccaccacacctggctaattttttttttgtatttttagtagagatggggtttctccatgttggtcaggctggtctcgaactcctgacctcaggtgatccatccacctcggcctcccaaagtgctgggattagaggcgtgagccactgtgcccggcctataatttttgatagatgattttgaattattttccagagataaaattttaaatgtttccattatatcactgatttatttctgcaaattgaataaattcttaattttctgcatgcacataatacaaaaggtattttcatagttttggatttataccaaatgaaaaggattctcttgatgagcacctttaactgatttttctgttaaagttttaacaatttgttcttggaagtcagttcgtgaaggcaagtttgtcagtattttcacaaaactattcagctgaatccagaaagtgaaacagcaagaatttgcattgtaaaattgtgttataaaattggactttgaaatttcaaaaataagaaaaattttcatgtgtatttatactaaataccgttttaggaaactaggatcagggtgtttctgttggcgttggcattaactagctggatgtaaatttgaaaagccactcaagcagcttcctagtctagaaagtcagaggtttagattagatttccgacatcccttccatttctgacctgtagttcttgtctggaattctgctttgttataaactattgttctaaggagtttgttgtgatagcacatagttcattttgtaaagattccctgcgtataaagtgatgccctacatatgtgattttgtattaaaagt

SEQ ID NO: 115752 - DNA, 1061 bp, Homo sapiens
ttattggtaccaagtttgtgtataagttcatattatttcttggaaatgagaaatggagttctatgaagatttttaagacaattattgagtaaaatacaaagaataagatgacctggcattccattttttttactttatatatgtgtctaattttcaaatttaattggatgaattttgtaacaaacatctttagataacttacattctaatggtttttacagattattgaataataaaatacagttttgaaaaaaatggatgaagaacctgaaagaactaagcgatgggaaggaggctatgaaagaacatggtaaggagagctttattgccctgtcttttcttttagacaatgtctttttttttctttacaactttattaaagtatattttacatatgttaaaattcacccatttccaatgtacaattcagtgatgttttattaataatttactgagctgtgcagccattatcataaaccagttttagaatattgtaaccactccagtaagatccttcacattcatttacaattaatttaaatcttaatttaattccacctgtgggcaatcattagtctactttttgtctccaaattttaaccttttctggacatttcacaaaaatgtgatcatatacaatcatgtgccacataatgatgttttggtcaaagacagactgcatatatgacaatggtcccataatattataatactgtatttttactctaccttttctatgtatgtttagatatacaaatactgaacattgtgttacagttgtcttaagatattcagtatagtaacgtgctgtacaggtttgtaacctaggcgtgggataggctataccatctaggtttgtgtaagtataccctgtgatattcacacaataatgaaattgcctaacaatgcatttctcagaatgtatccctgtcagtaagcgatgcatgactataatagttggtctgttgtggctggctttcacttatttttaagactcatccatgttgcagtgtgtattaatacttcattccttttttattgctgaatagtattcccatcta

SEQ ID NO: 115753 - DNA, 1398 bp, Homo sapiens
attatgacttatagggagattcttaaagaagatgaatctggatcacttaaagctacaatagaagacattctattcaaggcaaagagaaaaaggtatgtaaccttcctacgtatcttaaaaaggtaaaatatattcattttaagcctttctatctataaatactcctcagtacttcattttagctgtgtttcagggaaactgacctattgccttctgactatggggaaagaactagccacctacccttgccccagcaggaaatggtctttagagactgtctacaatacctataattatgtgtattgtattccataagttaattatttactccactaaaaatgcacgttatgacattcttaatcagaattagaaaaaaagaaaaacaaaggaggtcaattggaaagttgtatttttttttgtggggggggatagtatatggaattacattaaaatgtttgtataattttaacagagtatttgagcaccatggacaagttcgacttggaatggtatgtcattattttttcttttactagtacagaactagtttaggttagagaaacattctgtcttgctagaaaaaacaatagcaaaacaacaaagtttttaaaagaatatgttaaaaatacgtgcatagaatatgtaattattaaatgccatttttactagtcaaaatggcacttgaggctgggcacagtggctcatgcctataatcccagcactttgggaggccaaggcaggaggattgcttgagcccaggagtttgagaccaacctgggcaacagaacgagacccagtttctacaaaacaaaacaagtacttgaaattggccctttcttttttccgatagatgcgccacctttatgtggtagtagatggatcaagaacaatggaagaccaagatttaaagcctaatagactgacgtgtactttaaaggtaaaatttaagtttatactaaatcatttaaatttgtaccaaaatcacttaaacttttactaaaaaagtggggaagaacactggattctaaaggatatttttaaagaatgcaatattttttattttttgccttgtatttttagttaatgctaatgatagctaagtagaagtactgccaggttatttagggaaattttaaaccaacatagctaattatttgtgtttttaatttctatcctcccaccccacatcaggatcttggtttatcagttatcccttttctttcttgaatcttcattctcctttgccttacttaactctgtctcctcagattacaaatatgttcgtattcctaatttatcaaaacctattctcaattctgctcgttctcccatctctcttcattggatcttttcctcattgaaatttcttctgacacatccaaatggttccatctttta

SEQ ID NO: 115754 - DNA, 1022 bp, Homo sapiens
tattttgcctttatctagtatgtctttttttgtttaaacagttgttggaatactttgtagaggaatattttgatcaaaatcctattagtcaggtacgtatctaagtgatagaattcagaattagattcctattttgcttccaaatgtaatttatttttaaaaattggacatgtattttgtgaattacccaaattgtttaaccagtttctggtatacttaaaaatgaaaagcgtaataactctaaaagttaaacgtaatgtgaactcatagctaaatttatttgccaaaaacagcatgagaaaaagtttctcacctgttgcttctttcttttgtaattactagtttattttagctatataaattatttttttttctgctccaatatcatctacaggaatagttatatatattcttaatgggaggaaataacttgttatattaataataatttttgtttttatttcaagattggaataattgtaactaagagtaaaagagctgaaaaattgactgaactttcaggtatgcataaaattacctttacatgactcaaggactttgctttatttacccaacctcgtagccctgtttatatggctgcttaataagtaacgtgaagggtggttcctctgtcttctctaggtgaaacaatttaataacatctcccccaccattatattcttaggatacaaggttaactattctaaattgagttctgcatcatagtggtaaataatactacattgaatataaatgtttttatttaaattctatatgtgcttatcctgaaatttttttttctttccttttttttttttttttttttttttggagatggagtcttgctctgtcgccaggctagagtgcagtggcacaatttcggatcactgcaaagtccgcctcacgggttcaagcgattccctgcctcagcctcctgagtagctggaactacagatgcccgccaccacgccctgctaattttttgtattttagtagatacggggtttcaccatgttggccag

SEQ ID NO: 115755 - DNA, 1033 bp, Homo sapiens
ggtgctgtcttggctcactgcaacctccgcctcccgggttcaagagattctcctgcctccccctcccgagtagctgggattacaggtgtgcgctgccacacctggctaattttatttttagtagagacaggatttcaccatgctggccaggctgatctcgaactcctgacctcaggtgatctacccacctcagcctcccaaagtgttgggattacaggcatcagccaccatgcccggccccagcagttttctatggatgttagtgaagtcatgtataaagatgaaaaatattctggagattctgacaggcctcttgaagccacctttttttccctccaatcagaccactgctgtaaaccacactgacactattgtagtatgcttttttcctatacccataacacagtgggagattaaaaataattttgtagggtaggaagagaagtggatagagagccaggagatctaggtttgggtgctgctggtcctgcagttaagcaggcatatgtctttgggcaagtcatttcacttgtttagattaattttctcacttatgaagtgagggatttggactgcttagcgaggtacttttcatctctaaaatttatgaatctaaaatacttgcagtaaatattaaatattacaaatggttaatattttaaaacttactcagatgagtaaaaactcaagggagctccaagttgatgaatagacaaagaagacatgattcacacagaaaaaacccagaaattaaatcagggaaactagtaatccaaaaacactctacccaattacataacattttattttttaatatattttaaatgagcaaaattaagtttccaaagcaatatgttgcttgtggaaccacagagaaactgttatttatagtgctgatagtcttacaaattagttcaatattttttagaaaagcataaaaattgttcctgaaattatatttagggaatgttatggaaggagaatgatcactctacaaagatactctttgtaacattatgtataatagtgacag

SEQ ID NO: 115756 - DNA, 1033 bp, Homo sapiens; identical to SEQ ID NO: 115755

SEQ ID NO: 115757 - DNA, 1033 bp, Homo sapiens; identical to SEQ ID NO: 115755

SEQ ID NO: 115758 - DNA, 1033 bp, Homo sapiens; identical to SEQ ID NO: 115755

SEQ ID NO: 115759 - DNA, 1096 bp, Homo sapiens
acaggcgtgagccaccgcgcctggccttaaaaacattttaaatggcagttaaactcaccatgaagaggacaatgtacataatgcaattgaagcaacaacatatgaagacctatttgtaggttcacatatgaacaggcaaagactatgttacaagtgctgctggctaccagtaattattaaacacatgctgatttcagagatgttaaatgtgaaaatgtattggtcttaaaaatgatgaaatatggaaatattaagagtaaaaaaatgcactctaggttagcattattttaaaatatgtatgctagtctataaggagattatttgtattctgtttttcagtatgaagtgagagtgtttacaaaatattgcagataaaattccaacagaaatatacattgaaaggattctgttctttaacatcatagatatgtaaattttgagagaaacataaacttttttaatatataggattttatttaaagaccttatttctattttaggaaacccaagaaaacatataacgtctttgaaggaagctgtggatatgacctgccatggagagccatctctttataattccctaagcatggctatgcagactctaaagttagtattatacattatgtataattgaattagaagttttttaaatgagttaagttgaagtgatgtgttaatatggggcccataaacccagctataacaaaattgttaagtacgagaattatgtagtgttatttatgatgtttagtgtggtgttggttagtaatttttattttacattttagtaagatattgttaaaggttttataaaaatataatttaaaactgtcggcagtatcaatagtacaaaaataggttgatgaaaaaatattttattaaaatgagatttaatatagtataataattgtaagttggttgtacctttattaacatttattattttattttgaaagtaatggccaaaaccacaattccttttgcaccaatgtcatatatctgtaaattaatagatatggcaagttcagctatatggaatagagctaagaccccaaaggaaatacttggtatagttaaagcttatatatatatataa

SEQ ID NO: 115760 - DNA, 2223 bp, Homo sapiens
gggtcacctgaggtcagcagttcgagaccagcctggtcaacatggtgaaacaccgtctctactaacaatataaaaattagccgggtgtggtgggaggtgcctgtaatccccagctactcaggaggctgaggcaggagaatcccttgaacctgggaggtggaggttgcagtgagccaagatcacaccattgcactccagctgggcgacaagagcgaaactccatcaaaaaaaaaaagaacatccaggatttaggaatcacattaaacacttactggctagccaaaaacaattatgtatccatcttgcttttcacacttaagtcatttagaagtcattcaatatcaccatatctagatcaatgttgtttttgaaattgttgcatatttcaggtataattatggtttatataatcaattgcttcctgttggatatttaagattttctttttttgctattaacaaataatgcttatatctatatttttgaacatttgtacaagtataaatgcatggtaaattcctagaggtaaaattactgagtcaagagttttacatgttttgtgaattttgatagatattgtaaagttgttcttcaaagaagtttcatttattgttttcccacatttagccaacattaggtattatgaaacttttttatattggccaaaactcacaggcaaaagaaaaagaaaaaagtctcattgttttagcttggtatttatttgcttatggttgaggttaaatgtagtaaaaatgaaaaacccagtactatagaagatagagttgaagaaatattccagaaagtacaataaaaggagtaaaataaagaggttcaaataggagagtaaagataagaatactggtggaattatccagaaggtccaatatgagaatgatacgagaaaaaaagaaaaaaagtaggatagaaaatcatcaaagacatagttcaaagaaattttatattgaaggacagaactttctagattgaaagggcctgttggctgggaagggtggctcatagctctaatccttgcactttgggaggctgagactgggggataactggaggccaggagttccaggccagcctgggtcacacagcaagacctcatctctgcaacgaagataaaagaaagggactgccaagtgcctaacgtattgaaggaaggcagaccccataattgtgaaatttcagaatacacaataaaccattaaccctaaacatttccagagaggaaaaactaggtcacacacaaaggatctggaattaaaattgtttggcttctcattagcaacaccggatgcagagagggagcagtcaccttcaaagtttgtggtgaaaattgttaccaacttagatacccagccaaactatcagttaagtgtaggtagaataaagacattttcagacttgtaaggtctcaaaaagagatttttctggggaaggtctggaagaggtaggtgattcaaaggaactgagaaggagaatgacatgggatctagtaatatgtatctaattcaaaacaggctgaagaacggcctaggatgatggtaaggagaaattccagaatgatacctgtgtgtcacatatggggaaccgtccagtttggagacagtcaggatgctccaggagagagatcaccaaggggatgaaaactgcagaactcctgatgtatttgaacatatcgagaggacagttagactattccggagaagattgggcctgaattagtgtcaattatataggaaactaaccttgggaatagcaacacagtatttccaggaaaaaaaaaatgttttaaataggggaaaacttatggcttagctgagaatatttttataggcatagtaaactaaacattgattattgttctatccaaaaggaagacttcactatgtagaaagaattgagaatgacactagttaaatatttatgcattactgggttcaagatgattgaaagataattaaattctcttctttcatagttggagatttatagccaataactgtgaagaatcacaaagtagcacttattagaataagtgactatcaaacaaacgttagaaagtgcttctggctgggcatggtggctcatgcctgtaatcctaacactttgggaagccaagataggaggattgcttgagcccaggcattcgagaccagcctgggcaatatagcgagaccctgcctcaataaaaaattagccaggcatggagataca

SEQ ID NO: 115761 - DNA, 2223 bp, Homo sapiens; identical to SEQ ID NO: 115760

SEQ ID NO: 115762 - DNA, 2223 bp, Homo sapiens; identical to SEQ ID NO: 115760

SEQ ID NO: 115763 - DNA, 2223 bp, Homo sapiens; identical to SEQ ID NO: 115760

SEQ ID NO: 115764 - DNA, 1050 bp, Homo sapiens
tttaggagtgtgaggcaggaggatcacttgagcccaggaatttgagagcagccttggcaacgtagggagactccatctctaccaaaaaaaaaaaaaccccacaaaattagccaggtgttaggcaagcatctgtagtcccagctacttgggaggctgaggtgggaggactgcttgagctcaggagttcaaggctgcagtgagctatgattgcgccactgcactttagcctggatgacagagcaaaaccccatctcaaaagtagataaataaaaactaaaagctattgagggtaatgtgctacaactttttaatattccatctacaaaattacataattggggtgagaataatattaaagcacttacagtgaacgcaacagtggactgtatatttgcatatagtacatctgaaattctttaatatttataaaagtggatctgtgtgtttatgtatacagaaacaatggaaaaacaaatatgctataaatgaaagtcagaggccaccagatcgttcaaaaatgactatgagagacttcatatattatctaccagataataatccaatgacgtaagtaaaatttatttctgctttactatctctttttttttttttttttttttggaggtggagtctcgctctgtcacccgggctggagtgcagtggtgcaatcttggctcactgcaacctctgcctcccaggttcaagcgattctcctgcctcagattcgcgggtagctgggattacagatgctcgccaccacacccggctaatttttgtatttttagtagagactgggtttcgccatgttggcttgcctggttttaaactccttacctcgggtgatccacccgcttcggctttccaaagtgctgagattacaggcgtgagccactgcacctggccttctgttttactttatttgggtatgtagttatataaatagcacttttatagtaaattttttagttttccaaaaacatgttgacaaaatttggaacacatatgtccttttaaatagaatttcataacaaaaagtagcagtatttcaag

SEQ ID NO: 115765 - DNA, 1036 bp, Homo sapiens
taataatagttgtttttgtgtgctattttccattagtttgtgatgatgattttactggtcattaaatagttagagcatatttaactgctttctctgcaggaatgtaaaatataaagtgcttgtgtttttcaaaatttccatggagtccagcacagtaatacatattgaatatcaaagacatgtgcaagtcaataatacaaataccgttttataatacgtagcccaaagatgttttgtaaatattatattgctgttatggattttgaaaatgagttgacatttctttctaccctcttggaatcacattgtaggtaaaacttagcagatgcttggaaaatacccatatttcacataggtattattatgcctttgatatgattgccatgctaaacctcaaaatataactatttacatctcatttgctatttgtttccttgtttttagtatacatctatttaaaaatgtgtttatttcagtttaactgtagaagttttaagaacaaaaggcccttgtgttgttgaagaaaatgaccccatatttgagcgcggttctacaactacatactccagctttaggaaaaactattactctaaaccatggtcaaataaaggtaactaattttcatttaaaaatgtgtaagttctctatttgaaatgaattgactgtttctgaattaaatcagttctcccctaagtacataaaatgcaaactaccattttattccagctaattttattgacacctctatcttatgccctccatggaatggtatctctgactttgtcttacaaatcttcaaaaaaattttattttttatagcaactgggtctcagccaggtgcagtggcttacacctgtaatccctgcactttgggaggttgaggcaggaggatcacttgaggccaggagtttgagaccaacttgggcaacaaagcaagacctcatctctacaaaaaaattaagaaaaaaaattagaaagtagagatagggtcttgattgattgccgaggctggagtgcagtgaaactatcttagctt

SEQ ID NO: 115766 - DNA, 2019 bp, Homo sapiens
atggtaggaactgacttttctatgatcggacaactttttcctcacagagcaaggatagaaattaaggtaaagtaaacccatcacatttgttgattggaaagagaccaaacattacaaatgttagtagtattattcgcttacctttggtttaaatcttagttcatcttttttttttttttcattgagacagagtttcactttgttgcccaggctggagtgcagtggcacagtctcggctcactgcaacctctgcctccgggttcaagcaattctcatgcctcagcatgtcacatagctggtattacaggcacctgccaccacgcccggctgatttttttactgttttagtagagacggggttttaccatgttgcccaggctgctgtcgaactcttgagctcaggttaatccccccatcttggcctcccaaagtgttagaattacaggctagagccaccgtgcccagccctttttttttttttaaactgttatgatggttttgttacatttatccctctttattgaaaagtaatatttatcagttctgatatgggtataatcttctttatgttagtttcatattttcttatatcttcttcatttctaaaatgaatttgaggcagtaccaataaaaatgcactgcaactaagatataagaagagttacataatgaaaagagaagataaatgtaccagagtactttggttaagggtagcttttttttttttttttttttttgagatggagtctcgctctgttgcccaggctggagtgcagtggtgcgatatcggctcactgcaacctctgcctcctaaattcaagtgattctcctgcctcagcctccctagtagctaggattacaggcgcacaccaccacgcccagctaattttttatttttcgtagagagggggttttaccatgttcgtcagcctggtcttgaactcttgacctctggtgattcacccaccttggcctcccaccaagtgctggaattacaggcgtgagccatcatgcccggttgagggtagctttttcaatgcaaaatgtatttcagaatttcctaggaaagcttaaagagaagaaatctgagtttacacagttctcattttctgatccgttgctttcctaggcccccttaactttgggacaaccagtggcactaataacaacagtgatgtcagttacagctattatatgcccaagaggatgagctttctctgttttttagtttctttgcttgagaaactttatacaagttttctgggtttaagtgcatttgagtgtcatcacactatgttgccataatgcattctcaattgatagtgagatctttactcaaccatgggctttttacttcatttctcatccctatcatgttcattacattaataaaaggaaccattaggaaggtatgttttttccactagaactaaattaggcatggattgtctggggacattacataaggggcattgtacagtgtaatgaaatagtcttgttatttctgcaagagatgaggaactttatattcttcatgttcattttctaatgttgatctttgataaaagaacaaaatgttaaaattctgtgaaggctagaaattgattttctggaattggagtgctctgctgatctgtgtaattaattataaatttgtcactgggctatttgtctcaaaaatcatgtatattcttttcctgaaaggttactatggctctagcaggtcgttgggtaaagtgtagaaaagtgagagtaggctgggcatggtggctcacgcctgtaatcccagcactttgggaggccaaggcaggtggatcacctgaggtcaggagttcaagaccagccaggccaacatggtgaaaccccgtctctactaaaaatacaaaaattagccggacgtggtggcgcatgcctgtaatcccagctactcgggaggctgaggaaggagaatcgcctgaacccgggaggtggaggttgcagtgagctgagattgtaccactgcactccagtctgtgcaat

SEQ ID NO: 115767 - DNA, 1046 bp, Homo sapiens
atcttaaacaggatacagtgttgtatgcctataggcccagctactctcaggagtcgctgaggcaggaggatcttttcagccgaagaattcgaggccagcctgggcaacacagcaagatcctatctcaaaactagaaacaactcattgatttggaggctttctattggaaattttttttttaaattaaaacctatataagttttttgagagaacttatgttttgaatttctctgagaaccatgtggagatcctttatgattctttgagtgctatgtctttcagaatcattgtggagagtcagaacaaatgaagtctgggtcaacagtgaaatagggtcttcaggaatcccagatttgggtttagtttccagagattctttttattttagtatataccttcttttctgaggctatcttgtaatcaaaccagtctttggcttatgtgcatagagcaccattttctctacattgactttaagttcaagcaaggatttgcctcctggtctggattcattcctggagtgttcactgattactttcagatataatgctgttgataggtatttagtgggcatgttcctgattaaattcatttacttcccactttgctgatacttataagagtaaatggtgaaatggttgtgataaaggtagggcatatggtggtgaacaggcatttcaaggacttctcagtccataaaaaaattgatttatatttatacacagctcaaagtgtagttcaagttttgacaaagaatatgcctgtgtaatcactaccccaaacaatagaggaaatgttttcatcacttcacaaggtctattatgtccctttctgaacaatcaaatgctgtcctcctggcccaaggcaaccactattttcattttaatcaccatagatagcttagtgtgttctagaatatcttatacatggtatcatatagtatgtaccctagtatctgttttcttccactcagtatgtttttgagattccctcatattattgcatgtatcagtagtttgttccttttgttttgtttaaaactagtt

SEQ ID NO: 115768 - DNA, 2512 bp, Homo sapiens
atgcattttcaatttacagtatactcaacttatgatgggtttattgggatgaaacccagtgtaagtcaaggagcatctctatatgtaactgtttttgtttaataaaaatgagattttatgtgtatcttgttctgcttggttttttaaatgcaacaatatgctttgaaatttttcacatgactacatataatcttacctcattattattattggctccgtggatttttatatattatttagtcatttcccattagacattttaggttgtctttaggttttttgttcatacaaataaataatacagaggacatctttgagtctctttcccacctttacaaatttttctttaggttgtttaaatatttatagtaatttctcttgttttcagtgaaaaaagttgcctgtgaaggagtgaataatgatccagatgagtctatgagttctagaatttcagacacggaaagatctcagaaggatgctcagacagttgaagaagagtctctgaccttatcaagggaggatgcagagcaggttgcattagaagtagacctaaatcaaaagaaaagaaggaggaagaagcaagatggagctaatgaactgggagtaaacaatcttttagaaaatgccactgttcaggcgggtccttctaaaggagaaaaacacaagagtaagtttcttacatatttaaaaagcctctatattacttgagaagacatgtacagtaatatggtatgtaacttaattttctgtctagatagcaattaatgatgcttattaattggttctgtactaatggtactgtgctaacgctgtttatttttaattaaaaaagtttatgtaaaaaaattaaacaaattaaagtggggagattgttctctaaagtttgtttctaagatgtatcacctcctgtgcattcccattaactatgattagaaatcacatctatatagagttaaaagtatgttgctatgtctgtcaataaagcacagattttcatgttgtacctctacagagcacctctgtgaacccacaaggggttagttcctataaaagaactagtggaatatgtattccttccctttttcttttttactctttgaatgcaaacatattgccacttatgagttgcttggggatgagggctaagagtttgagggggagtcttggtccctttccttaagagttcatatgtagattatttaaagctgataaccaaggaaaaggtaggagcagaccagaacaacctttctataaaatttatgttttctgtagttcagatttacccatctgattttaataaaagagtactggtagctaacatagtatgctttgtaggcatctcaatattatgctcttttttggcttattggagtcattacgtataatgcagaacagcttaatgattcacaaccaggttttagaaatcaaacagaccttgctttaaattccagcttttttacttgcttaagtattgcattgggaaagttacttaagatctctgaactcagggggttctctatgaggttaatgttaatatattttaataggattgtttcaagtattaaatgagataatgcatctgatggacttaagggttcctgccgcttagtaagtacttaataaatgatagctattactgtgttactaattagtatacttctgaaggagcaaaagaatagttaagtcaacttttagtttccctacttgacatataaaataagccactttaaatacttagaatttaagataaaaggaagatgctacaaattgcccaagaagcttgagctgatcctcatatatgttaagtttttattatggtctaaaaataagatgtgtgccttgcaaatagggacttgaatgttgcttaaggttttgtaggaaaagagtgttataggtaaattcctttgtgctctaaaaaagatgtttttgctgtcattttttagaataacatgcattttgtatttgtagataaatgtcaggctataaggcctgagctaaaggaaggtgaatgcagtaaggagcagatgctttcctgcacacaaaacatagatggcattgtgggttttgcctccactgaaaaagttgagaaaagaactgaccccatcctttcattaaggtattttctgtgtcttttctggttttatccacatctgttgattactgagaaaggagtgttgaagtctccatctgtaactgtggatttgcctgtttctttttttcagttctatttgtttttgctccatatattttgaagctctgttgttaggtgtgtacatatctaggattgttttgtcttggtgaaattccctttatcattatgtactatccttctggtattgctctttttttctgatgtttactttgctattgtagctttcttttggttggcgtttgcatgggtttatcattttctgtaatgattttctctatttttggttttcgttagtttgaatgtgatgtgtcttgctgtgtgtgtgtgtgtttttaaattttattttgtaatataaaatca

SEQ ID NO: 115769 - DNA, 2267 bp, Homo sapiens
gcctgggcgacagagcatgaccctgtctcaaaaaaaaaaaaaaaattctcatctgcatttaggatttttagaaaatctcctctagttagaagtacaaaaaatgaagttcttatttattcatttattgagatggagtctcactctgtcacccaggctggagtatagtggtgtgacctcggctcactgcaacctctaccttttgcgttcaaagaattctcctgccttagcctcccaagtaactgggactacaggcacacgctgccatgcctggctaattttttgtattttagtagagacagtttcaccatgttccccaggctggtcttgaactcctgagctcaggcaatccgcctgccttggcctcccaaagtgctaggattacaggcttgagccaccgtgcccggccagttctgttgttttaatttccatttgtttattacaaagtttgaactgtttattgtaagtagataaattgtagcaaattaaattcacagaaccacgtggaaaaagataaaatgaatacattggacattttgagaatggagactacagagagagagaatccagaagctgaaactgtatctgtgtgagtattcaggaagtagtaaaaaaaaaaaaaaaaaaaagtaactcttaggaatgatggtaataatttgttttctacttaataaggtctgaatttaattttcaagcagcatactttaagttcgttttcaaccataggtggttttgaaacattcataatactctctctgcttgatattgcttatataaattttatgagtctattgagttagccattacatttgaatgtttacagtatatgcccctggataattttatttatactaagagattttaaaagggaatatttaacttgaaatagaaatctaaaatagaatgtgaatctgactggtggattctgggctcttccaggggttaccatttatactatgatttgggactaatcccctggagttctacattattctatagtatccttagtcaggagtagtattctatgcttggcagatgtagatttttccaattttgtaataaaattctatttaaaagtgctttttcaagagggcttccaggattatgtctttttttttctctctctttttttttttttttgagatggaatctcgctctgtcacgtagtggtgcagtctctgctcactgcaacctctgcctcccggtttcaagcgattcttctgcctcagcctcccaagtagctgatattgcaggcgcccaccaccacacctggctaatttttgtatttttagtagagacaggtttaaccatgtcggccaggctggtctcgaacttctgacctcaaatgattcgcccgcctcggcctcccaaagtgctgggattacaggtgcgagccactgcgcccgggcggattatgtcttttcaggaaacttgtgaattatttcatattccaaatggtttacttattcatgccagggagaaggaaattggtgacttcaaaataaacattaattttatttctttgtggttctagtttgggtgaaaaaaattgtctgcaggaagggagtcaactaaaggctttaagacctgtacaagtgaggggccgattgcaaaagccaaagccaaatgcaggtaaagctgctgaaagaaaagaaattctcatatcacaggaagaaattggggccaatgtagagaagaatgaaaatgaatcctgtgctgatagagatgtaagtactctgattcctcctcacatttttggtaagcaagtacatgagccttaatataagcttcccttcacccacatacttacatacatacatacatacatttatttatttatttatgacggagtcttgctctgtcgcccaggctggaatgcagtgtcgcgatcttgcctcactgcaacctctgccacccaggttcaagtgattctcctgcctcagccacctgagatcgtgccaccgcactccagcctaggcgacagagcaagactctgtctcaaaaaaaaaaaaaaaaaattcacatgatctataatgtttttgtatttttagttgtgcgactgcaggctcacaccaccacgcctggctaatttttgtatttttagtagagacagtgttttgccatattggccaggctggtctcaaactcctgacctcaggtgatccacccgccttggcctcccaaagtgctaggattacaggcatgagccactgtgcccaacccctttacccccttttcaaaacagtactgcacaatttgtgtgcatcatt

SEQ ID NO: 115770 - DNA, 1012 bp, Homo sapiens
aacctgggaggcagagcttgcagtgagccgagatcataccactgcactccagcctgggcgaccgagcaagactccgtctcaaaaaaaaaaaaaaagaaaaaaaaattcccgtgatctataatgcatttatagtaatcaaaagaattcagaaagatagaccccacaggggtatttctaacagatgaaaccaaggcagttacttgttttttgattgggaggaaaagaatggggctttgagatatcctaaaaggagtaactcatgaaattttctaagatagctaaagaaaaaacattaaaagtattttaaagtctccattttataatgttgaattttttaccattttatacttaaattggacattttcaatgaaatctgttatgcctcattgtgaaacctaaaacattagaaaaatttgtttgtttttaagactcctcaacacatggaagatcaatcgcgtaaagattttgaagaggaagatgtcatattacagcctgagaaaaatgattcttttcaaaatgtgcagccagatgagcccaaggttcttaatgaatgtctaaggtaagcatcattttgttgatatataatctttggattttgtaaaaagttttagaactcaatcagttttttaaagcagaagcaatttagatggatttgttgtctgcgtgtctagttatgtagtgtttaaaaatataacttcacctttcaagaaagtttatgttgtagcctttatgtgaatttctcagatggtttgaagaaagctactcatcgtaaattagtacttgagttaacatgaatagccttatcactttattttattttattttactttttattttttgagacggagtttcactcttcttgcctgggctggagtataatctcagctcactgcaaccactgcttcccaggttcaaacaattctcctgcctcagcctcccgagtagctgggattacaggtgcctgccaccaagcccagctaatttttgtatttttagtagaaacagggtttta

SEQ ID NO: 115771 - DNA, 1382 bp, Homo sapiens
ccacaggaaaatggactagaggaggtcaagcctctaggtgaaatggagacggatttgaaagcaactggaagagacagtttcccaagggggaagacaccagaggtgattgatgccattgaggaaatagagatagatttggaagaaactgaaagagaaatatccccacaggaaaatggcctagaggaggttaagcctctaggtgaaatgcaaacagatttgaaagcaaccggaagggagatttccccaagggagaagacaccagaggtgattgatgccactgaggaaatagacaaagatctggaagaaactggaagaagagaaatatccccagaggaaaatggcccagaggaggtcaagcctgtagatgaaatggagacagacttgaaaacaactggaagagagggttcctcaagggagaagacacgagaggtgattgatgctgctgaggtaatagagacagatttggaagaaactgaaagagaaatatcgccacaggaaaatggcccagaggaggtcaagcctgtaggtaaaatggagacagatttgaaagaaattagagaagaaatttcccaaagggaaaaggtgctagcagagttcagtgctataagggaaaaggagattgatttgaaagaaactggaaaaagagacattcccatcatggagaaagtatcaggaaagatggctgttgttgaagaaatggaggcagatttgaaagaaactggaaaagaaaattttagagagagaggatctgaagagatctgtgttactgaggaaaaggtggcagaattgaaacaaactggaaaaacagacatttctccaagggaaaacgagctagaggagaccagtacctcaagacaaactgacacacatttaatgcagagcggtagcaatgacttcagtgctgtgccttcactagatattcaggtatgtatttttctgtcctttaaaagttttttgaatgcttttttcagaggaaataaataattccatgattattttgtccttaagtccaacaacacttaaaaatctctaaaagtctaaagtcttttgtagccctaagtttctatgtttcagtgccttgaagaaactgtatgttcttttttaaaaagataactttaggctgggcacacctttaaacccaacactttgggaggccaaggtggaaggattacttgagcccaggagtttgagaccagcctgggcaacatagagagaccttgtctctacaaaaaataagataaaataaaaataaataaaataaataaaaaataaaatacaataacaaggtgtaagcctgtagtcccagctacttgggaggctgaggtgagaggatcacttgaaccctggaggttgaggctgcagtgagctgtgattgtgccatt

SEQ ID NO: 115772 - DNA, 1013 bp, Homo sapiens
aaaaatgtcactgttcttaatatcatttgaagttactcttttaggtaaaagaagaataggaaattagactgaatttgtactaaccctagcgtgaacacacattatttcttttggccacatctgtatctgcttttgtttcttgccccacctgacttacttcacttctaaaagttctttttgttttttcaagttactttgaagttcatgatcttctaacattttcaaggacttttttttttttctaacttttaaaaatagataatgacatttgtggtttgggaaagtaataatatgcaacataaaagggtttcctgaattccaagttttaacatttggaaattaaattttattcaaaaattaaaaacttctaaagttttaaaggaaagtgtttagaatttagtagacttttgttttaaatatataagatgtttaaatactcttttatttgtgctgatttactatgactgttcctctagaacattagcagtgaagtactgtcgatgatgcatacacctgtagaagaaaaaagaaattctgaaaaagaagtatcaagtcacttcagtcatttcaagatttcttcacagactcatgaatctgataaaacagaagtccaggggattcaatctccagatgttccagagcagttttcagatattaatttaaggtacaagtgtgtttttaaagaaaaagatattaagttatagttgcagattacgttaaactaagtgaggtttcaagatataacatatacaggatagtgttagagcttttaagatagttttgggaagactgggagagaggattgaggtcactctgacagtcaattgtgaaagttactgacatacaaaattgtatgtaacagtcttaaatcaatacaggtttgatagactcatattttctttgtgcagagatggtgtaattcctaggctcatacctggattgtaccactcatggttttcaggatctgccagatagttcgatttgttttcctgttaagaattagaattaggcca

SEQ ID NO: 115773 - DNA, 1115 bp, Homo sapiens
cattttaactattttttaatatacagtggcattaagtgtattcacattgttgtcccgttgccaccaccattcatctctagactttctttttcatcttcataaaatgaaactctctacccattaaatactaactcattctcctcctcttccagctcctggcaaccaccattctatctgtatatttagctactttaggcatattatataagtttattaccttttaagaattgacataactgttttcttttgtaaaataagatgtttataatcagaaagcaatttccctttaatggtacaaagtattttttagagtgtttattagaggagatccaaattttacatttttacattagttttcagctttttacagtcaagcgccctgcctttctccctgtccccttgtttaggactaataatgtaaacactttccagcaagaaatgaaggaaagtgttatccaaactgctcgacaagtaaggggccgacttcagagaccgagaccaaatataagaaagacaggacagaggcaaatagtagacaaaggtgaagccaaaggcataattaaggaaggaagaacgatattaccaaaagatgaaactgaaaagaaagtcttaactgtggtgagttattgttatgtaattaaatttagccttttaatgcatttaaaatgtcaagttatagctcagacatagcttagaaatacaggcatctgacacttattctactcaatgaatacagtttccagttttgtttcagatttgctcttctggattttttttttaagtgaaaatagatttatttcttttctaattaatgaagctattcatcgtaaaatgttccattaggacaaaataatataaataccgcaaatcttactctgagataaccactgaaaaccttttgacatatcttactggatttatttccatgcacacattatgtgcacacttatgcaaatttaaacaataaagtcattacgtactataactttctgttattcactgaatactatgttaagtggctttctggatcaagaaatatgttagttacatcatttttgctgtataacatgctgttttgagtaacagtttaatctcttattaatgggtcttttggt

SEQ ID NO: 115774 - DNA, 1081 bp, Homo sapiens
ggctggtcttgaactcctgacctcaagtgatctgcctgcctcgtcctcccaaagtgctgggagtagaggcgtgagctactgcgcccagccggttctgtgtcttttatccctttttcttctaataattttcagttttgtgtttattttatcttcactttcatattacaggaaagaatggtccagaattaaaaacttactatgaaaaatttgtaggtagataactaagaattaactctgagtgagaaactagtagttaattccttttttattttcacagcataagattttaaaagaatgggtggtgggaattttcattttaatgactggaactggaatttcactctaaaagtttggttttcattaaaattatccttgcatgcatatgaccttattgttgttttgattaaatatctagctgtccacaaccgttaaacgaaacaagttactctaaaattgccctggatgggaaaacaactatctcttctacatctgagtatgagagaaatcgtggtgaaaggagaagtcataaaaagttcaaaccaaatgtcaccagaggtcgtggatcaaaacgagttcggggtaagacctctaagaaggaacctagagcttccaaggccatgctggtgactcttcgggcttcccaggaagaagatgatgatgctgacgattttgagtctgactatgaggaagaaagctatcatcttgctcccgaagaagtaaacaaagctccagtatttgtacctgttggtctcagatctcctgaacctgtttctgctcagattgaggaaacaatggaagaggttcggtttttttttaaaaccttggtactttatcttacttggttttcacctcttgtttcttttaggggatcattatttcttctcgtagtgattattaggatttgaagagttcattctctaaataacctctaccaaatataatttggggccttgtataaccttttgtgattgctcagtccctatggcccaggcccagcaagggagtcagtgtaacaacgagagaaatctgcttacacttgtacctggaagctgtttagtctactttctgataatctttcttt

SEQ ID NO: 115775 - DNA, 1166 bp, Homo sapiens
ttaaaatcagtttcactgaggagtgggtcagtgaagcttctcaagctgtcgctctggacattggttctgtaacttcttaatttattaaaatgcatttaagttttaagctacgtagtagtataaaaattttgcaataccctttaggccttggtttccattgggtaaaaattggcagcagatatgactagagttgaaggattatgaaaatgaagaagtaaagtaagaatggtagacgtacataacaaaatgataagagttaaaatttgcacataatacaagaaaaagataaagtcaggagcaagagacacaagaattttgcctttaaattgtttatgttcttgctggtgaaattttgtgaataattataaattaagacaaaccagtttacactattgtagctaaaagtatggaaagacctctgaaaatgtagtgcatgctgagaaacagaacatgtttggggaagtattttaagatgttacttatttttttcctttttaggaaatgaccacaagtgaacatatccaagatgaaccaggtaactgttatcaaggaaactgctaagactaccttgattaacactagtacagtgatttaatagtggggataataaatgaatcagtttgctggagagtttaacaaaaagattcagctattgaatgtgttgtctctgtgagaaatgtggattcttggaatgttattttagaaggtgaattaaaaaaatgtttaagaagtatttgagcatttcctctggatcttcacaaatgggagagcattttccttgaagatattatttaatgggagggaggcatggtcagtgagtcaaaaccaacagtgatgatttatttatttgtagcatataacctgaacaaaagactaccttagtaagggattaatggctcagaggatattggaatctgctcctaggagataaacaccttaattaaaaatcttttttaagtgaacagatttccggattcattcttttttttaatgttgatatatttcctcacaaggtaccaatgatggaagcaccgaagctgcaataactttacttacaatgggagatctagtattgcagtcagagatcagtagtgaacagggtgatggtaagaatgaaagctaagtcctatcaaaaatagaaacttttaaaacctaacttaagaaat

SEQ ID NO: 115776 - DNA, 1052 bp, Homo sapiens
atttagcaacttcttttgtgaagattttttatttttagggggagatgatgaaggatgaaggctttttcatttgcttctaagtacagtcatgtatcacataatgaagtttaagtcaatgatggaccacatatattacagtggtcccatgcaattaaaatggagataaattcctatcaactagtgacattatagccatcataacacagtgcattgcttttttatgtttagatatgtttagatacacaaatacttactattgtgttacaactgcctacagtattcagcatagtaacacattgtagaggtttgtagccgaggagcaataggctataccacatagcctcagtctgtacggtgtgtagcagcctgtaccatctcagtgtttgtaagtacactctgcgttgtttcacacaagatcacctaacaaggcaattcttagaacatgtagttaagggacacgtgactatatgtgaaaacaaattgtcaaacttcactttagtatggcaaatgttaaagaacttttctattatcagctgtttgtctgactgaaaaatacatatttttctaattcatggtgatgtaacattagtcctaattgaaaaactagtatttaaacataattatttataaagatgacacatcaaagggcttatttatttttaaattttttatttaaaaggatattcagttttagctatttttacccctcagattgtagataaagaaggcattaaatttatgtttgtctcctttttctgtttaattttaaagatatttaaaatgatataactaaaaatgtttagctggtgtatatgttttgaatacctttttcccctcagtttagtatattgactttgtactgtaaatttttctgcttttcttggataatctcaggattttcatgaggatagggggaactcaactttatttatgagacaaaatttccatacaaagctcaatctcctttatacacccacagacataatattagtttttaaaaagccaatttcttcatagttttttcccattaaattctcaaggaacacttggat

SEQ ID NO: 115777 - DNA, 1048 bp, Homo sapiens
acactttgtcagagaggaggctatataattcggagcggaaattgtctataagtaggcatttatttcatgattgatatgtcacagaaatcatggtagtaaatcacattgctatttgaataccctgtttttgtaagtttttaaaactcatattctgaaaagatttcattctcttagtgttagcttgggagttagattgccatgattaaactattatttatccttgtgtaatattagtttttaactttaacatctgtttctttttaatctataatgagctagttttatggaaaatggaatttcttactatataaagaatacagagactcattgtattagagaatcaagtcagccagctaaagtatcctactgttaaatccttaaacctaattttggaaaagagaaagttaatcaatgtatttaccttacatgttggaaagaactatgttaggtctgattcatgtgaagaagatgttgcaaaggatttatttcacaaattttaaaggagatatgagtaaaagtttttatcttttcttgactttttctcctgaacacttatgtcttagcaagtggtcaacatgaggatttgaacgcctaattgttggtaaatggttgaggcatgacaaaaatattaatatccactgtttaccatcatgttatttgaaacaaaagtgaccatgtatactatcttgcttgaagaagtctttgacagaaaaagcaatatcatgtcatttataaattttcttgttctaaagaaagcagttatatatatatataaattatgtaaataaaagttattttatatcatttctgttgtgtccttttaagatgactaaataaagaattggctgggtatcgtggcttacacctgtaatcccagcactttcggaggccgaggtgggaggattgcttgagcccaggagttcaagaccagcctgggcaacataatgagacctcatctctacaaaaaaattaaaaatcagccaactgtggtggtgtgtgcttttggtcccagttactcaggaggctgggatgagaggttcgcttgagc

SEQ ID NO: 115778 - DNA, 1005 bp, Homo sapiens
gaagcaagcagtcagaggctagggtgaaattacaaagttatacttctatgcaaacgaagactggacccccaatcagtctgattggttgtggacagcaaccattcagaggctggagttaaggttcaaacttggcaaagcaagcctccaccagcagtaagtctgatttgtcggggacagccaatttcctatctgccctgcggaaaaggtgggggggtttgcaaagggagtagcctttggtccttttgttacttaggcatggaaagttagggttttcctttcagtttagctctaggaagtcagcgtgagacagccttaggttccctgcttccagacttattctcctgccttaggtacagtcactatcgtgatattatctatcgctgtgtcaacacaacaccaatccaagcccaaccgcagctctctcactgccgcaccgcttcgtgagggtcgatccgccggggagacctgctctcctgcgctcgggactagacgcgacctcgcggggctgaggctctgtcccttattggctgggtcagggggcgtggcgcggcttgaccaatcgcgggcggcgcgcttaggcacgtgtgtggacaggcctgagaatcagagaaaccttctctggggctgcaaggacctgagctcagcttccgccccagccagggaagcggcaggggaaagcaccggctccaggccagcgtgggccgctctctcgctcggtgcccgccgccatgtgggccgtcctgaggttagccctgcggccgtgtgcccgcgcctctcccgccgggccgcgcgcctatcacggggactcggtggcctcgctgggcacccagccggacttgggctctgccctctaccaggtaggctgagcgccccggtggcctggccgccggtgccaggctaggaagcaagtggaggaggggcacgcttcaacaactgctgctctcttgtccggagccccagttgattctgtgacgcacgtgaagtttgaagaagaaaagcctaaca

SEQ ID NO: 115779 - DNA, 1068 bp, Homo sapiens
gcggtggctcatgcctgtaatcccagcactttgggaggccgagatgggcaaatcacttgaggtaaggagtttgagatcagcctggccaacatggcgaaacccggtctctattaaaaatacaataattagctgggcatggtggcacacacctgtagtcccagctacttaggaggctgaggcaggagaatcgcttgatctcgggaggcggaggttgcagtgagccgagattgcaccattgcactccagccggggcaacaaagggagactctgtcccaaaaaataaaaatacaaaattaaaaataaaaataagatcctttttctccctctgggatttgtttttaagtgtactttgtcagtaagcaagcattggttggaatctcagatagtgactgatgggacaggaaaaataagatggtattctaaccttcaaaaagcttatattccttaaaataggaaaacaaatagagatcagtttaagttcagaaggtgtttaaggaagaaagatgttaaattgagtaggagtggccagaagtagagttgaagatgagataaaacatgaattaggcttacagaggagtaagatatggagagatggacaagtggggtggtgaagaagagcttgaacaagacaggcaggggtgaatcttttccatacgatccagtggcccagcgtggctgccacagatggggtggcccagtgtggcggccacacagagttggcacagaccactgttttttttttttttttgacctttattttggtaaaaaggaattgctttctaatatttctctcccctgtctcctctatttctgttttaggagaactacaagcagatgaaagcactagtaaatcagctccatgaacgagtggagcatataaaactaggtaaacacagcatttattccacagcttatgcctttacttaagatgtcctaaaatagttattgcttttaggaaaaatactggaattaagcttttgatattttttttttttttttgagatggagtcttgctctcttgcccaggctggagtgcagtggcgccatctcagctcactgcaacctccg

SEQ ID NO: 115780 - DNA, 1050 bp, Homo sapiens
atgtagaggtattttttgttttgtgtttttctgtgaagttgaatttacctgattaactcacaatacgaactgctctgcacgtagagaaaacagcaaatgaggcccagctgcttgtaggtgctgtgctggtctttataggggatacagtgaggaggattttgttgtctctgtcttcagcgagctcataatgaattggacacagcatataatgtgcaaccaacaaaagacttaatggttgcagattctgaactaagtgctttctatacatttttcaagtcatcctaatatatgatatggctcctttttttatcttcatttcgtgggtaaggaaaccggggcataggatggctaggaaacacacctataatcacacagctgtgaagtcatgagctctgctttgaacgcaactgacctgtgtacccaccactccaatctgcaatgaaaacagtatcagaaggcaatatgtataaattattatatgaattctgtggatggcttttgtattggtttagaagaaggaaagatacttttccaccttaactctttaagaatttatgatgtttctggggctttagctggtcctcaaaggagagaaggttctaaccatttcgagaagaattttgcacagaggtgggaaagcctgatgggtttggggcaatgaatccttttggctgcattgggggtttggagaacgaggctctataacagtttagaaagacagggcaagttttttgtgaatgtgattaagaactgatgctgtcattgatacaagtttccctctgcgtagcacatttagttcatagagatgcttatgtttctcatttcttgtcttcagttgattcgggaggagcatacttacctcgacaagcagatgtgtttccagatcgagaccactttggccgtacattctataatcaggcaattatgtcttctaaaaatattgcacaggtaatttttcatgaataaagtgtacagtggtgctttttactcttaagtatctttacgaattaggtactctgggatggcttgaaagtaaaacagaatttaaca

SEQ ID NO: 115781 - DNA, 1147 bp, Homo sapiens
tctactacatataacagtaataactctattactgttattcataataacctgtttaaaattgtgaggaaatgattgggggtgatgaatttttttttttggaaagtaccatgaaatttattagtcacaagtggctctgtgttctctcaaatgcatctttatacctctcttaagtcatccttaagagctaatttgacacaaagacttatatatacagtgtatcattgaaggttttcctttcctgctgttttggtaaatactagacagttttcataaaaaagcattttattttaaatatttactgatttagaagctgttccttctgcttctatttgacttctgacagtgtagttataagtcagcatttataactggtattatgtatgaagcatttaaaatatatggtcagtcataacatgataaaatgttgtattaaattaaagaaactgaaaaagatctaccatttgtgaggcatctgtgggctatgaaaaagagtaaacgtggtctctgcttttactcaggaactcccagtcctaaagtagagtgtcatgaaatcactgagagcctagctctaagatatgtctcccaaggagtttggtgttttcccaggcaagccataaaaatttagattgcagcagcttagtccttactcataaaatgaacaaattatttttttcaggtatgtatttttgactgactttacagagttttaaatactttattagaaagtcatagtttatctacatttatctactattgaaataacaggccatctaattgggacaggactaataaccagagcaagcccgtacttcattcactgcacttgaaattgaacaggaacttccatggcccctgccacagaaccgttttactagttccgatttttacccataatccaagggccaatgtattcaagccttttcatttgttgcctgtgatggcttactgtcagtgtaactttgtagggagggggctcagagttctctcagaaatgagaggccagaattggcatctccattaggagctcagttacgtacacagtttatgccgtaaccaactacatcatgaaagtgtgccgtctgtggttggccttcatcacacgcaattctgcttacggtacaggggatgagtacttaatagaagcctt

SEQ ID NO: 115782 - DNA, 1033 bp, Homo sapiens
gtcaccagctgcattagcctttaacgagagagtaagcctgtcctcagacgacgtgcactaacctctccccagctatgaaagtcctaggtggcatcttcttccaccagaaggctgtttcatctacactgaaaatctgttgtttaatgtagccaccttcatcaatgatcttagctagatcttctggataacttgctgtagcttctataatacatcagcacttgctgcctcaccttatacttttgtggtacaaatggcttttttttttttaaacctcatgaaccaatctctgctagcttcaaatttttcttctgcgacttcacctatccaagccttcagggaactgaagagagttaagaccttgctctggattaaagggaatgttgtgcctggcttgattttctatccagactactcaaaccttctccatatcagcaacaaggctgtttttgctttctcgacattatggattttttgtgaagataagtgaatgtattttatgtggcctggtggtgttaattgtaatgcaaatacaacatagtttttcactaaatggtcctaaattgctgtgccctttgagcagccgtatctctgtgtggaagaatgatagttgttacgtgttgattgcttgttaaaggtacaatttttacaggtatatagcacccaaaacagataactgttacattcccattgtattattggattttttaggaaaagaagtaaaaaataattcagagtaaacttttacttgatggtgagaaagatgttgggaagcattcactcagttttcagcctttgcatcatacaaaacaagattttgattgatgtggcagacagaaaaagcgaagtgcaaactatgtagaaaaatagtatgtatcatctaaaatagtttctgaaattgaaaatatgcttcctgtttagaactccttacagtagtcctgatatataatgataagccccagggataaactatttagtaatttccactcctttatacatatgtggatgatccttcaagtataccagattcagaatc

SEQ ID NO: 115783 - DNA, 1938 bp, Homo sapiens
tcttttgactctgagccctgtctctacccagctttctcattgcatccctgaacctctgccggtacattcgaacagtccttgaagctctaagtctagcaaccagcccttggagcctttcctgcttttcttgcatgcagcatggtgctgttgcttgtatagtgaagtataaaatcagaacccagaatgacttcagggcattaaccaggcatgtcaaatgaaattctagtgagattttctgtgtagtgtgaaattttgtgaaagtgacaacttcactgtgaattgttttcctataagtaactttaatacaaaaattcttttgcaatataatttctcaaggccattgttgtttttcctcttaggtcattgctagaatcgtggatggaagcagattcactgagttcaaagccttttatggagacacattagttacaggtataaaggtgaagaattgaaaatacgaacattttctgctgctttgaaaatcaggaatctcttgtttcaagactttgatacacttgacatgggctttgttgttgagagcactacaaatgtgtgagccacttttaaaaggaactgctttataaacataatttgtagcttaatggcttcatggatccaaatagtttaaaatgttaatagctagatgctgtggtgtgggtccctatctgtgactttgtgacattagttgtataaaaaggttcttatagtaaaattagtagaaaatacttgtagttctttttgtttttctggataacaataattattttgaaagtttcagcactgtttcctttgttctttactgtccaattcaacgaggaagttttatattgtgtttagcttcccagaaggatatagagtgagttaaaccttctcacagcctctgtgtaggtcttaagctgattcatgcagacactagattgagaattcagtatatcacgtcaggaaaaacaaaataaggatgtttataaaagttaattttttaaatctaaactgtttagtttataggcctttgaagaagagtttttgagatagatgctagacccataataatctatttgggacaaatggaagaacaaattttgtgaattttacttgttcataaaaaacttgaaaatatagtagttagtcaaaggtaataccagagtaggaaaaaaactagctgcagaaatccaaattgcaaatatacattgaggcttaaggataaatcacagtactttgtcctagtttgatttgtgaacaaaagaagggttcacactgggagtagaatttatgtttttgtacttaggtgtttaagtgattaaaagctttttgtttgatatatagacaggatttgtcaccaaattgttcagaatgtaacagtcattgtgtagcagtttaaaacaagtcaaagccatttctgctttctgtaaagatggatgggctgtctttgtcatctgcttttatggatttgcctcctacttgctaaaagccctgtggcactcttatcccctagagtacacaacctggtttcttccatctcttgactgtactggagttcaaatacatttagggacagagaaggggagtgagaaggagaagaagggaatgagaggctggtggtgggagttgggggtgggggtggcggataagaaggatgggaggaatgagaaggtgggaggcataaagggtgaggaggtgagagggaaggacagatttttctggttctcaaatgtctctggaagttcctcagggtttcctcctgcctcagcacttaccatgtgtagcctctagtcgtttcttggacactgtgctttcccgtttgtaactcaggtttgatcaggcagttggtgaagaccgtccctctatgggtgtccctagtagtgtggggacatgttccctactcagcgcatcctgtctgtgcctggagatccctaagtggggcctagtgtgggttgaatc

SEQ ID NO: 115784 - DNA, 1031 bp, Homo sapiens
ttaaaaagtcataaacccagacaaagccagagtaaagaagaaaaaaaaaacaaatctttaaagattcaggctgggcgtggtggctcatgcctataatcccagtactttgggaggccaaggtgggaggatcacttgagcccaggagttccagaccagcctggcaacatagcgaaaccccatctctacaaaaaatacaaaaactagctgggtgtgggggtgagtgtctgtagtctcagctactcaggaggctgaggtaagagggaggatcacttgaagcctgagaatttgaggctgcagtgagccatgactgtgctactgtgttccagcctaggcaacagagtgagaccttgtctcaaaaaaaaattcagttttctggcttatcagtatgttgatactctctcttatctgttaatttttcttcaataattattttgatattaaaaatgatatttttatagtatccctagtgtctggtacatactagacactcagatatattaaatgaataaatggataatacactaagccaattatttaatcaaatcaatcaagacaaatggataactctacatgtatcgtgaccctttctagaagcaaaagaaaccagagtctaggaccttaggaacaagaagattgtgacatgagctgttttataccatagacaaaatctctttgcattttaaacttggatctgatattaaagaatgtgtaaatatgcctctttcttgtgaattgaagcccttggaaaagcacaagacataaatcttctttgaactttcttttgaggatttgctcgaatatttgggtacccagtaggtatcgttggaaacaacggagttctcttttctgaatctgcaaaaaaggcaagtactgttaaaaatatttcaagattttctgttttaatttaacataacgttgaaggtcaaataatgagttaaaatttattgcataaaaatgcttaactagatgcctcagcaaccagaacactgtgtgcgcgggcatgtgtgtgtgtgtgtgtgtgtgtgtgtgtg

SEQ ID NO: 115785 - DNA, 1143 bp, Homo sapiens
ctttgaaactatgagctctgtatgtaagatattatcgtcattacatacatatgttatgaacatcaagttgctggctttaaaaaaagaaaaaaagcaaattaaagatgagttcaagggaaaaaataagaattttttcctctgagaaataaagcattcctaaatgtagcatttcctttagttcatttatttagtttatgatttcaatctgatttcagaccactttttagcatagttttacaaatataatcttatgattctaggttaatgatttaggtacttggaaaaaatatccaaaagcctgtttttcagagggagcaactaaagcccataaaggaaaatcaacttgccaaaggcccaaataactgtcagatagaacccatgtgccatcaacatacaatgcatggtcatttcattttgctttcttcaatccactgtcacctttagaaatatgaattttagcttttaaatgggaggtgcttttttaaattgttggtttcattaaacaaccctgcaaaatgcttacatgattggaaaacttggaacaatctagcctgtacacaccaagagtacctgacttctcctcatttttcaccctgacttgttctttaatgacccctccctgcctccctgccccataacctattcttttctccttttctcatctgtgtatatcatgtgcatgtcagcctcccttgtgtgcactgctaccacctggggtcagagaactgagaaggaaagatcttttgttgctccctggtcccaaggagctcactttcagggctgggcaatagccacagagcaggcccagattgttctcagagatgacggatgccttttggctccagacattgaaagaatggggttcactgcctccaactgcctggagttattctgcccccacctgggtaagcccagaaggggtacagtcttagaatgctggggaaacaaagcctccaggaagagcttgacttggtgtatattggggtgaaaattagaaagagggcttccctgctccccaacagagaccaggatgacttgcttctgaaagcctctttagaacctcttcaccaacaccccaggatgccctccagccagattcagagaggggagaatatgggaagggccaaagagatatttttctgt

SEQ ID NO: 115786 - DNA, 2521 bp, Homo sapiens
aaagaaccctacatttttagtttcattgggagtgtaaaaatgagaaatatttttatcagccgtttactagtataatttagaaattactaagtggatttatcatttagtactttttctattgctaaattacaaatatgtcaaaaataaaatatgtatgaaaatataaagcaaacatttaattgtgtgtgccatgacaagttaactgaagccaagggaaaatggcaagtaacaatgtaagagcaagtctgcagataaccctggatgaagtcattcaaataatgtaccaatttagacattacttagaacaaagacagaaaaattgtatgaatttaatttaaatgcatatgtctcattattaacttattgacccagcttgacagggtagaagacaaagtagagctcagacctggaacaaggagaattcagtcaacaataccaattaagcagctcagacaggaactcgatttttttgcactagactagtatatagtgtatacattgaagtaaaatattctaatgaattcagacctctcaacctgtcaagctctctgtgaaacaaaaagaacccatttatcatttctgcactaaaaagatctgcgaaatctcaacatgcctttcttgttaaaattcaaatactccattagcacaaatgcaaactgaggctattaatgtttccaggaagagccataaaattctcccttataatttgacctttccttaagcacgttaactcttccacatctgaattcttcccattgatcatatgagaaatttctgcctgtatttagtggacacacatctatttgaaaatattcctcctggttgaaaaggtctgtggtgtgtaatctaaagatattttagatgtgcagtgaactgagtttccagaatcttttttttttgtaatgtctatgtataatccaccttgattctttacaggataggaagactgaatacaatataaccaagggtaaatacaaatatgccttaaggatccagtgtgtatttaagtaacacactgctatttattccttcaagtctgtatacatgactaatgtccaacaaaaatgattacatgactgggtgttaatttagagatagttcacctgctgtgttatacctagaggttcaagcccttacctttaggaggtatgcaataaatgtctgttgttctagagatttgttcctggcaattgagaatgctgtatacaaaggtacaatgatggataccacacactggctccaccatgagcaacctattaggaaaaatgtaatatataatatgtaaacatgtaaaacacacacacacaccagagttctggggttccccaactttccctggcttactctccagacctcccttctatgatgctctctggggttccctctgggccatcccctttgggagggcaggagaaagaggacagtgggaggaggaaggaagaggctagagagtagggcatgagcacaggaagctgccctcatcccgcctcttgccctcctgttcctctcaccctggatattcctttcagcctagggaaaggaagtctgataggacttcctttccgttcagcctagggtaggaatagctgattcatgtccccaactccataaatgttttataaagtataaaaagttgccatttttctttgcctctggataagaaaattgaatacaatgaacaattgtgaataaaagagctgcctgccaagctactcaggtaacagaaaagtgcctggaaggacagacaggccaagtcttgaagattgagtggatccactctgtttatcaaagatcacataaatcttggattgatatccagggctcgataaaccaaagtcaaaaacgggattggtaaaggaaagaaattacacatgtatactaccagaacatcattttagaaacaaaggcccgtgcttgaatggcagcccccgtgtattttctttgcctttattctacattttcttgccacctacaagtggagttagtctgtctacaagctagagttagtctgttggcctcttagcttcttaagaactaacatcttcctgccctttctagtccctccctggagtacagcctgtcattttcctaacaactgttttctttgactcttccagaagaggtgcatttactttttatgaggggcagaagctcagtccacactgctaattatccctcccttgtggcctggtggagagacctccctggccctcccattttgtgggcatccactgctaagccaccaagctcttcagaaaaggagttcccacatcctccctgaaagcctgagaaatattacagtgatgttgtccaaaccactctgaaatgactaactggaagtctctcaactgtctttctttccctccctaggaatccgatcatgggacacaaacctgattgaatgcaacttggaccaagaactcaaactttttgtatctcgacactctgcaagattctctcctgaagtcccaggtgaggcttccgctcagtgttggtcagcctagaattccaaaggacaagg

SEQ ID NO: 115787 - DNA, 1764 bp, Homo sapiens
tatgattatttcaaaatgtaaaaactacaagcttttattttttctctgtaggttgttctggcttttttactatgattgtttgtaagacttctttttttgtgtgtacaagtcatgtggttctcattgtgttcattcatatttggactgactttatagagtgacaactgcatattgcataatgaaaggctgcaagcattgctgaagaattaaccatttctagacccaagacctagtattgctcctgtggagtaggaagatcaagttcccccaaactgtcactttagcctaatgtaccccattctcctctcctttctcctgctatcaccttcagtaaggattagttacctacctagttgtatagtgttatgctagaggctgtgtttggagattggcctttggacacacagcatctttactattcttgccaatgctagaaaggactgatattacgactttccctgtcaagcctatgagtacgctttacaggccaaggctcccctctgggaattaagcatctagaatagagccattatagtcatgctcctgtgtggggagcatgaaggtttccaaccaggactgtaaggtgataaaagcacatgtcagattcagtttcagataagtgtgttttaaagagaagagatgttagaggataagaagacatggagatcacaggatgatcactggattgggcccagggaagcctttagcttttcctgaacaaactggaaaggttttatggaaaaatttgaagtctgtttttaagtgggtccaagtctagtggtctctagctaactcatgtacttcagttcccctgaaatggaattagctgaacattttcctttagagtttcaagaatctttcattgttttttgagacagggtctcactatgttgcccaggctgctctcaaactcctgggctcaaatgaccctcccacctcagccttccaagtagctgggattacaggtacatgccaccacacctgcctaatttcaagaatcttaaattaacttagaaccaaggagcaagatgaaggatggatcccctaaaaaaaaatagagccatttttcagccaggtaaaacattgttaaaaatagcacctacaatataccaggcattatagggtgcttggtgagtgaggacactgtgaagaacaaaacaaatacagtcattacctttattacacttatattcttgtgagaggagaaggcatttaacaatcatatacagaccaacataaaatctagccccctgcatcaaatccaggcttcaaacagatttttgggaggtttgggtttaaaaaaacatagagacggggtctcactatgttgcccaggctggtcttaaactcctgggctctagcaatccacctgccttggcctcccaaagtgctaggattataggcatgagccaccatgcccagccacagttttgttttgttttaaggccagcagagttatagtaaaatatttattgccttttatgacataagtaaattaaggctcaagtcacccatatatctgtcttatgttcctgttggttatgatagcttttgttgttttttaataattggagttcacttgtaaagactgaagatagcctcaaattgcagctaacagattgtgcaaatggcacaagattgattcctttatactagtttatcccttatactagtttttaaatatggttttgagatttgatttgactatttcttcaggattgtaggtctcattcaagaccactctgaaagacttagtcatcttga

SEQ ID NO: 115788 - DNA, 1025 bp, Homo sapiens
gtcagtggaaaagaatttcatggtgacttaagtttgaaaactgtgacatactccatctaattttttgaggaggcataaattgtatgtgtataaacttgttcaattttgtctaaccatacatttccttagcctatttgactagtcacttctatcaccactctctcccatggatctagattcctgtaaaacacaatctgggaaaggatggattaaatgattgctgagtcccttccagtttttttattccattattctatgaatttttactaaattgtctcatcactcgtatgtagatgggagcttgtcttacttcattcagcttacaatggcttttaatccaggctttaaaatatcaatgaaagaatttcatttagaaaaaactgcctgtcccatccatgagtattcttaattttaggaaagatgcacagctttatgacactcaggctgatttcccagtttgggaattcttggccctggcttttcccacctgtctttaccttgcagacaaaccaaacaagacaaaatttaatcatgtttgcacaatgtcaaacacttgcatagagactatccccaaagtcagctcatgggtgttttatcttcacagtgccaaataggaaatagctacatatgtttcccattaaaatgagaatttccatgttggtatctggtgttgcattgagcttcaggttagctgcttattcactgatctttggaaggaggctgaagattgaacctcaagagttctagggattatctgcaggttgaaggtgttaaaagtcccaggcacattgtttgttatcgctaactgcggatggcctgaattttaataagcatggtcaactgtgcatatcttgtcatgtgaactaccaattagcacaccataatttagcaagttagtacatgcagatatgaacacccttgggaaggaagcaattttcgaatcagattattactgacagtgtacaatttacatgcaggtaatcattatcagaaagtcatgattatccagaaggaaaagtgatttt

SEQ ID NO: 115789 - DNA, 1760 bp, Homo sapiens
gctgatctgaatctatctgaaattaaaatacggtgtaaggaaatgttgagatacaagtatttttcattaatttttttctgaaatgctctgaaccctttcagcctggagacttttttccgctagcaaagttctttcccatgtgctcttatcattgtttctcttcctgttctgatttcagccttaagaatatgtataattcttaaaatggaacttcttagatctcatcctccaactcatcatttcctcttcgatcttcttctgtgtattctaggagaacatttcacatttgtcctgtacatcactgggtcaatattctgcaggatttgttctgctcttgagtgccttaaatgcagatttaaattctgctattgcattttgtatttccttgaattcttttgttcattccactggggacttctttctaaatctctgcctgtcattcagcccaccctgtttttattgttctctgtcgtttcatagtggcaacgtctgcatcttttataggagccaagtgtcattttctaaaattttattttgttcctatggaaagtcatttttagagatatattttttccaccaaatctcaagacagtgctcatttttccttgtgctgcagagtcttttcaaaggtcccatttagagctctgtttgtttcctccttcctgtataagaaggaggttcaggaatccctgaaactccctgtccaggttcagcatttgccagcagagggttgtagggactccttagcaaggctgcccacttgggagctggcaattttacccgctcatctagaacctggaagtcaggttcaggtgtataacctccaccctgggtccatggtccctgagcagccatgcatctggcgtgggatgctagcctgggaagaaatagtctgtctttactgtccaagtttctgcctgtaatcctagagaattagatagaacttgcatttcttctttgtacaaatattacagaccatgaccagcatgcactcctctccaggatcctcctgcctctgcctgtacttacaggtgtttttcctgagacaactgtccagctcaggctgtaacgcagaacagctctctcctctacccccagctctgttgggatctgaggtgaggcgctggaggcgggatggagagcagtggaaaaggaggtatctgataccctgcagtaagcttctttttcctgtcttgcatcctaggattaggggcaggtatttgaagagtgtgtcaaaaactttccaaccttctttgagtccagcagaatggtaaagcgtgggggcccaggagctacagtggccaagttcaaatatgggcttcacctcatgcacaaggtctctgtgcctcagtttccttatctatgaacctactttacagaggatttatgaaaattcagtagctataaggcatgtaaagtgtagaaatacatttttaagagatgtttaaataacaatgcttttacaaaatacaaagacagtcttaataatgattaatgcttttaacttgccattcaaggaaatgaataagaaatgttggtaaagcaggaaaagctgattcatcttgactcagtgttcaaaccaactgtaccattataaagtctacagtattattcagccataattggttcaggattatggtttctttgtagcattatcagttctctatacttgaagttcccaagagccaaacatttccatttttctttaatcagaatctgtcacatttcaaaactccctttcttctttatggatattgtgg

SEQ ID NO: 115790 - DNA, 1125 bp, Homo sapiens
caggatttgaccaggagtctccatttacagttcttcaaggccagtgcatttggtgagctggttggaaggaaactttggagtgttctagaaagaactagaccatctgaatcacctgtcctgatgcccttgtgtggaataaaggagaaggcactgccttgtgctgagtacttaagtgtgctgagcacctaggtactaagtaaagtgctagttactgtactaaacatacccatgggcatgtgctatcccctgagtttctcctgaacctatggaatattgccctcatttcctctattcccacccccagcactccttgaactatctgacatacaggacagctctcttaccacaagctacctgaatgtaaatataattcaaaggaaggacattacaaacaggaaatcagcaattgactatggaagctgaaattgctgtctggagatggccagatactcttttcctgggtggctcaaggagtagtcgggtcatcttcccagggcctcaattgtgtcctctccaagctgtcagtatggccctgtcatccaagacttgtcctcatctctgggttcagttctctgggataatttaaaacctacctccttctccccaagacctcataatctagatggaaggaaaagggggacattctcagttgtttttcataatcattttactactaccctctgtcagatcctgccccaagtcacacctagcctaatgttttgtaccttgactcaattgttggccagccactccctttccctccaattagggtgtgtccttgagttgttttgtatcctcttctgattataaactataaacatatacattttgactactgaccccaagccaaactacaaggaaaatattgtccagagggtgctaatatgggtgcttaaataatatgtgaattattattattttttgccaagcccataccaagatttattttgttattaaaaatgtgtgaacttggttttgagtattttacatttggtcattttgagttgcagggagattctgatttctgcatcttcttccaccctatgggccaagtgcccttcactgctactgaaggcttgtttatggcacatgaaattggctaggttattagcatgatttgcattt

SEQ ID NO: 115791 - DNA, 2742 bp, Homo sapiens
aaccttgagtgtattattttcttagactagtctacaagggatgataggcaataaatatgttccatgactattgttttatgtaagccacaaattaaatcatattttctagttgaattacataaaaagcttatgatctttaactgctgagatccatcttcattcagaattaaatggcaggagcttcccttaatttacctggccaaatcaagcaaatattgattttaaatgatctgtataggtctgaagctctggtttgaagatgtctgtttgaaaataccttttgtgaaaataaataataaagttactcctccctgtttatctgattgttaaattttgtcaataattatgattccttaaaacaaagtacaggctcctatgcccagaattgacaacagaaatggctttgagatgattcagaactatactttctcttattaacatctaatatgtatcaaagccttttctccccgtttaagtagagaagtaaccttaaaaatatttaaatgtgatcaaaggatcttggtcataggattcatgtgtaagaaatgtcataaatagcctcaatcaattactcatttttcatttccaaagttttaaaatagttgacatggaaaaagtattaatatgcatcgtatcttggaaacatgaagaattatcaactattctgtttctttaccagcaggtggcatgacttgttgctctgctggtgacaatataaaacctaacccaccctatcactttaaattgttacataattaaaagagattcctaaagtacttgccccaaatataaaagttgaaagtttaatatccttatgatataaagagttcttacaaataaataagtaaaactttaacatttcagtagaaaaataggtgtaggatatgaacattcaatttacatacacacagaaggtgggtggagaaagacacacatatacacataccaaatggccaataaacgtatgaaaaatgttcaacctctttataaattaaggaatacaaatgaacccaggaagatacacatttttacctccaagttgcaaggttttaacaaatgataccactgatcactggcaaagaggacaagataggcaccttcatattctgctatttggatataaacaaccttctgaaatgaaatttttcaatatatatgaagagtcatagaaatgctcacgtacttcacccagtaattccctaccaggaatttattctatggaaataagcagagatatgcacaaaaaatgttatgtaaaaaaatgcttattgctacgttatttctctatgtgaaaaactggaaaaaaacctgaagttctcaacaatagggcatgtataatcagtaatgattaatcaatagaattcagtatttggcctgcattattataaaccatatcttcgaagaatctttactgatgtgtaatgttgagtgacaagggaagggttcatgaaggtatttttcaatttgatcacaatttgataccaaaataatttttgtcttttccttgacacccaatttcaatgacacccaaattgtaatatgggttatcactgagcagtaggtgaacaggttattttaattttcttccttatctttttctgtgttttttacattttatgcagtgggcacatagtattttacagtcaggaaaaagtatacacattttcaaaaatggtaagccaagcattggagacatgaatcactatcgcttttgtattcctcatggaaatgagattcaatagtaagttacgtgtctggggaaaatagagctcatttgagtcagaggttggaaagctcttatgaatactaacctcagaaacctcaaaatagtatgtggtagaataatgacatggcacgaaaagccacggatgtcagtctgagttaaggttagagtagatacatacaacagtcataagagaaaaaaacttactaatctatgatctccagttctggtaacctctagggtcggtctgtgcctccatatcaaacctttatcacagtgcagtgtactggggctgctgcaacttggaagcctgggttctcgttctggctgctctgcaaatatattttgtacttaaccttgggcaagtcaccaactctctgaactgagagttttcttccagggctggatcgttattcatttttggagtttggcattctgatgcactttctagccctgcaaggtaagatgtaagtctccggggtgtctggccaatgctgaagcagattgaggctccttttgggccaacccttggatcagaggtgtccgaagtcatcttggttcagtcgttttttaataataagttgccgtgacataagttattggaaaggaccacagttgagggtaagaaaggcagtttgattctcttgtggaggttataaaatgaaagcagagatctgtccctgaatatgaggaaacctcgtatatagtttaacaatgtatttttttcttacataaaaatctaagtttgaaattaccatcagactaaatttcatcccatctgtggtagagatggttttaaaattgagactttagaggcagcagatctttatcctgtacacctgatacataagaaaagcccagttcagaggactttagtttttaaccttaaagacaaacatattcagacatatattgtataaggatgtattacaaactttttttttttttgagacagggtcttgttctgtcacccaggctggagtgcagtggcgcggtctcagctcactgcaacctccgcc

SEQ ID NO: 115792 - DNA, 1229 bp, Homo sapiens
ttctagcgtccatcttggatttttctttttttgtctgaatccccatctcagggtatgagtcgttatgaatcaaaggatcaccgcccaataaaaccattctagacagaaaccttttggggttgggggtgcaccattctcctcttctacagcttccagaccactcattgcccatggatacccaccagcctcccacgttcacacgactccatctgctttttttggtgtctgtgtcttctggagcattgaccaggccagtatagggtaccgttccctgcacccagagtttcactcccacctcaaactcttttacctcctggggtacatgtccacgctttactcctctcctgccctccagcttctttctttctttcctcccatttctcctctcttcccctcccttttgcctttgctctgcagagacactggtgccgtgacacacatctgagcatggctggtggggctgaccagtggtcaccagtgcaggatttaagtggttggagcttaatagtagctacaagtctttaatttcttcagcaggtttttaatggcctttgatgcacgttagaaaagacatggaaagtcctgaattcagagccttcatgctgggtattgtatagtcagaccagccctgtctctggactgaatgggtctcttgaaatcataaatgcattgcttagggatcagtagcctcggagtgacctttctcactcatggctttcctgaggctcagaaaggccaggccttgtcctgggtgagccagcctctcagtaccctgatggcatgactcagaaagctggacaatgccctagaatgactttctccattaagcccaagaaatattgcatagaatcagtctgtctggaaattccttatatggagaggttctgagacgattgtatgtttggtttgcaagaggatcatggtttaaaaaaagaaaaaaaagcctaaggcagtgatatcatattacttacaggcttggttaaaaaagatagagaaaatactccttcaaacgtttccaccctaattctggattacactggggacgacagcaaatcccattccactggttctggctgaccttccctgcatcttggagcaaggaactctcactgtctgcctgtttctcccagcacagcactgcagagaggcccagaggctataaagccctgccacgtgtttctccaaatgggtggtttttattatttctggaatgcagtccccagccccaa

SEQ ID NO: 115793 - DNA, 1045 bp, Homo sapiens
cccctggccatctgagttgtaggagactgttgttgcttgtgtgagattctagagggccccatccctgcctatctctggtgctgcctgtgaattatactctgttttggtgaaaatcacgctctgtccagctgtggggagcactgtctgggacaaattcccttctcagttcagtttgttaatagtttttaagaactacctttgtgcagatttgttccctggactgttgaaagggagggcactagtctttaaagacagtgatagaaaccctagtggaaaatgctcaccaacacagtatgaaatgatagaaagatactattgggaatttgggatctctggcttcaacctttttatttctctgccaaaagaaaatacgaaacctcagaggaacacaaagaaagagaatgatattaagcacagaatgattttaatctttggcagcaacccatatgcttaaaaaaaaaaaagagggaaccgtgtttccattgtcatgcacctgtcattacactgaatgagttctttttctctcttgatggatggtggtcttaaaagcttgctgtttttcattagcaaagtgaaatggggtgccagtgctaatgctttgtcattctgatggagaataatacatgaatcagtgtaattattcagtgtttgcataatcagcaagattttgaaggggaatgttgcacaactcagaagtggcctaatttcacctgacaatattccattcagactccaagcatctccttcaagaagcagtgaagtgttggtggatttccttaaggccccatacaatgatgatgggaaattgagttgtcctaaatcactagttaattatgatatgcccagcggtcacttggaggttcttgctctagatctcagtttatattcatccctattgttttagaaatgtcatttatttatcatgcatgaagcatgacatattgttccacgtgggttcagtaacgaaccaccagccaaatccattaaatttcattgaggagtgaagtaagacccagaaatgtgggcaatttgagaggaatccccc

SEQ ID NO: 115794 - DNA, 1095 bp, Homo sapiens
caattctcctgcctcagcctcccaagtagctgggactaagggactacaggcctgcgccaccacgactggctaatttttgtatttttagtagagacaaggtttcaccgtgttggctaggctggtctcgaactcctgacctcaagtgatccactcacctcggcctcccaaagtgctgggattacaggcgtgagccactgtttctggcccaaaatcttcttaaaaaacaaaagaaaatggcaaagcctagaaccaagatgtcacctttctcggtaaagctgaatcagaaaggcccatctttgttgctggggcaatatcttgaaggttacctgtgcctcatcacttgctctgtaactatttgtattccaggtaatatgcgtcactggatgaatcctttttagtgattaaaaaaaaaaagaaaggggtctctacccttatggggtagtgagacattaagcagataatcacaaaatgcagagaaagaaaggcaagcccctggcatagatgcttggtccctggaagcccagggcaaggcctgcgaggacacgccccagctgtgcatctgctgggtgatcaattggccagtattcctgtgccctcccagggactacccatcctctcctccagtacagacagaaggtgagtggtgtgctgatggccagctgggagggaggtcttgagagacatgtcaggggaaaaaattggttactatttgatggagtgggcttggtggtttgttgcctgggaaacttgctgactataaaatgaaccagaggaggatccagtttgctgtctgcactgacagatttacagacaggaaaacaaagccttcttaccggatccaagttaacatgaaaattaaaaggagtctatgcaaagcggagttcaggacagtggtttctaaagtttcttttacttacacaggaaagaaaatcacccaaactaggtgaatggtaagtttctctaaatgtcagaacaatcgattataaggcattactcagtttatagccaattatctacattgattaagtataaatttcatgatagttatgagagatattaagattttaaaaatggaaattattttataaaatactt

SEQ ID NO: 115795 - DNA, 1079 bp, Homo sapiens
gtgtcatcactgggttgtgtttttaatcacttttgacatttcacagtgattcctttttctaaacacatttttatttttagataactttagatttacagaccagttgcagagatagtacagagagttcttgtttccccttcaccctgcttcccctactgttagcaacttacataaccgtgctactttttatcaaaactaagaaattaacatcctgttagttaaactacatggcagattttttcctgatctctccaggttttccactgaatgtccttttaccatgccatgatccaatgcggtatcccacattgtatttagattgtggttctttctaaaggtgcacaccagaacagcattctagcagggtgtgttcctaaattatcctatctatggatatgtttttttttacgtaaaaagtagatgtttttttcctccaggagtggagagagggacacagtgaagcaattggcctctagctctttgaaataaatgggattccttgttctgcaaaacctggggtcggaccccgttcactccccttcctaccctgagcattatgtggactgacaccaggtctgtgaaggaaaaactgaagaataaagaaagcatttggaaaatcccatggttgttttattttattttattttattagacagagtctcactctgtcactcaggctggagtgcagtggcgcaatctcggcccactgcaacctccacctcctgggttcaagcaattctcctgcctcagcctcctgagtagctgggattataggcacccgccaacacgcgcagccagtttctgtatttttagtagagatggggttttactatgttggccaggatagtcttgaactcctgacctcgagtgattcacccagaatgctgggattacaggcatgagccaccgtgcctggccccatggtatttttatagcatttcttataaatcaaccaagtttcttgaaaacaataatttttgttcagaagtactgttgtgagtgaggagaacattgtgcagctcagcctgtggacatacagtggctgcagcgtgggccccaggctgctctcatgctcgctg

SEQ ID NO: 115796 - DNA, 1901 bp, Homo sapiens
ccctctcttcctgcttctcacctcctctccttcagaaacactggttttcctttatggcacccaccaccacacttgctactcctggctgccactgcatgaaggcaacaggaaagcccagcctggtaccctacacctgtgtaccaaccacctctgctcctcaacctcacttccttatgtactgaatttcttaagccctctcttgggataaacattaaaggtagcagcaaaaaatagaaacctgtctgactaagtgagcaagaagacgataggcgaaagcaggaaattttttaatctcatcctcttaaaacgtaaacaaaaacaaggcaacttgaaaatgaaatagcatggccacaaaataagagctatggtgtgcaaactgagcagtaaaagcataagatatgatagagatgcttaaggacagtagaaagatgagctatccacttctgacctcagatttcatggacgtttgtgataactcagattcggacagtgctttccaatgcagttcccatatgttaccccatttaaatctcagagcaaccctgagataagaattgtcgttgttcccattttgcaaaccaggacttggtaagatttagggactcaaacatgattcttctggttccagcttctgttgccgtgcacaatatgggaagcagtgtttcctctgacccacacagggacacagagcaagaccaaagtaccccagaggtccaactgagtatcagagcagaaaagagctctcaagagtagccagtccaaactcactccccattccccactgcccttttacagatgaggaaacagactcacaaagaccttgtaagtcacgagtcagaactgagtagtagcatcattacgggctggaagatgttaaaccttcccagttcctaatccttgtaggtttatttgtagaaggcaataaattataagtcagctcctcacagcagcccaagtggccagtgaccagcacttagtcagtgcttagaaaatgtgtgttaaacagatggaggaatgattcactgactttaattgtaaccgtatgcaaatcagtgcatttcttttatatctgtcttgacctacttttcctacccaaagatgttgtttttcactcagtttggaatgagagggtaatgtttgtagaaatcccaagacaatcagctgagaggccctgtaagtgcataaagtaccattagtggtattattgagttgcttttctatggtactgtgggttaatcaaaggcctttgtcattgttgttttaaacacaaatctccaatttattatttagttcgttgcttttattaacttatttgaaatgcaaatagcagcaaacacaggtcaacagctgcagctgtgggatgcagccagtgagagccaagggacaagatggagatgggattcccggggacagggagccatgggcttccccaccctccctggggactgactggggaggacacctttgattacagggatcggggagggtctcaggggcaagtgggcagcagaatctaaaaggaatgattgatctcagtccctggaagtggagaaaaatgactagacagcctgtaccttcctgataagtttcccctaatagattcttgctgtaaaagcaaagcccaaaaccttccagtaattgcttctggactgtgggaaatgacagtgctgaaggaaataatacaggcaaagcagtttcagtaatgccttgcacatagaaagcagttactaaatgctagcctttatcactctttcttgctctgtcacccaggctggaatgcaatggcacgatcttggctcactgcaacctcagcctcccgggtccaagcgattctcctgcctcagcctcccaagtagctgggattacaggcatctgctactacacctggctaattttttttt

SEQ ID NO: 115797 - DNA, 1369 bp, Homo sapiens
caggagaattgcttgaacccgggaggcggaggttgcagtgagccgagatcgcgccactacactacagcctgggtgacaaagcgaaattccgtctcaaaaaaaaaaaaaaaaaaaagaaagaaagaaagaaagaaaagaaaaaaacagaattgacagccagttcagaaaccttatgaagagctagtactaagttatcatcaccagagagtgaaaaggaccttcaagtccaagacagcactgcagacacatcacgccatgccaggcaggggactgaactcagtgctgcgtgcaacctaacattctgtgatgaaggattaagtcatgccactagcaaagtgggtgtgattggcgagagatgagtgtctgagctggggagaaaggaaagaaccaaaataatggcagaaatatttttatcctgtaaaagtaaaagtcactgtcagtgtgacaattgaaagaccttttcattccctctgagatattttcaaagtgattaacttgaaaaatcttcgatgtaagggctgtaacatgactgggggggcatcttttttttttctccttcttctcttacttcttggaggaaagatgaaataaaatggttttaagaaaacgaaagacatcctgaaaaagaaagttaacaaaaacacaaaaggaaaaagctccctataaaaagcttactacctgctccctgcagttacaggtatcattttatgttagcgcttatgaaatatttctaaaaaaaaataaagatgttcacatgggttttgcttccttgcttaaattctgtcacctcggtggagtccagggtctttgctgcttacacacattgtgcgggacccaacatagtagggacttggtaaatgttaaaccatcatcattaaaaaaacactttctcttccactttgagtcctttaagttttatgaatgcatgcgggcagaatattaattccagcacagtgagtgttgctcaggagtgattatgccacctggcttgaagccttccagtgcacttgtggggattttcatttcactcatcatttaaagtttgtcatgaggggtctctgtgaaagaaaaatatagaggagcctcggctgggtgtgggggctcacgcctgtaatcccagcactttgggaggctgaggtgggcagatcacgaagtcaggagatcgagaccagcctggccaacatagtgacaccctgtctgtcctaaaaatacaaaaattagctgggcatggtggtgcgtgcctatagtcccagctacttgggagactgaggcaggagaattgcttgaacctgggaggtggaggttgtggtgagccaatatcacgccactgaactccagcctgggtgacagaatgagactccatctcaaa

SEQ ID NO: 115798 - DNA, 1118 bp, Homo sapiens
catttattgaacaggactatatcactaccctagatgaaaaagcagtgccatataaccataaacatattcattacatataaaatatgcattactattaaaatgtgaaaaagctcataagtgtatcaccccaatcttgcatactgccagtagaacatgtactgcatgttgggagacaccgtgatagagcatgctatgtgctgtgacagagcaagctacaaagcctaactgtagaaccagatagactagaagggagaaatcctagtgatagcaaacatttcagtagctctgagatcccatcatgttctaccctcacaacaactcttagggtaggcattattattatccccatttaatagacagggctcagtgttacttgctccaaatgacactagtggcaagaggacttaaacccaggtcttctggctgcaagtcccaggccctgaaattttaccctgtaatatgctagctgtggtttggcaaatgtaggagaaactacatcatgtacaaggtatatcccagcactttaagcctcagagagttttctcaacattttctcctagagtaatagcttctgtggcttgtacagagcctccctaagcagcactgatttcatgatcgtcaacagaatccagggaggtaagggcagtgtgcagacccctttccagcctctggggagagaaagaagtggccactggaaccttggtggagaggagtattccaggatcccggtacacgatgggcatctgtttgtaaaaatgcatgtaaatttggcctccaaaatattccgtgtagtctagttctcactgaactgtggcccactgataacagcagtgttcactccctagagaggtcgagacagcagcttcccagcactcagaggtgtcttcctgattctccccctggctctgtgagataactccctttagccctttttttgtctgcagccagcaagacctggtgataatgtgaggcccgaggccgagctaatcctccctgtagaaatccaacagtgaagcgtcttgtctttatgactattcgccgaggatgtgtaaagggaaatgcaagccccaggcagcagtagctggctgggttccagagtcaaaactgaattaaaaact

SEQ ID NO: 115799 - DNA, 1049 bp, Homo sapiens
ttgaccttaagaagtcccttcctggccaatcaccaagctggttgctgtggcccagcctgatgctgccactaccaatgatattgtccccctcgcagttttactggggaaaaatcaactcatactatttctccctggcctagagctaacaactttctgagggatggaaatcagtagattctaggtttaatatgtgttatgtcggccatttgcattttttctttttttttggttttcttttcaatagccaaataccaaaaaagactaattagatttttgtttttaaaaggcagctggttttgagaccgaataatagtttgatgatttggtttgataataacagatgagggtgaaaggtcaaccatttccctggatttgatcaatggcagtagtttgatggcaaattaaatatcagataaacctgtcaagtgactccaagaatcaatatttactgggaaaagttgtttgagcctttaatgattacatttgctcccaagggaaataatgctagaaatatgttcaggtattaggataggaatacataaaaatcatgtgaggatgattttaaaggaggtcacttattatgttgttattgatcaataaggtattcatcatctgtgtttctggccaagcctagcgccaagcatgagagccacatttctgcctcttattggacagagccatctggagatcctacagggacctcaaactcagcatgcctccaagcaaactctctgtcatctgtcttcctgcttccctttagaatagcttattagttgaaagcttggactttggatactgaacacctggtctccatcccagttccgctactaactaatgcagaccgttgggctgttgctccactgccctgtgccgcctttgcctcctgtgtgcaatggggatagtggcttcctcatagcattaatgtgcacattacatcagatcacagacataaagagcttaggtcaggtcttgaatataccttagccatttttcttattcagccctttatgcaatattgattgcgcatctgctgtgtatcagaccctcct

SEQ ID NO: 115800 - DNA, 1037 bp, Homo sapiens
atcaaaggattagattttgtcactacccatttctatgtattagccttgtattcagtcatttttggacccaggagggatggcacctggcacatagaacgtgctccaatgtgtgcatgaccttaaaaccagcacgcacattgaattatgcttttgccacctttttgttcatgttccctgttgcctctgagacacccagcctagaaaaagttcttttccaagcctcaggctgagatgtgcaagagcggatgaatgcgaaaagatgaatgagttgattgggggagttaatttgatgcagaggacccctgagaaatccagctacctccagggctaggagttttacttccctggagacagattctgtgtaatttcctggtaacaggtggccttctgttttctgtgctgatgctattggtctttggggatccgtggaattagaaccaagtctcctaccacctttgttttctaacagcacctctgtggcaggggtgagggttttgtgtctcaccctgctttgggatcatgtcctccctcagggctgaggtaggtttttgctccaggggagccgaggaagtcttctgttaggctgggttgcctcgatccttctcctggaccctctccggagctctaagctggggcacctgggatggagagccgctcattgtagcttctcagagcatggttactgggtaaactatgttcacctctttctcttcctctctgtttttcgtgcttagaaatgatgtggtgggatggaggggcacagggagaaccacctgggggctgcttgtgaggcttccttatttgctggtacctttcctccctctgaaaaggaagttttggggattccttccggccaggcctctgggccccagcgttagttgccagggatagagaagacttctgtgaggggctctggaagaaaaggttcactacaaaactctgctgcttcaggcgtctcccctcctgcctcaccagctcccattctcttcaaatcaaccacacatttgctttacctgccatgtgggtttctgcagaaa

SEQ ID NO: 115801 - DNA, 1046 bp, Homo sapiens
tagaagtgccaagtgcttagaacagagcatggcacataatgactgaaatgtaaatattagctgtgattgttattattaccaccatatgaaactgttgctatggagagtcactgggtattttggagcccagtgtgacataagaacttggttgaagccaagagtccctggtcacccaggccagaggagttgctatcactccactttccacttcctttattatagttgagcgcttttgagatagagttgcttctcggacatgaaagcagccaaagtccctgggaaccttcattgtttgcagcgtcccttctacccacactttgagcatctctgtgactgtatcctgtttttgtaaatggagatataattcaaggaccataaaattcatccctttaaagtgtgtaatttggtggtttttagtgtatttacaaagttttgcaaccatcacccttatctaattctagaatacgtctatcacgccccaaaagccctgagctcatcagcagtcggtctccattcttccccgatgccgacaactgcgaacctgcctgtcctgatttgccaattctggacatttcatataaatataatgatatactatgtggccttgcgtgtctggcttattttagcctaacagtttcaaggttcatccatgtcgtagcatgtgtcagtactgcattcgtttccaggctgaacagtgccagtgtatggatagcccacatctgtgtatccattcctcagttgacggacacttgagttgcttccactttttggctgttgtgatgtcacctgtcatgactgacttctgcctgctttagatcagcaggacctctgacaatccatgaaggtgtgaagctgaggaaagtgatgggatagcaatctctgttactaacagaatcgggaagtaattacagcttgaaaaaagctggagaattacagcctgggcaacatggtaaaaccctgtctctaccaaaaatacaaaaaattagccgggcatggtgttgcatgcctgtggtcccagctactcaggaggctgagatggaggattg

SEQ ID NO: 115802 - DNA, 1158 bp, Homo sapiens
gaaactttgaaaatggcattcttgggcaaactgataactacacttattggctttgtggatgatcctacagccagggatccattcaaccctcccgtgctcttctggcctccaggagaaattagacctttggggaatgaatgctttttgctggtaataaactcccatggctccgaaggctagccctgtcctgaaggtgggatggcagcactgcccatggctcagggcctacgttctgtgctttatttcaggtgcgcttaatgatcactgatgctgcccgacacaagctgctcgtgctgaccgggcagtgctttgaaaataccggagagctcattctccagtccggctctttctccttccagaacttcatagagattttcaccgatcaagaggtaggttcgtgtctgagaatatctgtgcttctagtggcttggttgccttaggttcctctttgagagcactgggggagacaaaagaagaagggagggaacctcacagctctcctgaaataagcaaaactgcatgatccaaaatactttatttctatggctcattgccaaaagaatttagagcactcatttacaattaattggaatcattcttaatgtgcctgagatatagatgggaggggttggaacagtcaacactttacagatggtaaaaatgatggagaaacttgaaatgtcagagcccaaaagaaaacctgcgtttcctgttttctgaaataatactccaaagatatctggggcttttggcacctcgttttccaggcctaattatttcagatttcttttactttaatgcctggccccagtgtttgaacttgggctgtttgaacagcccacaaaagagagagggctttacaaaaggagccacgtaggaaaatggggcacgtctgtgacccaagaaaaagatggctaaagtagctggactgaagctggatcattcatatttctaatgcgtatcttattcaaagatgacacatataaagtgttgaaaactgtgtgaagttagtcgtattttgtaaaatgagatcaaagattttgatatgcttatttctgcttgggaatttatcctggctgggaaactttccaaagtaatgcaccttgtttatctagcttacatgtttatagcaattacagaaacaattcagacccatcc

SEQ ID NO: 115803 - DNA, 1615 bp, Homo sapiens
gtgaagggccacgtgtccttctgcacttaattttccttggccctgaggttcagagaaagctctgtttgtacttttcatcactggcaagaactgtaagcacactgcccaacttcatctgagtcacctggaggcttctttaaaaacactgatcagaaggcataataatgttcactctccagccactggggtggggagaatgtaaaactgtgaaaaggaacatttttgaagccacagctgtcagaaggtgtggcgtcatctgcatcttgaaacacataccaggatgggatcccccaggcaggcagctcctttctcagaggcttcagagctcactcacagttggttcatctttaccacttcaaaatgcaagctttggctgtgtcttcttccaaggccgctagagttcacgcatcttgcctcattcatctcggtatccattgcacctgcacatagtaaaggcctagtaagccgctgttcaattgcattgaaattccaaagctagggctacaattctcactctgcctactgtcctgaagttgttgtttgatcactataatgtcagaatgttttgcaagattatgtccccatgtgcatgttgtacccggaggcaggtgggcatttgtctagtagctctggggtcacacacattattagcatcttgcctcagggaagagagaaagctgcagaaggctggaagtggcccaatgacatggtgagcagttaagtggcctgcttatagctcatttgcatgcacatgggcactttccacattcctgtgcagttctgtagttattttctagtggttggtttctacccaagtcattggtttgtcttttttgccgaaaaaccagacaaaggaaatatgtaaagaaaagtgtcattgccaagattttcaataaggaagtaacacgatttggcatatttgcatctcaaataatatccctccttccccttctttaaataaggttgttatgaatattgctgcttaatcatttttactagattatggaagcaaaattttagcaccatggactgtgcacgtgtcagattttgccactaattacagaaaaaaaaatttgccctaactgaagaactcgagttccgtggaagggcagattccccagggtttatacttattggggtaggttctggaggacacatattttgattatactcaggcaggtatcattatggtcagagaccatgtcatattctcttctgccacccacaaagaaaggatgccacagctaaagtgaattgaaaaccactggactggaccagtggttatcagccttttggagctaggattgcccattgttgccttggaaaaatggttgagtaactgaataacaaacggaccttgaagaccacttgttgtccagctcttttccttttatccagtccttgaaacatactagttaactccagggaaaccaaaaccacaatttgggacaaacaaaaatgatactttttaaaaaatataagaacagctaaaaataaatggactgaaaaaatagaactatcagtacactttgagcttcaggttttggagtcttaatcactggagatcaattaacaaaaccagaactaacagacggtacaattgtctggctaaccc

SEQ ID NO: 115804 - DNA, 1215 bp, Homo sapiens
agtggaataaaagaaaatattttttattagtggtgaaatgacccagacagctttctcttgtgatagtttaacgtttttttttaaagggcatctttgcctttattctaggggtaatattcaaagtgtttcataaccactgcagcacaatcctcagttgcccaggtggtcactggtgttagaactggagcagagtactggcattcccctgctgggcaggaatagatggtggaggggttgttggggaggtgccagggcgagtgggtactggttgaggtagaagccagtagcagcggggctcaggacaaaggctgttcaccttccagtagggaagtatttcagcatttaagcaaccaacatcactatgagagtgcatgtctgaaactggtcctatgtgcatcctgtgatcctgtaacacatagttatagctggagatgatggatcagtgatgataatcacttacaccttttctttctttctttctttctttaaaacccagatcggggagttactaagcaccacccatcctgccaacaaagccagcttaaccctgttctgtcctgaagaaggggactggaagaactccaatcttgacagacacaatctccaagacttcatcaatattaaactcaattcagcttctatcttgccagaaatggaaggactttctgagtttaccgagtatctctcagaatcagtggaagtcccatctccctttgacatcttggaacctcccacatcgggtggatttctgaagctctccaagccctgctgttatatttttccaggagggaggggcgattctgccttgtttgcagtgaatggtttcaatatgctcatcaatggcggatcagagagaaaatcctgcttctggaagctcatccgacacttagaccgagtggactccatcctgctcacccacattggggatgacaatttgcctggaataaacagcatgttacagcggaaaattgcagagctcgaggaagaacagtcccagggctccaccacaaatagtgactggatgaaaaacctcatctcccctgacttaggagttgtatttctcaatgtacctgaaaatctcaaaaatccagagccaaacatcaagatgaagagaagcatagaagaagcctgcttcactctccagtacctaaacaaattgtccatgaaaccagaacctctgtttagaagtgtaggcaatactattgatcctgtcat

SEQ ID NO: 115805 - DNA, 4382 bp, Homo sapiens
agtacaacatcctggaagggttggaaaagctcaaacatctagactttctgaagcagccactggccacccaaaaggatctcactggccaggtgcccactcctgtggtgaaacaaacaaaactgaaacagagggctgatagccgagaaagtctgaagccagccgcaaaaccacttcctagcaaatccgtgcgcaaggagtcaaaagaagaaacccctgaggtcacaaaagtgaatcacgtggaaaagccacccaaagttgaaagcaaagaaaaggtaatggtgaaaaaagacaagccaataaaaacagagaccaaaccttcagtgactgaaaaggaggttcccagcaaagaagagccatctccagtgaaagccgaggtggctgagaagcaagccacagatgtcaaacccaaagctgccaaggagaagacggtgaaaaaggaaacaaaggtaaagcctgaagacaagaaagaggagaaagaaaagccaaagaaagaagtggctaaaaaggaggacaaaacacctatcaagaaggaggaaaaaccaaaaaaggaagaggtgaaaaaagaagtcaaaaaagagatcaagaaagaagagaaaaaagaacccaagaaagaggttaagaaagaaacaccgccaaaggaagtcaagaaggaagttaagaaggaagagaagaaggaagtgaaaaaggaagaaaaggaacccaaaaaagaaattaagaagctccctaaagacgcaaagaaatcatctactcctctgtctgaagcaaaaaaaccagctgctttaaaaccaaaagtacccaagaaggaagagtctgtcaagaaagattctgttgctgccggaaagccaaaggagaaggggaaaataaaagtcattaagaaggaaggcaaggccgcagaggctgtcgctgcagctgtcggcactggagccaccacagcagctgtcatggcggcagctggaatagcagccattggccctgccaaagaactcgaagctgagaggtcccttatgtcatctcctgaggatctaaccaaggactttgaagagttaaaggctgaagaggtcgatgtaacaaaggacatcaagcctcagctggagctaatcgaagacgaagagaaactgaaggaaactgagccagtcgaagcctacgtcatccagaaggagagagaagtcaccaaaggtcctgccgagtcccctgatgagggaatcactaccactgaaggggagggcgaatgtgaacagacacctgaggagctggagcccgtcgagaagcagggagtagacgacattgaaaaatttgaagatgaaggagccggttttgaagaatcttcagagactggagactatgaagagaaggcagaaactgaggaggctgaggagccagaagaggatggggaggaacacgtatgtgtgagcgcctccaagcacagccccactgaggatgaggaaagtgccaaggcggaggctgatgcatacatcagggagaagagggagtctgtggccagtggggatgaccgagccgaagaagacatggatgaggccattgagaaaggagaggctgaacaatctgaagaggaggctgatgaggaggacaaagctgaagatgccagagaggaggaatatgagccggaaaaaatggaagctgaagactatgtgatggctgtggtcgacaaggctgcagaggctggtggtgccgaggagcagtatggattcctcaccacaccaaccaagcaactaggagcccagtctcctggccgagaacctgcatcttcaattcatgatgagactttacctggaggctcagagagcgaggccaccgcttctgatgaggagaatcgagaagaccagcctgaggaattcactgccacctctggctacactcagtctactattgagatatccagtgagcccacccccatggatgagatgtctacccctcgagacgtgatgagtgatgagaccaacaatgaagagacggagtccccttctcaggaattcgtaaatatcaccaaatatgaatcttcattgtattctcaggaatactctaaacctgctgatgttacaccgctcaacggattttctgaaggatcaaaaacagatgccactgatggcaaggattacaatgcttcagcctctaccatatcaccaccctcttccatggaggaagacaaattcagcagatctgctttacgtgatgcttactgctctgaagtgaaagccagcaccactttggacatcaaagatagcatctcagctgtttcaagtgaaaaggtcagcccatcgaagagcccgtccctgagtccatctccaccatcacccttagaaaagacccccctgggtgaacgtagtgtgaacttctctctgacgcccaatgagattaaagtctctgcagaggcagaagtagccccggtgtctcctgaggtgacccaagaagtagttgaagaacattgtgctagtcctgaggacaagactctggaagtggtgtcaccatctcagtccgtgactggcagtgctggtcacacaccttactatcaatctcctactgacgagaaatccagtcatctccctacagaagtcattgaaaaaccaccagcagttccagtgagttttgaattcagtgatgccaaagatgagaatgaaagggcttcagtaagccccatggatgagcccgtgcctgactcagagtctcctattgaaaaagttttgtctcctttacgcagcccgcccctcattggatccgagtctgcttatgaaagttttctaagtgctgatgacaaggcttctggcagaggtgccgaaagtccttttgaagaaaagagtggaaaacaaggctctccagaccaagtaagtccagtttctgaaatgacttctactagtctttaccaagacaaacaggaagggaaaagcacagactttgcaccaataaaagaagactttggccaagaaaagaaaactgatgatgttgaagccatgagttctcaaccagcactggctctggatgaaaggaaattaggagatgtttctcccacacaaatagatgtcagtcagtttggatcttttaaagaagacactaagatgtccatttctgaaggtactgtctcagacaagtcagctactcctgttgatgagggcgtagcagaagacacgtactctcatatggagggtgtggcctcagtgtccacagcctcagtggctacgagctcatttccagagccaacaacagatgatgtgtctccatctctgcatgctgaggttggctccccacattccacagaagtagatgactccctttcagtgtctgttgtgcaaacacctaccacattccaggaaacagaaatgtctccatctaaagaagaatgcccaagaccgatgtcaatttctccaccagatttctcccctaaaactgcaaagtccaggacacccgttcaagatcacagatctgaacagtcctcaatgtctattgaatttggccaagaatctcctgagcaatcccttgctatggacttcagtcgacagtctccagatcaccctacagtgggtgcaggcgtgcttcacatcactgaaaatgggccaactgaagtggactacagtccttctgacatgcaggactccagtttatcacataagataccacctatggaggagccgtcctacacccaagataatgatctttctgagctcatctcagtatctcaggtagaggcctccccgtccacctcttctgctcataccccttctcagatcgcttctcctctccaagaagatactctatccgatgttgctcctcccagagatatgtccttatatgcctcactcacctctgaaaaagtgcaaagtctggaaggagagaagctctctccaaaatctgatatctctccactcaccccacgagagtcctctcctttatattcacctactttttcagattctacctctgcagtcaaagagaaaacagcaacttgccacagttcctcttctccaccaatagatgcagcatccgcagagccctatggcttccgtgcctcagtgttattcgatacaatgcaacaccatctagccttgaatagagatttgtccacacctggcctggagaaggacagtggagggaagacacctggtgactttagctatgcctatcaaaagcctgaggaaacaaccaggtccccagatgaagaagattatgactatgagtcttatgagaagaccacccggacctcagatgtgggtggctattactatgagaagatagagagaaccacaaaatctccaagtgacagtggctactcctatgagaccattgggaaaactaccaagacccctgaagatggtgactattcctatgaaattattgagaagaccacacggacccctgaagagggtgggtac

SEQ ID NO: 115806 - DNA, 6018 bp, Homo sapiens
aggcctccctgtgtatttggacctgtgctacattcctaaccacagcaatagtaagaatgttgatgtggaatttttcaagagagtgcggtcttcctactacgtggtgagtgggaatgaccctgctgctgaggagcccagccgggctgtcctggacgctttgttggaaggaaaggctcagtggggcagcaacatgcaggtgagaactcctcgacagtgtctgcactgccgattgagctgtgtccagaggcaatgggaaggaaccatgtttaaagaggcacctcatgtggctgatcgtggatccacatgaggtgcctcctgtgtctgtcacacacgaaatatcctgagaacaaagtcagtttaacacacagtaggtagtctgaaataatattcttggcaccaccaccaaccacggccttggaggaaagacaccttaactaaagcagaaaccatttatctgcaaaatgggcctaagattaattgcccttcctccagtatgccaagagtcttgtgtgtgtgaatcaaagcggtcatatttccatatgagagctcctgaggaattgcctttcttcctttgtgttttatgagtagactgcggctaggaatatggccatttagaaaaacagctctccatgtgaaattccacagcaggagcattgctgaatatagtccctcacaggacactcccaactcccaaacatcatgcctgaccacaaaccatcccttatttatttaatgacagggtctccctatgttgcccaggctggtctcgaactcctggccttaaatgattcttagaaccagctattattaattcagctgtgatctttgcttatcaagttttatttgtggttctgtacaaaattacctagtaaattgtgcttgtatcatattatatagaattacttgttatttaatcatatgaaatctaatgagaggcacccagtggctccctactgaatgctagatggaatttatactattcaggacattacttacccaccccatacctccatccccaaccacacacataaagtaaaggtgcagatctttgttctcaggacaaaatgttagttactcacaatgagtgggcttttgagggctttgaagtgcgcgataaaatccttggattaaatatgcaatatcttttatgcaaaacttaccagttgtgttaaaggaaatacaaaaaattgtaccctaacggaagcacttctcttaacagtaaagaactgagaaactgattaattgctttttggttccagccttcagtttcccttagaaacaatagcttttctttgcagctttattctggttcctggaaaatatacattgaaaaatcctttgcatttcttgaggaaaatagaaaagttttctctcatttcccttcttcttccagtggtctaataccttgctattcaatttttttcatatggtttctgtttctgcccttaaatagctattttttttttctctccctgcaggtgacactgatcccaactcatgactcagaagtgatgagggaatggtaccaggagacccatgagaaacagcaagatctcaacatcatggttttagcaagcagcagcacagtggttatgcaagatgaatccttccctgcatgcaagattgaactgtaaaaaccaaggccagccacaccacaggatctgaactttgtttccagaaattcttcaatttgaaatcaccttttctaaaaagtcaattcatctagttaagtcgctgaacaattacctgccaaatgctatactgtgtcatggtgatgcaagtcactaaatttctcagtttttgctgattgctaagggaaataacagtatttccacaatagggttcaaattcctgcaaaattacctaccccagttcatctctgctgaacatttggaaaccatgcactagccaacccaactgacttctgctaggtagaggcatttgtcttagagagagagagagcgcgggagagagtgagagagagtgagagcacaaagataacgcaggagagagagagagaaagaatgagaaagaaaaggaatgcaagagaaggagatgtaatgacagagagttctggtgagatacccagagagaaaaagagagagcagggtggggtaaggaggagaaaataaaccaacaattaggtctgcattttctcaggcagtaggcattctttagtctacataggcaaagttttccatttttgtcagtctgagtcatcaaaaagagtcttaattttctaaaacaagttggctagaagaaagtaaaaagaacaacacttgttatgagggcatgtgatattttcacatcttaattaagctccttcagtttgaaggctgcacactgacataatgtagtgagtgtagactggccatgcaagtggtttgggccccattcagaactctcagactctaaacacacaagtagattgatctaaggcatgctcccagcatttgtccacccacttagtccactctgagtcgattaacctgcatgcagcaacacccaagtccaccccaattaactgaagcaaataccaaagcagttgggagtacatatggtagacaatttgccttaggaagtgacttgaatgtacaaagatacttgatgcacttattttttaatgtgagacagcaagtttataaaacatccatataggattatagatacttaaaggaacacgtgggtgagcgtgtgtgggggtactagaagctgatctgattggtccaacagtttgatgctgagtcatgcgtgttgaatcccacttcagtgcacctgtggcctctcagtcaaacaagttgtgcctttcacagcttctttactactgcaagttcaagactgaaatggcttctatgatcagaactgggaaaacagtgaatcttatggtggaagaggttctcagcaagtgtacagtatttaccttcctttgtcttacattggctttttaaattttccattaatttcaacataattatgggaacaagtgtacagaagaattttttttttaagatatgtgagaacttttcatagatgaactttttaacaaatgttttcatttacaggaaattgcaaagaaaattctcaagtgatagtctttttttttaagtgtttcgtaagacaaaaattgaataatgttttttgaagttctggcaagattgaagtctgatattgcagtaatgatatttattaaaaacccataactaccaggaataatgatacctcccaccccttgattcccataacataaaagtgctacttgagagtgggggagaatggcatggtaggctacttttcagggccttgacaagtacatcacccagtggtatcctacatacttctttcaagatcttcaaccatgaggtaaaagagccaagttcaaagaaccctagcacaaatttgctttgggattttcttttctggaaaaaaaaaataaaagaaatagtacattgaaaacaaatgaattctcaactcctacggttcatgtagagtttagagaaaatttccatcattgtcatcattgaactgtgaacctgggaagccagatcatgattaacactgacatcaagtttcaagttgcagatcaatgcacccagtgttcagatgaggcaaacttctccgtgacaactgtgctgtgctctgtcacattacatttcctgcagactctaagatctacggagtagagaacaatgacctcattttattttctatgttagttatttatttcaaaattaacattttagttgatttttgtctgataagtctatgttttgcactgctaactatgatgagggtttaaaaaaatgcttcttcagggtcctttcactgaggacctatgcagtctacttaatgctgtgaattacatttttcaaatgtttaattttttaaagaaaattaatattctatttttgttaggcttctctagaaatgcagcttttatttattaccccatttctttcaagtccttggaaaataacatattaagggtacaagaaattaacacatgatggaaaagtcattgtgacgccaatgaatttcattgagtataaactcatctacttcaaatttattttataacacaacctaagatactcaagataattatttaatggttagctcttaagttgaattggtctacataatgcgtgggaagaaaaccagatttttagccttcttgccaaatccagacctctggttgatttttctttgacagaagatgcaagttattttccaatttcacaattaaatgtatttaacctgaacattattttgctttaaaaactataaacattgtaggagaattatagccagtcttcagttataaccactccaccctcctcactttctctctctctctctctttttttttttttttttttttgctatgggatttaatgggaaaaatatgtaaaaactgtcactagtcagctggctctttttcctatgaaatctatcagtacctttctccatccgttgttctcaatatgaccacagagcctgagtataccaagaaaaccaatattcgcattacaggttgctcctgtccttccagacacctttcctgcctgtgtgactaacctaattttgctagttccataaatacacgattagtttagtaacagccatcacaatgtaccatgtacattcatggtgagagctaaagatcgacacagacttctaggagctttgttcatactgattacttaatccaattgtatagattgaatatttgagtggaaggaatttacactctgtttaaatgatgggattctatcgagatagcactcatgatcatgacctttttggtagtattcttaaacaaaattctacagagactaaatgttagcgatgatcctccattttcaattttaaccaattctgtcccctttctcaaaaccctgagccctgtgcatgctttctcagtcttgtggtgggactggatacaatgactaacttcccctcctcccctctttaaacaccattttccatggagttcaaaaaaattttttttcttaacgttacatatcatagtgaatggtttccccagtgtatatgaatgttttaagtgtctccaatagcttatgcagtctaggagctttccaatactcatttaattaagatttaatcatttgctaatggaaatcttaccacctttcattttccctctgttaccaaatttcagctcttaggagctgctctacaattctgaatttgcttttcttgcctctctttagtcacctgtcacaggaggttcctgctcagtaatgatattgtgagttaggataataactttttttttttgtgcttcagatttagaagaaaagatcctgtttccatttgaaaggaactgtaagcttttatcttttaaccaactgaacaatacaccaaaagcagcctagggatgagcatttctttgaaagcaattaggttattcacctggtattaaaactatttactgttaaaaaatctgtgacttcatgaagttgatttttaaaggcagcatcaaaaactgaaaaggaagggaaaaaataggcagcttctctgcacttgtttggagctccccaaaacaggagccatggagaagtggcatcaagaccgggctgccctttcgagaacaccctgtggcagttcagagacacgcttttcctacactgcatgcagcccctctttccagcactggaaagaagtggtcttgagcccagctgagaagcacttcacactcctctctcttgttctgaatggtgtttgtgtcagtctgcagctgtgtatggtattatgtcttataatcctgcatcacttctatcctatccagtcatatctaatgtagaaaattagtttccagtgaaagtaatatgtagtgcttttatgatatttgtgtgcaatatcccctcttccattgaggatatttgatgtaaaggaaaaaaaaaaactcagttccacaataaaatacaaaagtggcaaaagttcatgtgtgtgctgtgctgtcttttgctttgtgttcctgagttgggctttgccact

SEQ ID NO: 115807 - DNA, 1045 bp, Homo sapiens
atcccaaagcaaatttgtgctagggttctttgaacttggctcttttacctcatggttgaagatcttgaaagaagtatgtaggataccactgggtgatgtacttgtcaaggccctgaaaagtagcctaccatgccattctcccccactctcaagtagcacttttatgttatgggaatcaaggggtgggaggtatcattattcctggtagttatgggtttttaataaatatcattactgcaatatcagacttcaatcttgccagaacttcaaaaaacattattcaatttttgtcttacgaaacacttaaaaaaaaagactatcacttgagaattttctttgcaatttcctgtaaatgaaaacatttgttaaaaagttcatctatgaaaagttctcacatatcttaaaaaaaaaattcttctgtacacttgttcccataattatgttgaaattaatggaaaatttaaaaagccaatgtaagacaaaggaaggtaaatactgtacacttgctgagaacctcttccaccataagattcactgttttcccagttctgatcatagaagccatttcagtcttgaacttgcagtagtaaagaagctgtgaaaggcacaacttgtttgactgagaggccacaggtgcactgaagtgggattcaacacgcatgactcagcatcaaactgttggaccaatcagatcagcttctagtacccccacacacgctcacccacgtgttcctttaagtatctataatcctatatggatgttttataaacttgctgtctcacattaaaaaataagtgcatcaagtatctttgtacattcaagtcacttcctaaggcaaattgtctaccatatgtactcccaactgctttggtatttgcttcagttaattggggtggacttgggtgttgctgcatgcaggttaatcgactcagagtggactaagtgggtggacaaatgctgggagcatgccttagatcaatctacttgtgtgtttagagtctgagagttctgaatggggcccaaaccacttgcatggccagtcta

SEQ ID NO: 115808 - DNA, 1038 bp, Homo sapiens
catattagaattcttatttttggtgtttgctgcttggtttggttaggtcagggtggaaacatagatttgttagaggctggctgtctttgtggtttaaaacaagaaattacacagggagacacagcatatggagttccatttactgtttttgagtgaaaggggagaaatcacatgtggtgcatcttagcaaaattgctgagctgaaaaaaataaccacagctaacagcacctgaatgaaaggcagcatgaccatttcccaacaaaatggtttttttctaccagcaaaatgtgtggttattttgcaggtgacttcattctgggccactagaatgaggactaaactacgagtcagcaaacttttgttcaaatctaaagtcagtcactcagggctagtttttcctctttgtatctttctctcacttctctacctttcttctcatttttcccatttgtttccaacaggccttacattctaagcttcaagctctgggcaaaattgagtcagaaggtcttttaagtctgaccacccagcttgtcaaggaaaaactctccacctgtgaagcagaggacatcgccacctatgagcagaatctgcagcagtggcatctagaccttgtacagttgatccagagagaacagcaacagagggagcaagcgaagcaggagtaccaggctcagaaagcagcaaaggcatctgcctaatagggtcccccagggccccacctgtctcacaagaacttcactcaaccccgtgccaggactcagcagtggcctggacaacagcctcagcttcctctacccatcttcttttcttaaagcaggctatgtgccctacatggcaaggcaccatgactgcccatcgagatgccaagaagggctatggaactatgcaggtggctagtggtcagactgaagtcaccagctgaataccttaaggaggactcttgaggctcataatggagttcctggggcacagggattagttatgagcattaaagttcctaagacccagtgacagtactgggagaaaccaaggct

SEQ ID NO: 115809 - DNA, 1488 bp, Homo sapiens
ttccccatttgcaaaaagaacatagaaatccatgcgtgtggcctcattcagaaccatgacatgtgcaaaaccagctgggtaggaacagctgcaaatcagtgctattttatagttatgaatatatgtaaaaattggttaaaaaaataattcagtaagtaaaaaacatttgttgtgcttgtgatatgaacaggcactatattttaagccattgttaatattctctgctttaccaccaagtaactacagaaaggaaattgtttgacttgattttcttggcctccatctatgttgtagaatatcaagggaaaataaaaattgcttaaagcctgctctccaggctttaatgaccagcattaatgtgcaaacaaatattttatgttacgtgttatactcaggggcttataatttatgaacgagcatttcccattcccttccaacaagtattttaaactgagccttattgtcctttttatagtcattattttgctgtctttgaaataacacctgagatttagggtttcctttagcattttgtcctcttctgccttaacagtgagaaggtaccagagcagagaatagggcagtcagaccagcctgtctgctctgcctgtcagggtgaccttgagaatatatgtgtctcctttatgccttagctgttctagctggtagacatgatgccttaaatttgcatcacagtttgagccattttctggttgaactgtccaaaattctcttgaagtaggtgaagcaaatagtattttatcattatgacgatgatactgggagccaagagaaatgagtggtttatttaatgtccttcaggacgttggtgcagtagcacctgatttagttcgttctggtatgtaaaatagaagctaaaggctgaggaaaaaccttgtttgtggaagaactagggccagagcctaagcccgcatattttacttcttaattctgcatttttttaaaccatgccccacgttttaagagtgtttatagttaaatagagatttagtaatattacctacaactaatttcctctcttttttactttcatcttctgctagatgctttatctgtggtttttgaggtcatgatgcaagaagcctttgaagtgccttccacccaacttctctccctctatgttttatttcattgcctggcaaagaagacagacttcagtgtaagtgatcttccctaaagcagtattaagaactttagaaaaggcaagcaggggcttgctctcaaaagctggaaaaaggtgtctgcagctctgtggccaggcacaaccaggaatgtgtgtttattgtatacattttggttactggtttctaacaaatggaattggaggttcttccacttgagagaatctcaaaagaaagtcctcgtgcatattttgaaacttgagctaggctgagtgcacctcagacattcagaaatgggtcattggtagtcactgagagctggacatggcatgtcaaagaggcagtg

SEQ ID NO: 115810 - DNA, 1089 bp, Homo sapiens
gctacaacctttaaaacagtggtttttagacatttttccatttcggcacacctgaggctactatatataacacctggaaacagtgagtcagctcagtggtgattcagttgggggttaggactgtatcaaaatctctcaaggggatatggatatagtttggaaaaattcctcaggtgtttctactggttccaagagggaagaatggagccctgtggggaatggtggttaacattactgaagaatttgaaacaaataaaaatgcagccacaatcaggatcattggtagtaaaatgagtatgcatgaaaatcacaagaagctcactaaaaattcagggttttgtgcccaattcccacagattctggttctataggtctgagacgtaggaatctatattgttaaaaacactctgagaaagtcgacatcctgcaggtgctaaagggtccacattttaagaaatctgaattctcaagtattcagttgtatgacacaacattctagaaacttagtagcaaatatttcttggcatatttcttgggaccttaaaagccaggctaagaaccagaaaatgctgtgtaatgtctgctttctcatgagagtctgtttttgtattgttattcatactttataagaagagtcactgaaccagttaggggggttgtgtgggtttctttttttcttttttcttttatgttttttttaagctatgatgaggtgttagaattggagccttagtttttacattatcagttgtcttatatcagactcacaactttctcaccctgaccaacagttcctgttaccaaacctcatgagtcatggcttctgtttcactgtcacagatgctgtaaaatgatagtcaaatattttaaagctaatggtggcaagttttattctgaataatacataggcatatattacagactaaattagataattttctctttttttcctgttatgttcattttcattataggttcaatatggaatttttccagataactttacattcaatttactgatggattctttcataaagaaagaaaattacaaaggtaagaaactaaccccagattcagtgtttatagggc

SEQ ID NO: 115811 - DNA, 1047 bp, Homo sapiens
gcagatgcccttaagagttctgagtatggcctgagttttgagaataggatgcttctcagttcctgctattttattggccgtggtttggcttcctaggcaagctctgtcttcacctgaaaatcctactcaacactggggacagagatctctttagccatgggataccaacttttagaactagagctagaacttgagagtacactttgtcactctttcttatgctcctccaagaaatacacatttcctcagaattgtaagtgtaatcacattttataagctgaaatctcagagtacctttagccttcatgagcacaaccttgttggggatatttgggttgtatttgtttctcttttctacactcacatgtttgcctatcttgacagcctgttggcctaggcaataataaagcttctgtcgaggtgagcaaacagctgatggcataggcgcacagaggggactcctacagtggctggctgtaatctgccaggctggtggtcagagcaggcgagaacaaaagccagtctgtttgcaggcaaattggaaaatcaatgtgttagttgtattcttttctctttgcctttcttctgacagaaagggagaatgctcatccagcaatccacagaattattccaggcaagtgcccattccagagactcactcacctgacatattactactggaagttgaaaagtccccacatttatttgtctgaactgcttaaaaagtcaccaacaggaattcttctcaaacttgccatccaaaattgaaccccgctggcccagtgttttgacttgtttatattccagatagccactcacgtaagtttatctttttaatgctgatgggggccaagaaaggagttcatttgcttcctggctgggaaattcaggaattgcattttgggcagcatattttatagtatgtgtgtaagtatttcactgcttttcctcagtttattttttgtgagagttcattgaaaatgtccaaggctgggcacagtggctcatgcctataatcccagctctttaggaagccgaggtgggagg

SEQ ID NO: 115812 - DNA, 1040 bp, Homo sapiens
acagaaatagaaactagctatgaattggattgtatcactggaagtatgtccaaccttccttttgctacaaacaaagaatgcctagggattcaactttttcatgtgttagagaatcagaatgtttaaaatactgagatgcttttcttctttaataaaaatctaattcttaagaaatcctgattagtactgagcttctcttccctcagaaatacccctaaagaaatccgtaatctcacatacaaacacatataaatctgctcaacactggcttaattcttttctgcttttaccctggtgtgcttcatctcctgggccaggctctttgcctgctcatttcttttgtggcagacttaatcctgacaacttcactaagcctagcatactccagaaattctggtttttatttctattctattcctttgttttcctccttttttttctttctcacctttctttttcccagaattattcaaaaccagtgtttaattaatatatgtgattttcctatcttaatcattgtattatttgtgattttgcagaaattttatctgcagttcctagccaaagctttaggagacatcaggaaatgtttgcatgtatttaaaactggctcatttattgctcataaatttcctactcaaaaaccaaaatatttcgcttatctctgtccaaaccaagccagtttccataactttatatgcttttataaacaggactggttccgggatccagtttttctcaacatcctgctgttcctaggtaaaggccctctgtagcctaaccttggccttcagtaactgcctctcagtcatgaagctgacctgtgagccagtgtgtgtatagctttagagaggctggagaagtcttaccagctgcttctgggtgcagtttcactgataggtcaggtggtggccacaaagccattttctgcttttaggaccatctccagatgggcacctcagtgatgactgtaaatacttgtttcttctcccattctccccacaagtaatcctccctggttatctacacatattgctctt

SEQ ID NO: 115813 - DNA, 1037 bp, Homo sapiens
cctgattcatagtaggttgataaatgatcaaatgcagaagagaggagctttgacctcatcaaatgctccattctgttgtaataagtaatttcatataggtatagaagtagaactattctctctgcagtttaacattcagttttgccttattcatgcttaaaaaatcccagctttcttacttttttgcctaagattattgaaggaaaaagtgtatctgttcactaaaggctgcattcattgtagcagccatgtatatgtggacagtctacttgctaccacacttgaaattctgcttaatgtgcactcataaaggacaagctcccaccccttcgaactcagtgtaattgttcagtatatgagcttgtggtgtttaagaaactagggaggcagaggtattttcatagcttgttatcctcttctctcccacaaagtgcagccatgatctgacacatgatcaatgggccgagccctttttaggatgcagaagatgctccctgtgtctgtggatcacaatagcaaacaatagcaacttctgcaatgatattttgcctccctggtgttcaaacttcttcagttaagcctgtctggaatctatttaactattatacatcaaagctttttttttttttttttttttttttaaatgaaaatggtgggggtggaaccagagaggaaaacctgtatctttgccaaggagccctctctccttcccctatgactcatacttaggaaagctgagggactttggaaagctgcctgagtcacattgaggcaggtctcctggcactttcagacactttttaaattttctcaggcagtaaaagatgtttttcaaattgttcattccctctttctgggccagcctaaaagcttttgtttagctaaagtatggcttttttatgcaagatttgccagccagaacagatgaacccggaactttgtatttggtttattactaaagaaacagctctttcatattcagaattgtaactgttccttcttatgattgtcatcctattaaaaggaattgcctctgg

SEQ ID NO: 115814 - DNA, 1093 bp, Homo sapiens
caggattatattattgatttttagtctgttcaagctgttcaagatcttctcatttaaccccctcattttacagcgctggaaacgataacagagaaggaacgtaagactttcccaaaggcacatagctatttgtaataggactggcatgtgtacagttatatgaaaattctactaaaaatcattacaattataaataaaattgggtggagggtggagaatcaaagttgagggttcaggtacctgggataccttaggtttgattctccttcctgtcagtgctatatatgtgacatgattgtacatctcctatacttactctcccatttacattttttcaagaaatcatcttagggactacctcaaatcctgtgcttactaagaatggcacgtctagttctgtacaggatcgtaccacggcatcttacaagaatagtgatatatcttctgatgatcagtggatcaatatataaggctataaagagcctgctaatgttttcctcttactctggagatctgatagcataacatgagtcagcatagaggctctgagaaaatgagaaaataacagacctattgttttgttttgaggatcacttaagcaaatatgtaaaatcagatcacatagaataattccctgacctcagtgagtcttctttctaaactgcttcctgtctgcctcacccatctatttctgcagttccacccactgcagttttaaagtgactttggatagctgggtgaaaaggaagagggcaatacattaagactcagttaatataatttgcataatgaaattgtcaaagtgttcttggcccaaaaaacttgtttataaatgaaagtgaaagggttgaatggataatttgaagagagtgccttttcggctctatatattcaatcataggatgtcttgccactgagtcagcaaaggtttttctccaacctactccattaaattttattttacgcattctttttttaatacatataagtatttaaaattttgaaatgtcttagttgtgcttcttaaatgtaaagtgcatgctatcccatttgatagcaatttctgcataagcctgtaggtgaataaaacaga

SEQ ID NO: 115815 - DNA, 1042 bp, Homo sapiens
gaaaggttaaataaaacagtaggaaaaacaaagatcaacgcctggaagacagaaaatataacctaggaaatacataatgcaaagggactcttagggcagtgttatgtcccttcatcagaataaattccaggtggacaaaagatttaaatttaaaaagtgaagtcatctatgtgaaaattcaataaggaaatatttgtgtactcttgaagcatagaggccttgttaagcatggcataaatgtcaaaaagcattttagtaaagcatatttatccatatgaaaatttaaaatgacaaatatagcaaaatgccttaatctgagaaaaatgatatgaaaaatgagaaatagtaattatagcattggttgtttattaaactggttaaacaatgattttttagtcatcaataatagaaataaaaacattgcaatagaaaaagcaggaaaggcagttctagtaagaagaaaggcatatagccaataagcactatgaacgatgtccatccaccctaactactaaagaaattatgcaaataaataacataatgaaatactttttacctgtcatattcgtaaaaatttaaaattaaacaatacctattttcatggaaacacatactcaaaaaacagtggtagtaacttaaattggcacatttttaaaggaatttattctaaggagaaatttatatataagtcaagaaaattaactgtagctttgtctataataataaaaataaatagaagcatcttattgaacaaatgtttatcattagggaattagtcaaataaacaccagaataccagctctggatggtgagaatccaagtgatttttatttctctgtatgtttctataatcattaatttatatgaaaattaccatatttgtttcagaaaagatagtttcttgcaatttaaaaaagattttcaaatggaagcttgtgaagaagccactaagggaattggatttttttttttttttttttgagacgaagtttcacttttgttgcccaggctggagtgtagtggcatgatcttggctcactgc

SEQ ID NO: 115816 - DNA, 1038 bp, Homo sapiens
gtgttgctagcaatccttggcgtttcttggcttatagatgcacccactccagtctgtgcctttgccatcacatggcactctccctctgtgtgcacatgtgtgtgcctcttctcttcctctaaggatgtcaattgtattggattaagccccctacaccccctccaaagacctcatcttaacttgattacatctgcaaaagaccgtatttccaaataagatcacattcacaggttctggaggttagaacttcaacctatatttttgggagacacaattcaatttgtaagtctctctctctttttttttaaaaatgaaattcagataaatttaaccactttaattcagtaaattaaccataaaatgaacaactcagtgtcattaagtatattcacaatgttatgcaataactatctctgtttctaaagtatttttattaccccaaaaggaaagctcatattcattaagcagttattcttcattacctgcttctccggctgctggcaacctagtctactttttgtttctatgaatttccctattctggatattttatgtaaatggaatcatacaatatagacctttgtgtctggcttctttcacttagcatgttttcaaggttcattcacattttaacatgtatcagtactttatttctttttacagtggaataatattcctttgtatgtatatactacattttatttattcactcatctgttgatggatgcttgggttgtttctatctttgggctattgtgtatagtgctgctacgaacatgcatgtacatgtacttgagaacctatttttagttcttttgggtatctacctaggaatagaatttttgggtcctacagtaattctgtctttagctgttttaggaactgccaaactattttccatagtggccagctgcaccattttacttttgctccagcagtgtacaagtctttccacattctcaaccaatacttttccatttttctagtcatagctctcctaattggtatggagtaatatctcactgtggttttcatttg

SEQ ID NO: 115817 - DNA, 1092 bp, Homo sapiens
tccccacctaagaaacaaagttagctttcaactctggacagaatttaggtttgaaaccaaggaggggaattgttgaggctgatcttggtgcacatgtttgttgggtttgggagtcactgggagaggagtttttaatgcctctaaaaatcattcttctctctgtattttcatttctaagtattacctttctttgcaaatagtaattgtttgggctctacttgcagatctttttggccaagtattctgcagtgattcacataagttccctgaacatttatttggaaggcagcatctgagagcatactttttttttttcttaatgacctctatatcttattactgcaaggcagcacagattctttttaatttgttttgatatctgaatctttggcagtcataaatttgattttgactgcaggcattttttactttggacaaaatgtatttctggagaaccaccaactaaggtgtactttttgagggtaatggttatatcttatttgattttatattcccagaacttagctgtgcttggaacatagctgagcctcaataaatatttgttgaatgaatgatggaatgaagtctatgagcaaattaatgccatttaaaatcctgactgtgtatacattgtctttctctgttcatacattgtttgaacttatttaatgagcaaataaggataaatttttaggtggtttcaaattaattacatagatgaacttagagtatcatatttgttgaatgaacaatggactgaagtctataagcaaattaataccatttaaaatcctgactgtgtatacattgtctttctctgttcatatgttatatgaacttatttaatgagcaaataaggataaatttttaggcggtttcaaattaattacatggttgaacttagaatatcagtccagagaagtcatgtggttagcagtaagcactagattggaattggaagactccgtatagttatgccaaaatgaatatagtctgattcttgtcagattctttagcattgctgacctcagttttcttatctttaaaataaacatataaagttgtgtaggaatcactcacctcatacatgta

SEQ ID NO: 115818 - DNA, 3446 bp, Homo sapiens
actggccacagacctttggagaaagaacaattgccaaaacatacccattgggtcttcctggtgtattggcactagttggaaaattttagaccagatgacctctgaagtcctgccaacttccggaatctgaaattgcaacctggatagactaagtgagtcccttggagccatgtgacaagtccaagctccagctgtggatgaggcctgacttcaagttcagaagctcatcagctagcccagtgtatctctttgtgtcagttttttttcctaagcagtttcagtaatataccaaaagatacagactcaatgaacattttgaaacctcctaacagtgtgacatagaattaattaaacctagaaaaaaattaacataaaaagaaattcaacaatgaaaatgtattatcttgtgggggaggtactaaaaagaccctgaaggagtcaggatgggaagaaagaggtgactggggtcttaggaccagtttagtccccactttgatctgtagctttgaactagttagtgaactctctggacatcagctttctagatgagcagatcatcttggatgcctcccaaggcacttcccatagctaaaacataatgtttcttaatgtcactgataagattttatcaccagatgcctcagactttgaaagcatgtagctctggctttttgtttagtttctcacgcagaattttattcactttaaaattgaagttccagccgccttaactatgaatatcaagagaaaaactaatagatgtaaaagtaaacaacagaaagggtagaagatctcttattctcttctggatttaggtgacagacttcatttactatcttgtttgtgaatatatttagtaaattttgtggtatgagaagttgggtatccactcttatttatcctctaggtaactaatttttatacatatgtacttgcctttttcctgcaaggcccacaaaccacatgtttttgatgccttgtatatacatgagatttaaaaggagaaggctaaagtaaatctgttctaatagctacagaaccatttgtaaattaaaccttaaactcctaaaatttcacataagaatatgtatccaagttcttttttttctacagtataaaccccttttattgaaaaatatttctcctgcctatttttataattgtaaagtcaaattaaggtaccaggaattatagctacagggcaatgagaaaggcataactaaaatatagttttatatttattatataaaccctacttcagtagggttttaagtgtaacgcagtttgatttgaaaataattaagagatcgtttcagaaactggtataatatttaagggagagctgagtagataaacagaagcttcaaggagagatttatgggaacagaagtttcagttgattgcatcatggtttttgaggccaaaggcaaataaattcctgagtatttccagatgctgtgtgtctaggcaagaggacatctgaggagctagaagtatttgatgtgaattctgtttagtggtctaggctgctttcattttcatgatagatttccaggtatgtttgttttgaacaggcagattttacattttgaggtctattctgtttttttaatagcaatgctgattttaagacaaatagtatcaccattttatacctagtaataggcaaagctgggacttaaaactaggtcttccaacaccagatcattacagcacatgaacagtgtattcattatgcactggctgttacatagttcagtgatggacactaccaagaggtgaaactcaatcattagtcttcattggtaaaaatcttggcagagttttgataagtcaaacactgaaattatgtgttcaagtgagaactttgtgcatctcatacgtatagattagtatagtcctccatttgctgaataatagcaggtaataacagacttacacacttacacagtgctttcagactccagttggaatggactactgttctctgaatgtgccttctactttcatatcttgcctatgctcttccctccccactgtctctttctaacagaatacagcctgtgttttaaggcctgtcccaaattctgctacactcataaacttaccctgattttcacggttgaatgtgatctctctgacccatctataaaattttgttttacctattcaggggtgcttacttattttgttttgtcttctgtcaaaaatatttctttctttctctttacctgagacacagtatagtatagtagacaagagtatggacttgagccagagtgcctggatttgaatgtcgaatgtgccatccatttcctccctcataaaatgagtgttaaaatagtgcctgtgctttagggtatttatgagactccaagaaattgataacgttataatgcccttagaacagtcttgggacaaagaaggtcagtgctcaataaaatttagctttaatgttgactatactagattgtaacatcgggagaagcaaggagtatttatttcccatacttctctcttatgggaaaatgtatttgatttctggtttaggtttccctaaccatccgcaccacccctgccccaagggcatcaaggtgtaagggccatcaaggctcaggaatgtggagaagtagatgcttaggaacactagtagttcaacacacatttagaaaggatatcacattttgggggaagcttcctgaccctaaaagacagcaaatcaaatctgtcatacgtgtacccgtattgctaagcttacagccacaaaccagaagggggcaacagatctgcttactatctgtgaagaagggagaagaagcctcaagaaaatgattcccagttaggaaaaaactgcaccataactgatctctgataagatgttattgaatcaataatcaaaatacagattagacacaaaaagagaggtctgttctgtgggctgggagcatgtaagcaattgaaatagaaattgtggaactgcttccagagattttagttttgatatctggcatgcacaagagcagctcagaatggctaaagttgtttaatgttgtcagcattccccacttttattttattggtttttttagaagctgtgcaagagtttctatttgtagagctgattcttatatagaaaactgggctgctgtgcagccttgcaggttagaatgaaatatacatttttttcatatttttaaaatcatttcttgtttatggaaaaagtaattacatattctttttttaaaaaaaatacttataaaggaaaaatcacttgtttttagtgtgtttcttgccagtcttttaagtatatctttccattttatttgttttaaactattaaacagtaagtgtcacatttcatctataaattcagtgcaattccaaccaaaatctcagcagaaatttttggggaacctgagaagatgaccctgaaattcaagtgaaag

SEQ ID NO: 115819 - DNA, 2182 bp, Homo sapiens
agtcttaaaattaggtagtgtaagcccttcaacttttgcatgttctttttcaaaattattttggctagtgtcggtcctttccattccgtatcaattttagaatcacctcttgtatatgtgtgtgtgtatacacacatacatatttaggtatatacacacacgcacatgcattattaatatagagacattaggaacaatatcaattcaagaaatacatattgaatgtatagtatatatttaggaactaacaaagaagattataaggaatatgagggaagagactgattttgcaaaagtcattctttttccattgcgggaaaatttaaactgccctaacaggatttgagatggaaataaatgaggacggattcgtgtctgtaagacaaatgattttcagctctgtttatacgggaaattttaaagccagtagaggctttgagagtattttttaatgcactaaaactgtggtatattcaaaggaaggatattatataatcccaacaataaaaaaatattacaactaggtgcagtggctcatgcctgtaatctcaacactttggttgactgaggtggaaagatcccttgaagtcaggagtttgagatcagcctgagcaacatagtgagactccgtttctacaaaaatgtttttaaagattagctggtcatggtggtgtgtgcctatagtcctagcaactcaggaagctaaggctgggccttgttgtcctaactacttaggaggctgattccagaagttcaaggctacaatgagctatgatcgagccactgcactccagcctgagtactagagcaagaccctgtccccctcccaaaaaaagattattagatggttgaagatcattagatacgtgaaacaattcaaaatcaacacaaatccaggatatgataagtagataaatttactgaatttatgtaacaaaatgtaagttttagagaaaacatgttttgagcaggctagaagaaggattgatgttgttatcagcaaacatttataaaagaggtagaacttaagatagccttgaaggttagatgagtagaggaaacaggagcaagtgttcaagatggaacaaatcgtacagctggagttagaaggaggaagtgagaactagctttatggaaactgccttaaccagagagatcagggtttgttggggaataatgagaaataaggaaggcagattagagagggaatagaatgttggcaggagagaagggagggttcaaaatctgtcattatcatacattgctagtggatatataaatcggtacaacttgtatagatagaactttggcagcatctgtcaaaattataagtacaataccctctggcccaataattccacctctaggaatttaacctcctgatacactcatattcatgccaaaaatgtccattgcaaaaagtaaaagattacgtccatcaatagaagcctgtttaattattctacagctgtacagtggaatactgtgcagtgattgaaaagaatgaggaagctttatttgtatttcctattgaataaattgtgaaatgtattaagtgaaaaaaacaagagtaggacttagtgtgtgatgtagccactgtggtttatgtgtaatatgtatacatgtgctttgatgcttatgtgtatatatgtatgtgtgtacataaaatatctctggaatgatacacacaaaaactggtaacattggtttcttttagggaagaaacctggatgacttctcattgaattgtctcttgtaacttttgaattttatatcatgggtgtatattacttattcaaaaaatacatatttttcatttcttcccttcccttccctccccccttctctttttccatctctctctctcacacacacacacagaaggaaattaaccaaattttttttttttttttaatttaaagacagggtctcactctgttgcccaggctggcatgcagtggcaggatcttagctcactgtaccctcaacttcccaggctcaggcaattgtcctacctcagcctcccaggtagctaggactttaggcgtatgccaccatgcctggcctttttggtggtgtttttttttttttttttagagatggggtctcacaatgttgcccaggctggtcttgaactcctggactcaagcaatccacctgcctcggcctcccaaagtgctgg

SEQ ID NO: 115820 - DNA, 1045 bp, Homo sapiens
gaggcggagcttgcagtgagccgagatcatgccattgcactccagcctgggcgacagagcaagactccatctcaaaaaaaaaaaaaaagaattcttgccctccactgcttcagactctacttctcttcccactggtcttattatttcatctggagcctcatcataggaagagtgaaccttcaaggtatttttttggctttggcttaagcattccacctagctttcccagaatgatctcataccttagatggttattccattttattcctctggtgtgctaactatgtacctctgcagactccagtcctgagtccctaggagtatgtgctgctgcagacatccatgcacaagtctttgtatagatgcgtgctttcatttctgtgggataaatagctaggggtagaatgattggagcatatggtaagtaaatgtttaactttttaagaaactaccaaattgttttctgaagtgattataccatttatagtcccaacagcagttccgcttcctccacatttgtgccaacacatttagccataccaacatgtgtttagtggtatcttattgtggctttaattatttgcccaatgagtaatgatatttcctttggtaaagtgttcgaatcttttgtcaattttttttgtttgtttgtttgttttttattgagatggagtctctgtcatgcaggctggagtgcggtagcacgatcttggctcactgcagcctccacctcccaagttcaagcaattctcctgcctcagcctcccaagtagctgggattacaggcagttgccaccacgcctggctaatttttgtgtttttgtagagatagggtttcaccatgttggcaaggccggtcttgaactcctgacctcaggtgatctgcctacctcggcctcccaaagtgctgggattacaggcatgagccaccatacccaacctgtttttattttttatgtaagtccaatttatcaactttttttttttaatggattgtgcttttggtgttctctaaggtaggggtcaccaacctttttggcaccag

SEQ ID NO: 115821 - DNA, 1002 bp, Homo sapiens
gtgtctttcttgccaataaaaatcattgattttttcatatcacattacatttgttacagatatcactgcttagaaattatgttagtaattaaacctaccgctagctagtgttatttcatgcattaataaagcagcacatatgttaccatatcccaaagatttcttaatatcttgataattgtatttcaatataattggtttctgttgtaagaaactaattctgagaagccttcatcagactgccagagggttcaagacaaaaaattgttaggaaccctgctgtgagatcttgtttgaaaaataggttcttttgcttagacttatttttatttcttcccttaggttttttgggttttaaatactctgggtctttgttttctcttcttacaaagaagactttcttagtttagaccttaccaagtaagacaagcatataattgatgggttttctgtcttcacaatgaaaatttagatacagccagtctcccaagtttccctacagcaccggaaaaaaggtgtggtgaggagtgagaagatttggacaggccctgagatgctacctgtcaggagaccagcgctggcagggtgctagacaggagcatttccgctttattttgatatcaccatcacccagtccttggtgaggtaagaagtcatgctctttcccagtggtagcagcaaaggttctgtgacgcagaaaagagaggtaacagaacagctcagctaacagctgctgacaggaaatgtctgttcagtgggcataaaaagactgcatttattttttatatttgtttaaaagaatttttatatcccatgttaattttaaaaacagttaggcaaaatactttctttttctgggcaaaggattaatttctacttcctatccacacgccctcttgttaatatttggaagagaaaagggttcctacctttgctttactataaacttagagcattcctaagaattagatttgcatctttattttactgatgcagagacta

SEQ ID NO: 115822 - DNA, 3041 bp, Homo sapiens
accctgttgatggtttttagtttaattagggtcccacttgtcaatttttgtttttgttgcaattgcttttgaggacttagtcataaattctttctgaaggccgatgtccagaatagcatctcctaggttttcaaattgatccatttttttaaaagctaaatacatggtaaaaagtttttttaaaataattctcaacccaattaaatcatttttaaaatgttttaaagaatattcttttttcctctttaatttatataaaaataatttctaaaaagcaagaaagaacgtttcttttaatacttcatgttggcagccatctggcaagaattgtaaaaaaatatgtatctttaacaaggttttttttctttttttgtcttcacagctgatcttgcatctttaatggataaaacatttgagagaaagttgcctgttagttctttaacaatatcacgggtaagaaaattttaacatatatattttccaagaacaaggaagaaagccagaaaggcccttcatgtagatgaggctgtgtaaataaaaaatagtttgcataggaaatatttttgagagtatggtaagtttttatagttactaatagatattttatactgtaatagcaaatttctttggctgaaataaaagttaatacatttaccagattctgatatcagtaatcagttttgtgtatctgatttattttttccaggatatgacattctgctgtatgataccatcagtttttttaagttgatacatccttcaaagtaatgatatttacccgttagtattggaagtgtttttggtagccaagaaagtctgtaaaagaatggatattaatgttaaagttaaactgcagcagagtgatgggtggaagaataatgttaggttaggaatcaggaatagtaaccattactgagcaccttctatgccagttttgaatgtattagttccttaacatacattatttttttaattctcactgctccctatgcaataaacagtctatgtaagacatggtttaataactttcccaagttcacacagcttgtaagcgtggaaaaactgagattcaaacccagatatctaggttctcttctgttgcctgcttcaaatatatctgggcttgtctttaacatgaattcacttcatgacattgggcaatgagatccctctcaattttctcattttcagcatgggtacggttgcatcttcctcccagggaataatgggatgctaaaatgagattttagctgtgaaaactttttacagaaattaatggcaccataaaatttaaaatattgttaaatatggaagagagagaggaaagaaattacctttcttttgaatcctggtcctttctttctgccttttagttgagaaataattttactgttcgtaagttacatttaatagactcataattggcatattggaggagaatggaaaggccatttttcgtcccttacatgatgggtaaaacttctgtatgccataatacctggtatttatttaggtagtacttcaaggtttacagtttttatgtacattttctcattggtgccttatactcttcgaggccagtgcctttatcctatttatgcagatggagcaaccaagtcccagaggggctatgccatctgtttatgccatacagcaaacaatcagagctgtttctcaagctcaggttctgtgtttgaaccacattttatatgcccttaatggatttctaagtcaagtccagaagtgctaggcatttttagaaagtctccctctttttactctcctctctttcttttatgaggttttcattatattcacaacatgcattgtcttctacgctttttttttcttttttgcctctgagtctctattttagaatagaatctgtgtttggaataatcctttttatttgtttatttggaccatagttaatgagcatactcagagattttatggtttgaagggagagtttgttggtaaaggaatcataggtttactgttgcatagcagagctaaatcaaagtagaaaaaatcgttgcaagactgagttctctaaatttagatgtttatgttctgggcaatagttttttagccatcagagtcttcattttttcagccatatgttcccatgtttggaacataaagaaaataatatcagggtttaaagataaaggaaaaaataggtaactagttataatcagtggaacactctccttgttctgagcaaggttcatgtttggctttcaatccgttttctgatcaaggttattctacacatagaaaaagagaagccattgtatattctttgtttgcattagcataaaggggtttcaaggatggagccataccacgtgaacattgttccactaagcatcaccatcgttccaataaaatgggtgtcctgtgttttctaaggtcaatgtgtgatctaggccctaggccaaatatatgacataatttatattcaaccaaaggtttctttttctgtcttttagcttatagacaacatttcctctcgggaagagatagatcatgcagagtattacctttacaagtaagttttccatttgatttggctatgtactctgtgatttcacaccccttttttacataaaagttggtatatgttgtgtataattttgacaccttctaagtttatattttaaagatcttttcatatgagtatagagagagtttctgattttttataactgcattttattccatactgtgagtttattatttaaaccagttccctttttatggacctctaggttgttctcttttttgtattgtatacgatgttataattgataaccttgtacgtatgtaatttttcacctaattttcatgagtatatatatttatagttttaatcgctattgacaaattgctttctgttgaagtttttacattcccactagcaaggtatgagagacatgtatttttacagcttggccaatagttaggtattttcacatgtttgcatttttttgccaatctgataggtgaaaatttatacacacacacacaaacacaca

SEQ ID NO: 115823 - DNA, 1061 bp, Homo sapiens
cggcctcttaaggtttattaaggaggattaaggagtacaagatgtaacgtcatctctttgatgacttgagactttttagactggaagttgcttagaaatatttaatagactaaatcctcttagatctaacaggtgacacaaggaatgaaaatgagaacaataatgtttctatttactggcagttaccgaatgacaaatgctttacatatatcatctcaggtaaccctgtgaggaaggtaccacgatccttaatttacacatgaggaatcaagtctcagagcaagggtctccatcagaatgcaagtggccgagcttagatttcagcccaggtccttccatctctagagcctttaactgttacatggttctgcaaataaaaattggaagagccactgcattatctcaaacctagtaggtcttttcttttaaattgagaacagtgcctctgcttctagttcttgtgttttagatgtatttgtgcctctcctttcagcagcattccttcaaagctctgggttcttggaacaaatcctatagctatttcctggcagcttctgatactgacaacagttctgccttctggaaagcagatgcttggttggtgcctgctttgcttttcaccccgcattttggtgggaataaagccccttattgatgacaagaagaggtgcctccttttggtttttgtccccacggttgatcagatacaaagacaagggagaatgatagactgtgatgacactgaaatgattctgtcactgaaaaactgtttgctgctgtttggaggactgttttcccccctgcccattacatagtactttggcatgccttctaacagctgagtaaaaagagaccaagaggaatgaaaaagaggtgaagttgaatcaaatgaaagaaacgtgagtcatgtgggtccaccattgtggacaaacctaccttcaactcacattttctttttagttttcccatttggttctctgccagttgacggtttgggtgtctggctacattttctttctttttctcatgagtcacctagagattcagttatttgagccaag

SEQ ID NO: 115824 - DNA, 1052 bp, Homo sapiens
gaaacccagagatctcttgctatacctctcagcatgacagccaagagagtggacagcattttaacttttttctttttttttttttctttttgagacggagtctcgccctgtcacccaggctggagtgcagtggcgtgatctcggcttactgcagcctccacctcctgggttcaagcaattctctgcctcagcctcctgagtagctgggattacaggtgcccaccaccatgcccagctaatttttgtatttttagtagagacggggtttcaccatgttggccaggctggtcttgaacttctgacctcgtgatccacctgccttgggctcccaaagtgctgagattataggcgtgagccaccacgcccggccaacttttcaaaaataaaacctgggtatataaaatatattagagaattcagaaggccaaatgagtaaagcatgcagaataataagacctggctagataagagacagtaaaagtacctcctcaataaatagttttaacttttaaccaaactgtattgttcttcttcgttagcatttacgaggtttcttctcagactccacatcattcaatattttgatggatatgttatttatcaaaggcaaatataaaagtaagtactgcaatttctatttgctgaaaaattctgccatgtttgctggcataggaactagggggaaaaatgagtcatgcaaaaatgattcttctgtaatcccagcactttgggaggctgaggcgggtggatcatgaggtcaggagatcgagaccatcctggctaacaaggtgaaaccccgtctctactaaaaatacaaaaaattagccgggcgcggtggcgggcgcctgtagtcccagctactcgggaggctgaggcaggagaatggcgtgaacccgggaagcggagcttgcagtgagccgagattgcgccactgcagtccgcagtccggcctgggcgacagagcgagactccgtctcaaaaaaaaaaaaaaaaaaatgattcttatatccctgataagtggctgaattctggagaccttaggaagtttgaaa

SEQ ID NO: 115825 - DNA, 1241 bp, Homo sapiens
cctctcctgagatttcctattccagagcctaaaaaatatgaaatgctttacatgtttcctatgtagtaaaaggaaattttacagcagaaaaatagtaaccaagccaggttattttcctggctggtaaaatatagctggagaactcttattattaattagaaatcaaaacgtgagggtgatgcatttccatatactgctggggggagtcattgaaggacaagccaagaggttatacacttcccagccttctgctgggccaagatcatttctttaactttctaagcttctcttgctgtgcaggggaattattttgtcttcttagtcagtcatgaggtgagtgaggtgaattaaagtgtctttgaaggcatgtgtttttctttctttgtatagctcctgtagtttttctttatttatgtctaagttacactgtttggtgcacagatacatcatcactgttacatcgtcattgtgaatccctcactttagcattataaagtgcctatctaggtcatgtttactgcttttgccctgagttcaaccttatctaatattagtatctccacccctctttttgcttgtttttctctttgttttgatcaggtttgcatttgaccaatatacagcttttcctatgctttatttttgcaatctttctgaattgttttgttttagctttgtctcttatatactgcataaatttctgtgttgctttataatatgatgctaatcttttaatataatccatttgtattaatgtgacatatatttgatcttgggtctcgtttgatgctttctgtttctataactttttctactctcttatgccatgtggttattttctctagttggtatttttgctctagtggtgactttaaaaccatagttttgattttcttaattatttaattcttttgacaagacctgttaattccctaatataagtaatggtgaaattactatatttcctctgtttttcatcttattttcttcctcccccatccaatacccaattttagctggtattttattttgatagtgttcactttactcttaaatgtacttgatttgtcagtttgaagtgatattttttggcctgctgataataaagataaggaaatgggaatgccttttctacctttcatctctttcccttctctttctttcattagtattaacattgcttcattgtccaggcatataacatttacactctgtactatagccatactcccaacttttga

SEQ ID NO: 115826 - DNA, 1038 bp, Homo sapiens
ggaaaatagcttgtgcccaggagtttgaggctgcagtgagccatgattccaccactaccctccagcctgggtgacagagcaagactctgtctctaaaaaataaaaattctggccaggtgcagtggctaacacctgtaatcccagcactttgggaggctgaggcgggcagatcatgaggtcaggagatcgagaccatcctgactaacacggtaaaaccctgtctctactgaaaatacaaaaaaaaattatccaggcatggtggcgggctcctgtagtcccagctactctggaggctgaggcaggagaatggcgtgaacctgggaggctgagcttgcagtgagctgagattatgccactgcactccagcctgggcaacagagcgagactccgtctaaaaaaaataataataaaataaaataaataaataaaaataaaaattcaaaaataaaagaaaaacgtgtttcttttagaccggtcatttgtagattcatgtcagagaaagagagaacaacagagcgggacaccagagcactgttctagactagcaggatttttcttcatataacccagagttttgtctacaagtatgcacaggcctcatttcttttaagtcaacagaagtaggcactgaggtggtttttggtacgcagtctcttctctgctgctgctgtcttaggaacatactgtttcctatgagtatgtcttgcctatggaaacgcttgactagcctcatctctgccaccacaggatccacggaagttctctttactagtcctgcgctctgttctcatcattgtaaataggaatttaggttttgtacttcaggttgtgcccttacctttgagagctgtactgttgtagattctttgtgagatatagagcactgtctgcctctgactgctttctcctgaaccctgccagcctccatttccaatgtttctggcagtgtttccagctgtgctgtggcttgaggtttctatgttctaattatgtatgtcaaagacaggctttgcactttgttcttcattcctatttttt

SEQ ID NO: 115827 - DNA, 1035 bp, Homo sapiens
aatcccttgtgatgactttaatactttttcagcctttgtgtagctactggttttcacatttaagacaggaaatcttcatttagtgatcttaaaagtgttggtatggaccccaccaatggccacactctaggaaactatggaagctgtgactggtgtttttgttccttttctgtttattcagatccatccctttgctttttcttccagatagaatcgtccagaggaaatgcctttttacagtcacaactctaaaaagttcagtctttattcaatatttcttcagagctgctatgtgttgaatgctagcactgagatagacgctagtgagcaaggagaaaacaagacaaatgggatccccatgttcctgacatgtacaaggatttgtgtgtgtgtatggtgtgtgtgtgtgtgtgtgtgtgtgtgtgtgtgtgtttagatggcacggccttgaaacaggaaagcagaaaaataagtgaaatgattatcagactatgtattgtgataagagctataaagtagacaaagggctgagatagaggaaatggcagagcaatgatgtgtccatctgggtgtggggaggtgattatggcttggatctgttttcccacccaaatctcaggttgaattgtaatccccagtgctggaggtggggcctggtgggaggtgactggaccatgggggtggatttctcatgaatgatctagcaccatccccttggtactgtccttataatagtgagttcttatgaaatctggtggtttacaaacgtgtggcacctccttcccccccacatcctgccctcgccatgtgataatgcctgcttttccttcaccttccaccatgattgtaagtttcctgaggcttccccagaagccaagcagatggcagcatcatgcttcctgtactgtctgcagagccctaagccaatttcacctctttttctgtataaattgcccactcttaggcattcctttatagcaatgtgagagcagattaatataggagaggtgcaaggtgagtgggttgcttttgagt

SEQ ID NO: 115828 - DNA, 1064 bp, Homo sapiens
aagtcatcagctaaattaagacgctgacagctcacataacaagatgcaaagcaatagtaattaagaaaaataatcacctctgctgctgagaggatacgtttggccccaggtgaagtagctcccaaggcatctgctttctaaaaggaaagtcttgctgttttgttctgctgtgaaggggtgaggggcaagagatccttttctgtattgcagcattcaccacatactctaaaggagagcattatctttgggaaataatcttatgtggggcagaaaaacagatttgcagaattacccaagatctcttatagccctagtgtggcaaacattgtgaactggccccactggcacacacaactcctttctccctgctttcctctaatggagaagtaagaagatgaaaacattcacctcttagactccttcgccaggagtagtggtcatgtgacccagttctcgtcaatgagatgggcgtgggagttgctgggtagagcttctaggaaagcttttaaaacggacagatgagactggatgcccattctgccttttgcattcttgtctttctcccttcttcctgcttggaacataaacaggaagtcagaaggagactgggttgcctgctcctcactgcctgctcactggagggaagagctgtatctgctgaagccattttcagcatggggtttattgtttgaagtcaaatacaagcctaactttaggacttttcagttcagaggataattcctcagcagtgctgtgggctttagtagaagtaaaaccacaaccaaaaacaacaacagtattgtatctgtctgcgtaccaatttccattagtaatttttaggcaatgacatgaattttttggagaactgaaagccagccctgtgaatgcaatgcaggcgtgcttgtcatcgggtcctttactctcttaatctggtgacaattctcttctctgaagataacttgcgaccaattccaggggatgtgtttgagaagcaggattgtattttccttgctggctccttggaatagtgcatctgttttagctatcttgagatttagaattta

SEQ ID NO: 115829 - DNA, 1922 bp, Homo sapiens
ccgttacaaggggcgggaagggaagggtcttacattcaggggagcgtttgcctcgcctgttaagctgtggcgtttgagggcccttgagtgctgcagtcggctgccccgggacggctgcctttcactggttctgggcgctggccggcgctgcccgagatgggccagtctttgtcccgccctgggcccctctgcccgggtctcctgcgtccgcacacagcgcccatcgtccttacatgcagcttgccgttctcttcctcccggcggttctttctccttggggcctcttggcctcacgacatgtttacataatgtttgtgactgtacgagttttgcgtgggcttgtgggttttgcccttctacctccactcccatgcgtacaagcaacagggaacagctgctgaggagcagattggccaccacaatcaagctattttcggaatgactttctttaaaaatgatcgcgtgttgcttactgattttaaaaatcaactggattttgcaaggattgcttagagtttaagtctgttatcttaatcgctaatcaggatggtctatcagtagatgtaaatgtagaaatttgaaattggaggctatctacaaattgattttgacagctgtattaagaagcttaataactgtcctttgaaacagtaatgacttaaatgatgaatgtgtaagtggtactttttttaccctaaagaaaagatacttttaaaattgcaagatgtatggtgtaataggtgtttggaaatgaaggttgtaaaatggctgtcctgacgtactactcacttttagaataacaaaagttcctgcagctttttaagtttccctgttatatcaaagctttcatgttagagtggtgaagaagctatgtttagtggaaaaggggaaagttccgttttttgggaaaggatctgttttccactttcaccttacctggcaccgtagttgttcctagagaaggctgtgccaggatgaaaattagcaaccacaaaagggaaacaatagtttgtaggtgcagatatcttttttagtctctagctatgcagtgcataaatttatactagcttggcagtacgatttttacttcatgcaatttaacgtgagcctaatgaagtactagtgttctgttttctttttcctaaaaggggccgccacccttgatgtggctgcatctttctcctagtcaggaattattaaattcctcccactgaaatatctataaaaatcttgtttgcacttctacctcaactctcagtggctttattaccattatataatgtgagcagaataagatttttgtaaaaatacatgattctagttgtaagcttttccaatatcaacatttcttattgtattcattgtttttatgactgtagttttgcttatttataattttaaagccattccatgaactcagtttttctaaatgttgtaaatgagctactacattgaaatgtaaacatctgtatttagaagaatttcttgaattttaaccatgttggattctgcaaatgtttttttaagaaaagaaacctggttataaagtgacgtcaaaccaagtgacataggtaatgaaataaatgaatttatcaaatataaactgcagagaggagcacagcagtaagtgggggagttctttttattggccagggtataaattgtgatattttttcctgagattgatatttgaatacatattggtgctaaaaagatatcttcccccctcaaaacagtttggtttaccagcaaaaggatgagaaagctgagagaatcaaagaaactgatgaggttttcaaaaacaatggcgaacaatgccatcctcaaagaggaaggatcagaaacagtgaaattcccctggaggttgaggatttttcttagttgaccctattcagccattgccatggtaaatctgttgagtg

SEQ ID NO: 115830 - DNA, 1038 bp, Homo sapiens
actacacagtattgttcctgttgctttgggattggaggaatagagagtggattaacgttttccttgtaatgtactagacatcatttgtaggcatttaacatacattgtcactttcatgtacatttttctcatttattatgttggctctgtgttatacatggaagttacttctattttactgatgagaaaacaaagtgtaaataggtaagtactttgtccaagggctcagagcgttcgagcctgaatctgaatctagatctgcttgactgcaaagctcatcatgctgttttatttgtatacttttatatcatatacatattcagaattttatactataactaactatagatcacagaccacatttttaagatagctaaactgagctgggaataatgaatgggtaagttgcaaagttaaacaagacagggcttaactttccacattttagaaaaagaaaatctttacctggatgagatataattggtaacaactatataaaaccgggttctaaagtgaatgcaccaaatatctgtgggtgcaattcttaatgatcttaacacaaataggtgagagaaaaccaaagaaatctcaaatttgattaaatttggggaataagagaaatgaaaaggcccgtaagtgctaaaattgaaatatacgtttagtaaaactcctggtaaagtaaatgaaggttttactggggaaacaagcaaaaaaatatgtgtttcacataaggagaatagaactgcctacaaggtgtaggaagttaaatttatactgaaaattagagaaaaattcatatttgagttgcattttatagatgactccgaagccattagtaaaataatttattagtggagcccctttatcctagatgcatatgtttctaccacaaatgaaaaagttaatgctaggaaggataagattccaccacttttgtttttactaagaaaggaattaaggaagagaagtatttcagcaaatcatgaatatactaaataaatgcaaataaattattaggaataggtggtatccaacaag

SEQ ID NO: 115831 - DNA, 1063 bp, Homo sapiens
ataccatctctaccactgtagtgcaaaaacagttatgaaaccaatggtatggccagatttgactaaggtcttaattagacaaactctaatatatagtagagagggatgttgaagagagagaacctactgagccttatgtcaccctatcatgagccattgaaagatatgaaacgaatctagaagattgatttgtatgaatcattaagagcagaataaaatagatttttaaagcactctacatcgatttaaaagggaaaacaactcagttttttaagtgggcaagttccacagaagaggaaatatggctagcaggtaaacatggaataatgatttacctcaccagcagaaaaatgcaaagtaaagcagtgacttttttttttttctcattatactggccaaagagaaaaaagttttgttagtatgtattgagaaggttgtagggataacattgaatatatcggtacggctattttaaagtaaaaatatctttgacccagcagtttccatttcttagagaaacacgtgagtatatcaggagtcatgtgtgctaggattagtccttgttagtaaccacagaaactccagacttcctgttcacattttgtctctggcattccattcataaaaagttctacactttttttttttttttttttggagatggagtctcgctctgttgcccaggctggagtgcagtggcatgatttcggctcactgcaacctctgcctcctgggttcaagcaattctcctgcctcagcctcccgagtagctggtactacaggcacacatcgccatgcccagctgattttttgtattttagtagagatggggtttcactgtgctgtgcaggcgtgtctccaacttctgacctcaggcaatccgcccaccttggcttcccaaagtgctgggattacaggtgtgagccactgcgcccggcctggcctgggtctacacttttttttttttttttttttttttggagacacagtctagctctcttgtccaggctggagtggggtctatgctttttcttaaacctcttctcaacttttcatacccttc

SEQ ID NO: 115832 - DNA, 1032 bp, Homo sapiens
accggactctcttccactgtgcagttgtggctgtttttgtttgtttgctccgtaactttcctcccactgtttctagaggtgggaaagatatctgtcatgagtcttcttacttctttcagactatgcttcctcctttctccctataatcttcagttttgaattatgtcataaaggcccactgtcccactctccagtctttatattgaaattgataagaatgtacataactgatccacccaaaccctggcctctcacttcctagacctctcttccagtgctcttcccatctatgctatatcagccactcattccacagtgataccctcgtgcactgtcaataactgcagtccctccatagttgccatttcatgtgttctgctctgttaccgcttcttcctatttttgcagctcactcctagtgcctcagccctaaccatcttctgaccccaatggaatctccaacccattgatcctattactgctcccctgccccttaccctcttgatgttttcactcccttttatgtggaatttactcatctaaatttcatgattaatcagtttaattacttctttggatccctttccttgctctttgcttgtttggcaaaaccagagctctagttaaaacaaactctggggttttttttgcacttgcccctatgtaactgagcatggccagaaaaaaaaccacacaaccacacatggccacaaaccttaagtgggtctgtaatgctgcctgatggttgtactgtattttcctagtctgcttactcttccactcctctaaatgactatttcatatcttattttccccaaaccttctatatctcttttcccatcctcaccttcagctcatgaccttgcttcccactttgctgagaaaattgaagtaatcagaacttccatagattgccaccactccacatacctctggcactctatttatgaaagggtctgcgcagcatctgctcagtacatggctgtcttcctgcctgttaccttagattaactgttcatattcttgtctgcc

SEQ ID NO: 115833 - DNA, 1391 bp, Homo sapiens
attctcatcctatgtgacctgtcagcagcatttgacacagctgtttgcttcccttagccttgaaaccatttcttctttgccttcgaggacgtcacacgttcctggttatctgctgtctcagtgctggtccttgtaattctccttttcctttattttcactgacctcttaatgttggagagccccaagtcttaattgtttgtttatttgtttctatctatgctcactttattggtaatctcatttagtctcatggcttgaaataccatgtaaatatcaacaatacccaaatttagatctttagccccctcctcaattccagtcttacatgtgcaactacctattcaacatctcccctaaatgtttaataatagacatcaaagtcagcatatccaaaactaaactcctaaactttctccccaatgcctgctttacccacagactctcccatttctgtcagtggcaactccgtcctcctgtagctcagaccaaaatcttggccttatttttttacttcactttttcttttactcttcagatctgttctttcaggacaatctgttttctgtatcgtcaaaatacatcgaaaatcctatcatgcctcactgcttcctccactgccaccacccttgtccaagccactaccatcacatcttgttggattactgaaataggttactacctggtctgccccttctgccctatccccttccaacagtattttctcaatacagtagccagaataaacctttcgcaaattaagacagtccctgtcacttctcctgcaatggctcctgttacgatctgaatgtatgtgtcctcccaaactgttgaaatcctaactcccaaggtattaggaaatgggagtggagtcctcatgaataggattggtgcccttaaaaagtcctagaggccaggtgcggtggcttatgtccgtaatcccagcactttgggaggctgaggtgggcggatcatgaggtcaggagatcgagaccatcctggctaaaaccgtgaaaccctgtctctactaaaaatacaaaaaattagccgggcgtggtggcacgtgcctgtagtcccagctactcgggaggctgaggcaggagaatcgcttgaacccaggaggcggaagttgcagtgagctgaggtcacgccactgcactccagcctgggtgacagggtgagactctgtctcaaaacaaaacaaaactctagagagatcccttgccctttgtctcttgaggacacagcaagaagtctgtgagctagaaagcagccctcaccagatactgaatatgccttgctcttggacttcccatcctacagaatggtaagcaatcaatttctgtcatttataagctatctcatttatggtattttgttatagcaacccgaa

SEQ ID NO: 115834 - DNA, 1092 bp, Homo sapiens
tttttgctgtatctgcaagatacagatacagagcctagaatgtagtagacacttagtaagtatttgttaaatgaattgttcgtgatggtgcaaaatggtaattatgttaaatgttcaccaatagacctatatatcacaatgagtaacaaaatctgtataatgactaggaaagttaaggcgtattttgaagtttgttacagaacaggcctaaaacactttttgtttctacagatacctgtgtatttaattccatagagaagaacgctacaaggatacataaccaaatgcatactaaagtacttctggggaggggaccgagattaagagagatagttgaaaggagcttgaatttcatatgtattgtttgcttttcttttttttagcaatgagaaacagtcacatgttaatgttttacattaagtttttttaatgaagagatgagaaaaaacaaatacatattaagaaaataaagcagtgagaggaaatggagagtaaagggtagggtagagagaaaaggaagaggacattgcctttcttaaatgtcgtatttggccagcagtcaatctgaaagaggggaaggagtgagcaatgtgaatatgggggaaagagcatgcaaaagtaaaggcccttaggtgggaacaaacttagcatgatctgggcactgtaagaaaaccagtgtgatgaacatagtgaaaaaggggacagagactactaggtgataagttcagagagatgggcaggcacccatgttaggtacagctttgcaggctgtgatgaggatataagatctgtgtgataggaaaccactggaagattttgatggggggaatacatgatttaattacagatttaataattacagatcatttttgctgctttgtctcagacaatgggttataagggaacaaaagaggaggcaagcaaatctgcctaaaccatggactagggtagacagcagagggggtgagaagtggtcaattcagagtatattttgatggtgtattttaagagtcttggctgatggttaggatttgggatatgaaggaaatcaagggaaataaggatcattgcttctgatctccataattggcc

SEQ ID NO: 115835 - DNA, 1886 bp, Homo sapiens
ttcaatcatttttcgttaattcaccatgtgtatgtaaaataatatacccaaaacagatctcttcaggtgtttcgcaggggttttgataaggacttgactttttattagcccttaagtcagtagtaatctggacggaattagagatgggttgggttggagaaaactgcgtggcactaggacccagggggctcccgtgagcggatcttggggccagattgcaaattcgcggtgactcagtctggtcggctccttgcgctcggcggccgcggcggcagcagcagcagacgctggcggccgggctgccaggagcagttccgccgggtttcactgtccgtgacttccttcggggcacctcaggcaggtccgcggcgtttggggagcgctggggttgtggtggcggggagaacgggtcagctgcgcgcgggaagcctctgggcctgtgcaccgggagtaacagttgctccgtctcttcctgtgtctggctttatttgcagcaaaccaagatggagtatgagtggaaacctgacgagcaagggcttcagcaaatcctgcagctgttgaaggagtcccagtccccagacaccaccatccagagaaccgtgcaacaagtatcctttccgaggcctggccgccacccgcgcagctcgccccgcgctgcggcccagcccccggcggccgggggctcccgtcgcctccgcctctgcccctcccccatcctccgagaccggcctcctccctgggtccgggcgcgggggaagccgccgctgcccctgccgggcgactcgcgcacgcggccctggtgcctgggccgggggcgccgccgcgtggggctcacgccgccaaggccaccggcttccggcgcgcaggaggcgggggcccccggccgccgcccgggatcgcgacatgtgcgcgggccgggccgccacgtccccgcccgccgctgacctgccgcgggggtagggagcgggcgggcgggagcggcccgggcccacacaatgcgccccgtgggtgggggtggcaggccgagcgggaggccgggtggagggcgctctgtgcgcggcggagctcgccgcctgactggccagaaatgggtggagctggcgcggggtttgaactgcagctgtgtgggtcttgggggtttttccacgtccttgccctaaaaaggctggggacctacaggtgggggaaaggggtctctgtgcctcaccctggggttactggtgttaacacctgttgcgaactccttgtcacccaagtgagattttctttttaaagctttggctcaaggctgactgcacaattatgtaggtctttaccgagtgtgctggtgtagtgatcctgttgctacggttttagagacaggaaaggttaagagaaccaaaactctaccacgtatgctttctgtagtgccctaaaccgtgctcaaatggagagctcttactggatgcagtaaaggaaacattcactctatatcatgaataaccttttaacccccgttttaagcctaaagaagttagttaagtctactattttttgcagaaaagcctcttgatttttattgtcaaaaagcagcaaaattacttaatatggagtttggtaagtaagctcttcgtgtttgagtttatttacatttaaaacatctgtaaagatgaagttatttaccccgagggtttcgcagaaatactgcattgccgtaatttaaaaccttcaatagatgacaaaattagtacttaccttcttggttaatgtagtacttcccatttaaaagtggaagggataatgatttagatctgcttggattttttaaagccattttgtttggatacttctagtactgaggaaagaacacttttggaatgtattgccgtttgtatcttgtaaacagt

SEQ ID NO: 115836 - DNA, 1732 bp, Homo sapiens
catactgctgtttcagagtgccttattttgtttctcctaagaagataatatatttaattattattttgtataggcttttgagtactttttgaaagaccgctataataggataaagagatgtagcttaagttgtaaaaaggtaaactttatcaggaaatagttttgaaaaattcattggcatatcagcttgttgttaatctgggccattcactaaaacaagaattactgtcttggttggagaaagtagttacaccttgcagttttactagagactatgttgttggttcgtttactttctgacccataaacattgagggtattcaaatatgtaataaatagctaataaagtgttactggagtttgattcatggatttaatcagaaatttagatttgttgggtgacaaaacattttaatctttctgtgtagtaaaacacaattgggaagcatgttagttaggggttgggagtcagggcttgaagaaagatgtaatagagcattttgtcacagctgcctcccgacagcgatgaaatacctgcaaattggtatcactaaaaatgttgcatcttggggatgaggggaagaattgtacagctgtagtgcaataatctcataatgctgactttataataagatatatagccttgtgcataaatggcactttatctttttggattctaaagaacaaatgagtctgagaagtatcttttttttaaaagttattctataaagttaatttctctaaatgatcttcaactctgaaagacttgttttcatttggaatgcttttatttttgtcattttatgcttaaatacctttctatttagaatggtttaaagttgaaatccaagaatttttttgaatattttttgctatattgagcatgctgaagctggaactttcttatgttgtattgcatgtaattgatacatttcagccataaagcacctaagaggtttagcaagcactagcgtgtttttgaaatagatgttgatagatttagtaagatatccttattcttagtttaaaaaaaaaacgcaggactgaaaataccaccaaagagatccttgatttttagatttaaaatgcttaatttcttcctgagattacacagagaagtttccttaactactgtttgttctagaaactggaacaacttaatcagtatccagactttaacaactacttgatttttgttcttacaaaattaaaatctgaaggtaagtaggatttgtattgataactatttaaagtttctttaagacctgtttaaatgtactgagaattattcatttcaaaggatttcattttgtagtaaccttgtgctttatagatgtgggataaacagtcttagttaataccactcagtatttacatgtttaataagaattccttttttttaatgtatatacagacagagtctcactctatcacccaggctggagtgcagtggtgcgatcttggctcactacaatatctgcctcccgggttcaagcaatgctcatgccaaacctccctagtagccgggattacaggcatgcgccatcacatccagctaatttttttgtatttttagtagagacagagttttgccttgttggccaggctaaccttgaactcctggcctctggggattcgcctgccgcagtctcccaaagtgctcggattgcaggtgtgagccactgtgcccagccagcattcatttttaatagggtgtttgtataataagtta

SEQ ID NO: 115837 - DNA, 1011 bp, Homo sapiens
tgtatatcaggaaacaataaagcttgagcacagtggccatatatataaacgaaattaactcttaaatcagtggttctcaaccactggcaattttaacccccagaaaacatttgacattatctggaaacatttttggttaacacaacttggaggggtgctgctggcatctgtggctgatgatgctacttaacatcttaaaatgcacaggacagcaccctccaacaaataattgtcagtatgtcaaggttgaaaaaccctgagctataaatgatagagctaatcttttgttaatcagttataattattttaactggttatagcaagtttgaatgtcaatcaacttttgaatataaatgtttttaaaacttatcggcacattttgaaattaagactacttcaaaactcattactattactattttattacagatgaacccacaagatcattgagtggtcttatcttgaagaataatgtgaaagcacactttcagaacttcccaaatggtgtaacagactttattaaaagtgaatgtttaaataatattggtgactcctctcctctgattagagccactgttggtaagttatattacaacagttttgcttactttgtttgtaactgggtcatttttagagatgacagattatttccttaggaatttttgtctgtttcatgttaaattgtgttggggaaactttcattgcctttaaatgcttttgaaatggtgtaatcatggtaaaagcgctctcatccagtgaaactagtgaccctggataagaggagagcctgatcaaacttagcctaatcagagttggttaaaatggggcatcaacaagtgatattaatttgcggacactactttttcttgagcatgcagattagagttctgtttgtttttttgtttttttttgaagcagtctctgttgcccaggctggggtacagtggcacaatcttgactcactgcaacctctgcctcctggattcaagcgattctcctgcctcagcctcc

SEQ ID NO: 115838 - DNA, 1056 bp, Homo sapiens
ggtgcaggttgcagtaagctgagatcacgccattgcactgcagcctgggtgacgagcgaaaatctgtctcaaaaaaaaaaaaagagttcctgttttgtcttgtgggtttgaaaaatatttatctcttacttacaaagcattggctctatgacctccctgcagatattcttgtattaaacagtgccatcattgacactgattttacatttgatgggtagaggacatttgtggtttgagaaaaagaactccctagattactctaatgtactcttacgtaccttaaggctttacctactcttgacactgttaaaaagaatggtgagcgtgtgccagccttttccatttcggatccaggagagaaatctccatacgtaagtggaatggaatttagaaggaaggtgggtttcctctgagtgttggcaactcagctgaaaggaaaggagaggatatagaaacgagttatgagattgtttcttcctaaactgtatttcattataaacctatctttaagtgccatttggttcaaactacaatactctgtgtctttaaatttgaaaggttagaagtaataatactagggagagaagaattggttttatctcctaatgagtactttcaccttccataaggtttttgaacatgtttaggagctgactttatctttggaattatttaagcacttaggtatcatctgacttattttaaaacagagattggtgaaattgacttatgtaggcatttttatttcttgctgtgtattagtagaatacgaaaggtctttcattttagtttatgttaagtagatacttaagtattctaattgtgagggaccactgcagttttcagtatagaaacagcttttatttagttgctttactacagatgaaggagcttcaaacataactgcagtgtattttcaaatgacatgatgtctaggatttgataaaaaagcaattaggaatgtgaaggtggttgtgggtagaagtatggatgaaacaagattgaccatgtattaatgactgctgaagctagttaatggatacatttagttcatta

SEQ ID NO: 115839 - DNA, 1211 bp, Homo sapiens
gtttatgtgaggttttttttccacaaggtacggaatggtgatatgggtgttggtggtgagtgttactaattttttgagacagggtctcactctgcccaggcatgagtgtggtctcatagtcatggctcactgcagcctcgacctccttgactcaggtgatcctctcacttcagcctcctgaatagctgggatcacaggcgcataccatcacgcccagctgattttcttgtatttttagtagtgagagggtttcatcatgttgcccaggctggtctggaattcctgggctcaagagatctgcccgcctcggcctcccagaatgctgggattacagcatgagccaccatgcctggccaaatgttattatttacataaaatgtgtttgtgcacacagttgctcacatggcaatgcctgacataatgctgttggatttcctaaagaagtgtgtttttgttcaaggtattttgatcacaactatagcctccaagggagaattgcagaattggcctgacctcttaccaaaactctgtagcctgttggattctgaagattataatacctgtgaggtaaggatatttgtttcatacataattgggtgttttctgtttttcttgtcatgttgtgtattagcagcttttgggaaaaatagttcctctgaaacatacagcttctcaaaacttagaaacctaaagttacctttgtgttatattacatttgtaaatcatttatttttctataaaaactgttacattataaacctcttttactgtatttcacacaaggacgtatcttgcttttctgttctaaaattattcttggatgtatatgtatgtaatatacagtttttgtcaagcctaatcagttaaagatagaatgaaatttaccaaattcctggaccatgagtacttttttagcttctctaaattgtttttatgcctcttatatgagatatctaagggatgctgaacttgtgttttttgtttttgtttttgttttttgagacagggtctcactctgtttcccaggctggagtgcagtggcaccatcatagctcacctcaacctcctgggctcaaacaatcctcctacgtcagcctcccaaagtagtggggactacaggcatgtactaccatgctagactaattttttctttttttttttggtagagatggggtcgcgctgttgttcaggctgaccctgaactcctgagc

SEQ ID NO: 115840 - DNA, 1009 bp, Homo sapiens
ctgcaacctctgcctcccagaatcaagtgattctcccacctcagcctcccgagtagctgcgattacaggcatgagccaccacgcccgcctaatttttttgtatttttagtagagacagagtttcaccatgttggacaggctggtcttgaactcctggactcaaatgatccacctgtctcaacctcccaaagtgttaggattacaggtgtgagccactgcgccggaccattgtcttcgttgtaatcatacattaactctgacctgtgggtttttgtgtgtgtgtgtgtgtgtgtgtgtgtgtgtgtggttttttttgttgtttttttggggtttttttgccactgattagatcactagcatcctttttgtttggggagagaggatgatttctcatggttagtggatacagtaagtatctctttaattagcaggcttccaatttgggtagaaatctattttttgtggaaaccatatttggtgttttgactctgtaaagcatcgactcctatacctctcaaagagcggaggttgaaggcagggcaggcacaggaataacctgtcaacaacaaaaaaaccccacaggaataacctaacctaaaagggaaaaaagaaactatccgccatggtggctcacacctgtaatcccaaggcctaggtgggtggattgcatgagttcaagaccagcctgggcaatatggtaaaaccctattagaagaaattggccaggtgtgatgtgtgcctgtggtcccagctactcaggaggctgtggtggctcacacctgtaatcccagcactttgggagactgaggcaggtggatcatttgaggtcaggagtttgagagaccagcctggccaacatggtaaaaccccatctctactgaaatacaaaaattagccaggcatggtgtcgaatgcctgtaatctcagctactctggaggctgaggcaggagaattgcttgaacccaggaggcgaagattgcagtggactgagattgcaccactgcactc

SEQ ID NO: 115841 - DNA, 1035 bp, Homo sapiens
gatgatataataatttgttttaaaattgaatattagagcgggcatggtggcccatgcctgtaatcccagcactttgggaggctgaggcaggcggaccagctgaggtcaggagtttgagaccagcctggccaacacagtgaaaccccatctctacaaaaaatacaaaacttagccgggcacaatggcaggcacctgtaatcccagctactcgggaggctgaggcaggagagtcacttgaacccgggaggcagaagttgcagtgacccgagatggtgccactgccagcctgggcgacacaccaagactccgtctcaaaaaaaaaaaaattgaaggattaaatttatggattttagaaggcattttatgtgggctgagaacattagtccatacaaattaatcagcattcttcagtttgttttcaaatggcttcatttttaacaaattctgataatttaaatgtgtctcttacagggagcatttggtgcccttcagaagatttgtgaagattctgctgagattttagacagtgatgttttagatcgtcctctcaacatcatgattcccaaatttttacagttcttcaagcatagtagtccaaaaataaggtacttatattgccagtactaattgattaactgtgatataaacctgaccattatcttagttttcattacctaatatttttgacattagcaaaagatcaaaagatattggatgttccagagaggtgaacttatgtaattgaaattgactacttcagtaacaaaacctgtgaaatgttgactctttgtgaggaaatttttgttaaacatgataaaagttttgtgccttttacagtggttaattatattcatgatagttaacaggcatcttctaacttcctttatttaaggccaggattagttgtgggttttttgtttttgtttttgtttttttagctttgattttagaatcgggatacatgtgcaggtttgttacaaaggcgtattgcgtggatgctgggggtttagagtacaaatgaatccatcacctagg

SEQ ID NO: 115842 - DNA, 1032 bp, Homo sapiens
atagaacaaagttacaatgagcatatgttaaattttaaactttgtttctaggtctcacgctgttgcatgtgtcaatcagtttatcatcagtaggactcaagctctaatgttgcacattgattcttttattgaggtaagacttgttcttgtctccctcccaaccccccagctttttttttttgagaaggttaggtgatgctaactgcatgtagttttgctttaaaacaagaatcatttataattctaaactcaatatttaattaaattatttctgatagtattaaaactggatatgggatagactaacttttgttagctgagaaggcacttttactaatttttctacttgtatcattctacaaacactgattttggtggcggggtatgtttagtatcttgactactttaaaaatttttccttcaatatactgttcaaattgcatatggaaaccaagtccctcagctcatgcagtttttgaaatgtgaaaaattggtgaggttagattaagttcatttggtagaatctgaaggcacagactacaaggacagtattttccattggtttccattgtaaaattagaggcatcaggaaaaatagactctttaggcattttgaactttctgataaaagtggaaagaaaagagcataattttctggccaggaaccataagcaccacaatttcttctcaaaatctctgctacttgataacaattaaaaggattgttaaagttccttaagcaccttcacttttattttcatgaaatggaattttaaaagtcccttagaagtcagactgctgatactactgttgggaaattataaggaagagtagggggggttacgttactttttttctcgtcacttaaattgaccagcttctttctgagcatcttttaccaataaactaagagtagtagccataaagatcctttagccatttacaagttaaaaccaaaatgtgtcttaaatagttttactgactactacctactatggaacagatactgtgtttgatactagggatacttaa

SEQ ID NO: 115843 - DNA, 1050 bp, Homo sapiens
atcagtttagggttaagttagaaaatcagtgtatactaatatttgtcgattattgaatctgtatcacctttttataaatcttgaatctattaccacctctcaccttaaaaatcagggttggtagggaatagtcttttgtctctgcttctgggtgagcaaacaaatgctcctatgtcctaatgacatggtttcttaaaaactaaaaatttcctcaaagtacagctgattgtactctatcagaaaagaatagctcttcatcttttatcaaaatcataatctttgtcagttattccacatttaattcttgtaatctaatattgtaggccaattcagtcagtttttggtacctttgtagggtttctttaaatgtcaccaacttgcagattacttattacttgtgtgtaagcctttctaaaactagaaaaaattatttcttgtgcaacagaatctctttgcattagctggtgatgaagaaccagaggtacggaaaaatgtgtgccgagcacttgtgatgttgctcgaagttcgaatggatcgcctgcttcctcacatgcataatatagttgaggtaacactggcaatttaaaggctctttcatcatctttcccctaagagaaatactagatagaaaatacaacataccggatgggaaggggactataaaatagttataattgtcttaaaattataagttatctttgtggggagttttgtatttctgggtatagttgtacatactgtataactttggaagtgttttaagtagtatgttatctagagcctccttttcacttccaaagttccatatggtggagagaagagaggatcttttttaaaggttgcagtctaagatctgttaaaaggctagcattcgtggtatgcagcaactcctgttctaaaactttacacatggctgcatgaggtaggcctgttttttctttgaaaagtcaggcgggactgattgaaagtttagtgttaactaaagtgaagaaattttatcagttgcttggtcacagctggggagcctaatttataatgttacagttcttt

SEQ ID NO: 115844 - DNA, 1050 bp, Homo sapiens
cagtgtttcttaaatttaactgtattttatagtcacctaggaaactttaaaaattcaaattctggccgggtgcggtggctcacacctgtaatcccaacactttgggaggccgaggtgggcagatcacgaggtcaggagatcgagaccatcctggctaacacggtgaaaccctgtctctactaaaaatacaaaaaaattagccgggtgtggtggcaggcgcctgtagtcccatctattcgggaggctgaggcaggagaatggcatgaacccaggaggcagagcttgcagtgagccgagttcacgccactgcattccagcctgggcgacagagtgagactgcatctcaaaaaaaaaaaaaaaaaaaaaaattgcctaggttgaaaaccataaggtcaaaagcttgcttgataataggactgaattgatactaatggtgtgatttttaaactgactaatattaaggatattgtgtttccagtacatgctacagaggactcaagatcaagatgaaaatgtggctttagaagcctgtgaattttggctaactttagctgaacagccaatatgcaaagatgtactcgtaaggcatcttcctaagtaagtgttccctcttataaatgctgccttgttctttaatttcttaagtgattcttcattttcatatttttataaaattcattcttttgccatcagggagtgagattctaaagaagccagacttaattttattgttggtaaagagatttttcaaaaagcaattgcctattttaaaaaaaattatgtgagtatggtttgttctaaattataattgatttcggataatttacagcacagtatttttgtggggtttttttgttttttgttttgttttgtttttaaaaaacaatccttgttatttaaccacagactctattgtgaagttttgttttttttccaaaaaataatttcccactagttgtgatgcaacagaatttagttaacttaatgttaagcccatttttctaaaagtaaagtaatataagctcgtgggaaaaaactaaattgcagaaa

SEQ ID NO: 115845 - DNA, 1012 bp, Homo sapiens
acacctggttctcctgcaaaatacctgtatcttacaaaatatagctctatgtattgtaagtcttacctagttaaattatgctagctctaatgtttaattactactaatctttctattttagaatttagaaggactttgagcatgaaagtttggctggcccacatttcttaaacctatccaggggattttatatttgactgcttccttttctctattagcgtttcttcagttaatgagagcagacatatatcactgaataagttcaaagacaatattaccattgattatctcattggttttattagtacatgtaaggttaagacttattaattattctcttgagatcttaaggtctttgtttcatgaatttctttctttataggttgattcctgtgttagtgaatggcatgaagtactcagacatagatattatcctacttaaggtaaggaagcttttttgatgaatagggaacaagatttttatattgacttagtacatctttggatttggccaataaaacattcattgagaatagatctcctgtaaatagacttcctattatccataataggatagaagcataagtttaagtaatgataaattcttgcttaatttggtactagatggtgacattggtagggttattattaatttccccttaattacttggagttattttaaaaacattcttatatatgctgctctgaatttgattcaggtaacttagattataccagccagtggaggccatgtagttggctgaaagggccgtataacctaacaggtgtgttaggtcagtctattcgcccctccataaggaatatgttctgtacatgggcgtggttcttaatcactctggaagtatatttcagaattctgtgcatgaccccatctctggatattctgtttctcttactcatgtacatactattagcctataatgaatgccaccaaaaatttctcttaaaaaaacaacagggtgatgttgaagaagacgaaacgattcctgat

SEQ ID NO: 115846 - DNA, 1304 bp, Homo sapiens
aatcattttaattgtttttctaaatacttttgattcaagattggttgaatccatagatacagagggccaactgtatatatattactttccggcaggatctcagaatgtgcccagtaaagtccattcacaacattgaccaggatgggagcatgaaatgaatctcttcaatttgagggaaaaatatgaacacataatactcaatctgtcctttaaagataatgtttcttgtagaaacgcttcctctgagtaaacctgacctgattggctggcaaactaacaacaatgaatggcttccaaaagagagggttggggtggggggaggggaacctgctactgtagaaactagtagagcaagctcataaatgatcaggatcctgttgagcgcagtttcaagcattcatcataatcttcagtatacccagaaagtttagcatgtgtactttattcttcctagtgcctatcttcagttgccacagcactgcagtctggattccttccgtactgtgaacctgtgtatcagcgttgtgtaaacctagtacagaagactcttgcacaagccatggtaatttttttaaaatgtcttcctcttcttgacatggtggacatttttctaaagataggtataatgtatacagactttttaagtagttaattaaaaccaaacttacaaaaaacattgtgtctaatttcagctaaacaatgctcaaccagatcaatatgaagctccagataaagattttatgatagtggctcttgatttactgagtggcctggctgaaggacttggaggcaacattgaacagctggtagcccgaagtaacatcctgacactaatgtatcagtgcatgcaggtgagacttgaaaggtgaaaatgaattgaagcctgtttctctgtgtcacattggggttaatttcttcttatttcttgtaggataaaatgccagaagttcgacagagttcttttgccctgttaggtgacctcacaaaagcttgctttcagcatgttaagccttgtataggtatgaatattttctactgctatgaatatggttttttaaagttaacatttacatcagctttgtttttttattattaaactgaaattgcatggaatcccaacatttataaatgtacactttattggttaaagtaaacttgctgtgattgaaacaggcaagatggcaggaacccctaatatttccttgagcttgccatcatctcagctttttaggtactcctgtgactggaggaaagcttagtaatatactttagagtaaaggacatgcccaccagggaagccttgg

SEQ ID NO: 115847 - DNA, 1282 bp, Homo sapiens
tacaatatactgctattgaaaagtttactacatagtttaaattttttttctagctgatttcatgccaatattgggaaccaacctaaatccagaattcatttcagtctgcaacaatgccacatgggcaattggagaaatctccattcaaatgggtaagatgtttttccctatttaaaagcataaggcctggcgcggtggctcacgcctgtaatcccagcacttcgggaggctgaggcgggcagatcacctgaggtcaggagtttgagaccagcctggttgacatggtgaaaccccgtctctactaaaaatacaaaaattagctggcgtggtagcgggtgcctataatcccaactatttgggaggctgagtcaggagaatcacttgaacctgggaggcagaggtttcagtgagctgagattgcaccactgcactccagcctggtgacggagcgaaactttgtctcaaaataaataaataaaatataaatttttaggtgccttgatatttttgtaattgctttaattttaattatttgtatttctatatttatatgacatgtcagagttaatacgggaagcaaaatatttcacattgatattttaacgttcaattttttcttttttgtttttttctttttgggatgatctctaggtatagagatgcagccttatattcctatggtgttgcaccagcttgtagaaatcattaacagacccaacacaccaaagacgttgttagagaatacaggtaccatatgactgaactgtttcagtgaagagaaaatttgttgccttttaattttaatatgcgtagagaaaccaaagcaaaactagcttttaaaatcgagcttattttgtatttaattgctatttcggattttcagtaatgaaatagactgttgcagctacattctataaccagttttcagtggttatatattcagtggtataaccagaaaaacacttttttcccctattccagtgttttaatacttcctgcaatggatcccagcaaagataactattgaaccacctgaattttgcttttaaattaattcggagagtaactgggagctgggaagtaatttttttttttaatctgtccaaatgtagtcaaaaagattcagtggcaaattggttaacagtggcatttgtagtttgtatttcatcatataattttcttcgaattgggaatttaggcagtatgttatgggattttttttttaatttatttttttttttttaggaagcttgtttctcttttgcatttatagagagcatgt

SEQ ID NO: 115848 - DNA, 2237 bp, Homo sapiens
acattcagatttgaaagacttgccattataaaattattgtggaacctaaagaaacttctatttatttttaaatgtgaatgcttaactgcaaataaatgttgagtgtaatgtatatgaaagtttcttgtgggatatcagctggtgaatttgttacatagtttgtttaacaaattggctttatttataagattatattttaagtatgattatatcctacataaataagtcataatgccctaaagttgatggattaaattgatattattgagaaacacacttgggattcattagattacctcttatcacaagtggctgcataaagtattgttttctttatttcttacccaaaaaagtggggttttttaattattaaaatcattgtcaatggctaatatctagattttagcagcttttaattaccattatctcaatatttcataaagccaattccttagtctgccgttaatttgcttttttccgattagtatatcctgcactgaactttttcaatggaccatcatctgctttatcgcatgtttcattggattgttcatacttgcctgtttaatgagaatgttgcatagtttgtgtcttttgaacataggttttctttctcttgcttcatatgaatctgctggattttagtattatctgtgtagtttgcttcaagtaatccttaaacatttttctttaccccccaccctttttttatgaaaggttaacctgtaagtttttgagagaacaccattaaagcacttcatggtttgttttctgtttgtattttttcctgttgtgtatgaatgtatttacatgtacgtacctttgaattgcagaatgcagttccgagttgcacttattttagctctttgtaagtttaaagacttcctcaatttttatggtgaatatatgtttgcccacttcaaaattgtaaaaaaaaatagtgtgtaattagtataatgtattatctattttgtgctatacctttaatagcagaaacagaatatttattttttcctgtggtccacatatcatatgtcattgcagtggactgtaaatttcctttattagaattttatttcaaacatggcttaaagttagtggactgttacctgagttatcagaggtttgacaacatgagatttgacattgtagcatagcaatattctaatccattcattcagtgagtaccatgagacttaaaatctgacagttgattttgatgtaaggtaacaaatttccactggttggtttggcaaatgttaatcaaagaaaaaatttttgaaactaccaaaaatttggtttaaattccctagataatttccaaggaatggaaatcactttcacctgtattagtttgagatgcttgagaaatataatcacatttactgatattttctcatgaaaaaaactatagattttattattaaattctgaaattttggctggcttttgaatgaaggttctctaaatttgtccatttaactgctcatcttattaacagaatgataccttgacactcgattgagcgagaaaagcaatttcatcatggtttttggtgttctctcaatctttagatttttttaattccttttgtttttctttttccaagagtatgccatatatgttgctgccccttattttagggggtggtaataaacagcactggtgaaatcttatgtttattatcatacacaaattctgttggtttctgtttctgagttatttgttgttttttctttattttttctccttccccctcatttgctcatgtcttggttggcgtttggtggtgtataaccgtgattgcgttaccttagcaataacaattggtcgtcttggttacgtttgtcctcaagaggtggcccccatgctacagcagtttataagaccctggtgtgtattattcaatctttttttttaattcatttttcttcactctttctttctctatctcacttttagatatattttcagttggttacaaaaatcacaatcctttatcattgccaaccatgtgactaatcttgtcctatcaggtttgtgaggtttttcaatagcatcgtcatgtatatttattttatgttgtggctaacgactaattgatgcatgggataagattgtcacatgcttgctgtgttaaaaaagcttgattatacataaaaagcatttaaatatccaccagaaaaataaagatgcatgcaaattctataaatttaggtttttgcattacgtttctt

SEQ ID NO: 115849 - DNA, 1061 bp, Homo sapiens
ctctatttcaaatcaaggtcatttaatatatatttagctagctttaatttctttctaggccagtcaaaactgtaagatcattggttttatgtttttctttaatccggtaaatgaaagagtatttttatgggtgtcgatttggtgctttcagttcatttctgatgctgaacatttattgcacagggggttattttgttgtgtgatgcaggacattaaagtccagtataaactgaatgagttgaggttccttgactgtgggctaatagggacagccattaaggtaatctcttctaattccttatgatcatagttaatttttaaatgtttccttttttaagctagattctattgtgacataaactctgaggtttacatatatcttttgctgagtttgacaaatacaatatcaacctaagatgtatttcttgcttgttacaggattttatatttttttgtgatgccgttgcatcatggattaacccaaaagatgatctcagagacatgttctgtaaggtaactaataagtctttataatgcatcatcttgagactgttaatatcctagtggaaaactttaaattatgtttacattttttgtgaaagttaggctcttcaagtcagtattgatagtttacatatataacctttattcttggtaacaaagttggcttgatcttttcttaaaatacagcagtgactcttatctgtagaggatgcactttgaaagtattttcccaagtgtaccactagtttaggtggtcccattattccatttaaggaaaatagtatatgtttttcaagatggaaatggagacttggagtataatctgaaaaagagtaaatctaaatggctgccacaggagtaagcccatgtcattatttgctttgttaataccctcttttgattaactcgtcagtactcaaccacagtaaaaaataaaatgcagttacacatttgaatcacccaagattaaagttagtgaactatagtttgtcgtgaactcaaagcttgtgtatttgcagtttgaaaaaatacgacataaaaattgtattgcttggatg

SEQ ID NO: 115850 - DNA, 1223 bp, Homo sapiens
tttcacgtgctttgaaagaaaactcagttgggttttggcccactgtttttgtttttcactgtatgtttcactgagtacctaccatgtgcccatcacttttttttttcttttttttttttttttttttttttttttttttttttttgagacagagactctttcgcccaggctggagtgcagtggcgcaatctgagttcactgtaatctccgcctcttgggttcaagcaattctcctgcccgagcctcccaagtagctggcattacaggcacatgccaccatgcctggctaatttttgtatttttagtagagatggggtttcaccatgttggccgggctggtctcgaactcctgaccttgtgatgcacccacctcggcctcccaaagtgctgggatttacaggcgtaagccactgagcccagtgcctaggactatattttaaaataagcaatgaaagattctgttttaatttgggatggactatattcatttggactcttgctccttgagctcttctgtacttaaatgggactagcagttctcatctctgagcttcggttttgtcattgagttatgttgaggattaaatactatactgtatgtgatgccagaacttagtatgttgcctggcacactaagttgactcagtaaaggttaggaactgggccagtacaataaatatcagggttttgacattcatctttagattttcaacatgaattaagacatatctgactggaagccagaagatgtgctgaatgagcatgtacagaagatgtacaccaagttgaattacactttagattgaattggaggagtttttttggcttgcttgcttgcttgtttactccaagctaaaatttaaatctggaaagatttcaccatccaagctgtctaacctagaaggtagtagaaatggactcaaagcttccagaatgtgtcagagcccttcatatgtgttgtcctacttcagtcttgagtcctcaagagctgttttccaaaatggctttggcattttggaaaagtgctggattcaccttatgttaaattatgagaatgcaaaagatgagaatgacttgtagcttcaaagcttcaatgagctactaacaagtcttgagcactttcagatttattacctctgtggtctcatcaccaatcatgaattaactgttctaagacaaggtatgaaatagttctcggttttgtaattagagctaaaagtaga

SEQ ID NO: 115851 - DNA, 4822 bp, Homo sapiens
ggtggtatgtacctatggtcccagctactcaggagactgggcaggaggattgcttgagcccaggaggttggggcttcagtgagccatattcacaccactgcgttccagcctgggtgacagagcaaggtgctatctccaaaataaataaataaatgttaaatttgcttttttctctctctctttttttatgtagaatttgtttgttgatacttactgaatgtagtgaccctgctgtggtaatgaacacttctagtgccttctaggcttaaaataccagacaaccccaaataacaaatgctcttttgtgttttgataggttggatttctgtttgcttaatattgggaatactgggggaaaaaaagatggtgttttcattctaaggattgtcctaaagaaagtgctactttatttttaagaaagtaaggccacttgttatataagaaataacaagttcccattgggtcccattttgcaaaaggggataaagaattagactgatagcatcatacgaggcatatttcactatacaaagtgttgtacacctgtctatacaactctcctacccagcttgacctcacttttcatacctgatgcagcaaacaattcagtgccataggagaaggaagcagcatggttataagtgactaacacgatattaggcaatttgtccaaatttctcattttctttataggtaaagatagcattcttatttgattaattttttgttccactggctttgaaagacaaacgattgttaaagataaaattgtttttgttctttttcttataggtccttcagtcttggagactataagggagcctctgcacccagggaaaatgttaccctttacaggggggaagggtaaaccagtagggaatacagtacaatcccaaccctactgggaggggcgggagggaggtgttgccgtcactgtattaagtcgatgttgggaaacgttttaacatctggagcctttgtgggtggaaatatgtctccagttacaactccgcagtggatgtgaagaagcaaaaaaaaaaaaatctattcagtctactcacaaaacagtacattgtggaatattatggggaattgtaccaaaacaagaaccatataaatgatgcctagggacaagaaagaggaacaattctatagcgcacaataaaggaaacctaagaatgggagttacaaatagtaaagaagctttttttttttttttaatttaaagtttttttatgtaagttttcccacatgatggggccttgttttgcatgttgatgaagaactacacaaagaaaactaatatagttaaaagtcagcttgccttcccgtagtagaagcaggttcttggaagttacaatttaaggtaccccaaaaaagttggaaataaaacaaaacaaacataaacaatgaagcaccctgtgaaatgccaaatgagtcactccttttaccttttttggggtgggcagggagggaggaataaatggggttgggcatatcaaactaaagatgacatcttaattttgcattgaacattaatgtagcggatataatttgatgattatacttcattagatttaatttctaggccaagatgttactttttaaagtgcagtttaaggttcaggcatgcattctggctcatagtggttgaaagtaatttaaattagtgggaaagtagcatgcttgcatcacatagagtgagattggtattcatttacctatgttgcgccagtttgtgttgcagtttaccaattcaatatagccctgcatttaaagttcctttttaagatttgtggattttatttttattaagaacatagatatataaagtactgtagtttacaggtaggccttgaaatatcttttttaggatctgttaggaataagattgatattgtattgtgtgtaacctgcacaatgtggaaagctgatatacctgtgcaaaatctttgcctctgtgctgtcagtgtgatgtgctttctgcatggttatatactactagtgattttatcaaaacttctaaaatttaaattacgtggtaaaagatctgtaaaaggctgcataaatgttagttggcacataaagacaattgtagaagttgaaaaatgattgctatatttcaatgtttattcccactcaacatactgccttctaagcttccctttttttgttcaaagcatgatcttaaagatatgtttaagttaatggatgtaatgcagggttcctacactgtattttggcgcatgttggtggccctctgtgccctagatatatgcacacagggtgcaagttaaaagctacagagtgaaagttggtttggatcctcttcatttcatttgtttagcttttctgttatttttctctacttacatgtattcctgtgaataaatccttgttaagttaaccctttacttttccttccatgtgtattttcttatatactgtgaatgtgaaaacctaactggtacacttgatcttgtgttcatatgaaagtgcaagtctttattaatttggattgcctgaacagtgtatcccatgatgatgaaggaaaatggagagatttttctttttaactctgctggtcagagatgaagccacgcctttccatttttcaatgctgcatatttaatctgcaacaaaaatgttaagccataacagcctttttatattttagtttgtcacctttgcattgcagaataaatactgaataaccatttttataagcagttgctcctctttgcatggttctattctctaaaagtgttgaatgatacagccattgcactgaagtttgagctgtgtgcgtgtgaatttatactgtttcaaaaatttcaaatgcatggtagcatgtagaaaggtttttgttactatgtgtgtgtgtgtgttttgttttgttttgttctgttttttaacgttctttcacctttcctctactttggctttgcaaatttcagtctgtagagcctgaaattaaattattttatagtgcctgatatttttaatattataagttggattcaaagggtatacagcattttgttttctagtaccattgcttcactgggagctcaaaatttgcctccctgttagtctttaataactgagtagagtagcttttttattcttagattatagtgatattctgtagtgcttcaaatacttagaattctaatatgagagatagtttaatattctggaatagagagtattttaaattgaaatgaccaaattcgatttaaaacaaacacataacaatcttcagtaaagttatttgaacctgtggttgacaattctgtattgactaaaggcaatattgtcacctgtctcattaaaaattagtttccagttaggcagatgaataacactattaaaaatgcacccagttttgtagtcacttgactttttttttttatttaaatgaaatttaatttgaaaatagaaaataaaattaggtaaatatgactggcaacctgaatttgagttgggattctttgtgtatttttcccccttgaggttattgtttcttcctaatttatatttcagatacatagtgtagaacaggaatttgcagaagccatttaagttatcttttgaggtaagctctgatttagcatttattctgataaaatctaatacatcatgggatatatataaagcaacttaattcttgtggtgtagtcttaatagttttgaatgttgactgaatgtctataaaattgtgagtttgtctttgttacattccagtgtttctgcctcttggcatgcttaaagcacggcttacttcatctgctccttacacactaaaatgctgttagtgtgctcaactacagaaatagccgctgctaagtgatgtagattttctacttgaatatttttatgttgtaggaacctcaggaggtcagtgtttactgttttatatatgccttctttttcctgtttgagcttctctctttgaaggattctaacagaacaaagctgctgatcaacctaagttggaaacagaaagtgtaattaatataacttaaatgcatgtttggcagttccatgttacagtccattagcgagtgaacttagtgccacaggtattcatttattcaggaaagaattttgctttttgtattgtctaatctcttcaatgacttcatactgtgtaaaaaaaaatcactttttaatattttttggttggttatttcccaaataatcaacatgtaaataatcttttaagagccagttctgatgctttacattattgctacttgattttgttatgcaagttagatttcagaagaatagattttaaaacacttaaccaagccattacatcttaaaaacaaaacaagtagcatacattttgtaattaacattgataaacactgtgatttttttggttaagactttttcattgatctgaattgcttaaattgcatatattgtaaaataggatcagatgtatattttaaactaatttcaatggattttcctcttgaaatgctttgtctactcagttataaaatattcagatacaagttttatctcaggtgaatactcttgtattgtttttgctttggtgacatgcttataaagggtcatcctagttacattctttgttttttaagtgtatttcattgagaatctttccatttagtctgatttttttcctaatattctagcaggctggggtggtataaagccctcctgacaagccttttgcctacaggtttacctgaaaatgagctacatatggtcgtcattttcttcaaactctcaaaataggaaagtggaaatttttctcccctatataaaattattctgcctagca

SEQ ID NO: 115852 - DNA, 1941 bp, Homo sapiens
caaggaggggaaactaacttgctactagtgttgttaatgaagtataggccttggaacatttaagaaaactggtcttcagatagttaagggcttgggataatttaagtgaaaagtgagatcagtaatgagctgtgttgttaacaatattatctggtaataataccatgcaatatagcgttgtataccaacttagtgcattttatactgtattaaatatggagatacttctaatgcctctctaaaattaaattttacataaaagttagttttattcacctttaggctttccaagtgaattgtgactaattttttcaatcttacatagatctttcacccattagcattacttacgtagataattctttatgcctagttattatacatattaatttttaaggtatacatttaaattacacaattgttcattgtggtttgtatcccagaatgtgttgtgttttttaaaagatgcataatagctgaatgtatgcatgactttgaaagaagttaaaatggtgattttttttcacctcttgtacattttaaaaccaggccaaatctatttgccaagcagtgtatcactaataagaaaagcagtttttccttttattgcagtttttgtttatctgccatagaatttccttatactgtggcttggtattattcaagattagctatttcgctggtattacatctttttaaaagcctattataacatggttagcctataaggcagtgttggtccccttctaatattggcctcataaaggggttccactgtactttccgcatattactgtgttgttgttttcctttgtggatatataagcaaattgagcttgggtgatttttatggagacaataattagacaatactgtataattagttttacttaatagattatcatcttgtgagaagagatgtttaaacgtggtaaatcacttcatattacaaaacagttttacacttaatatgttaacattgggtgcaataatttagtagcattagctttagttacaaatataactggatctttctgctgacaacttaggttgtatgagttatgcttaaaagctttaaatctgatgtttcctgtacctgccacactatgttagaatgtgtccttcaaacatatcctcctgcaacttctcaaactgtactaaattgatatttcttgaagtctaactctgtgctaacagatctccattttaaatagaatacggttttaatttttgataagctgctgaattttaaagagagttttttggggccaccaaatattttggatcatgcagagaatatatattgtactgtagtaattttgtatttacatttgtatgatgtgacataatagatgtgaatgttaatcactgcttgactatgttaataaagttgtttaactatagatgttgcactctgatttttaatgaaaggaaatgagttttctttttccctcttaccccattttggatctagataagccttatgttttttgggatttttttccttgtttttagtttgaggttttgttttgttttttccttagcttacacattagtacacttttgttgttgaacatcatttatttcttaaaacaagtgttttcttatttgtatagtatagtaaaaacctgtttttccacattttaacttaactccttgatgtgttttaaacagttgattataggttctgctgtttgaggataggggacatactattctgtaaaaggaattaaaggcgaaattgtgaatataaaaagttgatgtaaggagagattgcatgagtgtgtatgaatgtatgtcctattaaggcttcctctttatccttcaaacagttaagatttgtaatttggggaattaacatttataagagtaattttttcttcaggttgtaaggcattaatatagttgcatgttactaattaaatgtattaacacatttca

SEQ ID NO: 115853 - DNA, 1657 bp, Homo sapiens
cttttcaagctttgtgttacttcttgaagaacttgaaacaattttaagaaagacaagtgaacagttaaatgaattgtaatacaactacctagtgataactgctgttaatatcctgtgcacatatataaatatatggtgaatttgtgtttttagttatatccagaattgtttgttaatatacatggacatacctacatattattctataagcaatttatgcaactgtcttactgttgttggacattcagaagttttttctaatttttcactcttagaaataaagttttagtgagagtcgcaatgcttaaatgtttgcaaacatctgtagcgatttcttagtgaaactagcaggtcaaaggtagttggtctagtcagattacctttcagttaaattgtactcattttcatatccagcaccaactccagtggattctgtcatgtgtgctgtaagttgtgatttaatagcatgattttctaactttaggaaattttatatacaaaatctaggtttttatattacatatttaacagttatttgagtcttatattgcaggcagtgttccgtgatctcatggagcttaacattctcttttaggaagacagtagtgtgttaatggtggcaagtgcccataaggaaagaaggagatggaaggtgatgatagagtgggggaggttgctttttcaaatggagtaagcaggtaggtctgagagggtgttgtcatatgagcaaaaagctgaagaaatgatggatgtctgaggaagaatacttcaggtaaagggaacaataaggacagatgtcccaagaaccataatgcgtttgtgtaaaacaaatgagagggttctaatttgagcacccagagtaagggagaagagtagattagatctaagagataactggaaggccagatggtatagttgttatatctgaatgaagtaaagggtcattgtagggttttgggttagaaaagtgatgtaattgagaatagactatagcacaagagtcgaagcaagtagacccttttggggatgctactatgaacagggaagagttatcagtggcttgaatcagggtggtagtggggaaggtgaaaagtggctggatatctggatatgttttaaggaggaatcaacatttgtcaacatactgaatttgggttgtggagagaagaatcacagatggctcttaagacttttggtctgacttgagcagctggaagggtgcagtttaccttaaccagagtagggaagatctggcatttggttggagacatccatgagaagtagagtaggcagttggagttcagggagataacctggctgaagatggaaagctggaagttggtgtataaatactgtttcaaatcattggacaagaacatcatctgaggactggaacaattaaagatggtagggactaaccctgtagcactcaacattaaagtctgagagctgactaaaaatcaaaggagcgtagtattgtgatgtatattgtctgcagtgagaattacatttatagcatgaaggtcattattttggcagatttctgtatggctatgggagacgtagaatgagggccatctccttcctctcttctagggttctacaaagcttgggcttctgttttcctcaaggccaagttcagtggctttgtttcttt

SEQ ID NO: 115854 - DNA, 1031 bp, Homo sapiens
aatgtgggaagtcctcttatttgacctgtgagaatggaaaatgcttacttggatccttttgcacatgggctgctcttctctggccagtgtgcatggcctccatgaacagagtggtgtactccacaactacagtgcaggtggagaggcagatggcctcaatcaggctaccaaagtttcctcagaaacccctcagcagccagtagccttggttagtcaagccatcatccaggataatgagcttacaggaaaatcactggttatgggaggcgaatcagcctctgagacaaaagaggaagtgacttccagtaaaaacaagttaagacatcaaataggagaaggacttccgctttgccattccttctccaaattccactgaaatcacaaagaaatagaaaaataaattcaaagcagcacaggaaaaccagaaaaggtgcttccagcaaacaatatagaaaggaatttttgaaaaaaataagaaacgtgggaatcagtagagaaatctagcagggcataagaacctaaaaccattcaaaggaacaaagtactttgttaactgaagaaataacggagccatacccctaagtccccatcaattcctggagttgctcttggagcagctggctccattgtttgggcttagatgagagtcatgggtatagttttctgacatagtacagcagccccacagcaatggtatgctaaatgaagtcagtctcttaagaatctagtttgcacatctcttctcaactccccattcagtgactgttatgttgctagcttgaaaattggctagggtgggagattttacattgcatggaaatcaggaaatgctgcaaactaggacttcccccactccacccagagctggctgtcaaacatttaccaacatattactgttccagagtaagctaaggtcagaggaaaaggacaataccctggagggtcaggaaactattctaagaagagacgttacctacagagtctgcctatccctaccaaatcccatgaggcagattcttgtaatcaaaact

SEQ ID NO: 115855 - DNA, 2546 bp, Homo sapiens
tcctgcctcggcctcccaagtagctgggactacaggtgcccaccaccacgcccggctaattttttgtattttaagtagagacggggtttcaccatgttagccaggatagtctcgacctcctgacctcgtgatccgcccacctcggcctcccaaagtgctgggattacaggtgtgagccaccacacccggtcacaacttaattttattaattgtacctttatgggtgattacaaagtgtatgcatatatgtttgtatgtaggtatatgtatatatagttaattgtaaactttattaaagcatataatattgctttatactgtttaaaatcatacaataaatgagaaaaatttatgaaaacacctcacctgagcacaggattgcatattagttaatgttggctttttatattctcaagtcatttttatctgtttttttatgaaactaaaaatctttttaaattttagggggaaaaaaatagtggctttgatgtcctctaccataatatgaaacatggacagatatcaacaaaagaactagcagattttgtaagggaacggtatgtattttttaaataagtaatttgtttaacaacttaatagcaatttaaattttagaatataaataatggagaaaactttatttggatttggaataaagtaattgttttaaaatatgtactgtaattatatctatctatttgtatctatcatctacacagctgagggctgtatagtggctcaaagtggctcaaagtttaatacccctggtttgtggattccttcttgaaaatattatctacatatttttcactggatatgctagcaaggtgatataatacagttgagaagtttgtaggataaaacattaacatttgttaaccatgctaaaataattagaaaagactaacttttctgaacttcagtttaattttgtgtttttgtaacttttatttttaaaagtcctaagtatatattttaaaatcttgcaaatttataaaatgtgattgttgttaagactcttagaatatagcgaatttaaaagctattaagaataaatataatttgattatgattcaaaatcaaacaactcaaaagctgctatcctactaacttaaagctattttgtggctaccccaactttgtaattatttatatgaacacatttaaaatctttaccttgataatatagggatactttggctttaaatttaatactccatttattcatgtattctttcaacaatgtatatcccatcagtgctgtgtaccagctacttgtctggattatgggaatatagtggttaagataacagcttctcccttcatggagtttacagactgataggaattggggaataaactattctataagttcggttcttttcttactccctcctctctactggaatcaacaaggaatgcaaaagctcaagtgctctgggtaaggctctccttcctccgggcttctacattatcattggcaggagcaaaggaaaggccgcagaactctgcatctcttggcatgttccttagccttccctcttcccctacacttcactactatcactgtctactttgcaaccatcagggcagatattatgcctttgagccctgtttatgttagtcaccttaagaagtccaggactcctgggttatccttcctttgcccagaatctatccctttctgattctttgggtagtgagacaatccgtcatacttcccctttactactttatttttctccatagtatgtataactgtctgataaaagtgatatttcatttatttatttttctgtctcttcccactagaatataaacccaacaagggcagggatttttgtctttttttgcttattttgtctttttgctctatttatgcacttgtgatagtgcttgtcacttggtaggccctcagtaaaggtttttccatagaatgaatctgtaacttcattatgctgatcccagctatcattatttttgcctgaacttcagcagtagctcgtaactgctctatctacagttgttcttgttttcctgcaacttactctgtctactgtagttggagtggtttttttgaaatatagtacagatcagttgttacctcttctctttcagccatctcaagggcttcccattgctcttaagataggcctgcatattctgaccctaaaactacctttcaggtcttattgttctaggctctatgctaggcatgggatacaacagaatattgtctcacaggagaacatagaaacaattaacaaaaatgagtaataacaaaactgcatacatagtacaaagagatacatgaattacaggctgctccttattctttccactccagagatactgggtatcttatagacaggcttcctctgtctagtccaggctttgtaaatacttattcttctcttcacctagttaatgcctacttattcttttttttttttatttagaactttaatttccattcaaaagaagtaaaatataaattcaataagttggttaaaatattcctaaaatgactccacatttatatttta

SEQ ID NO: 115856 - DNA, 2611 bp, Homo sapiens
ttatttatttatttgagacagagtttcgctcttgttgcccaggctggagtgcggtggcatgatcttggctcactgcagcctccgcctcccggattcaagcgattctcctgcctcagccttccaagtagctgggattacaggcacccaccaccatgctcagctaatttttgtatttttagtacagacggggtttcaccatgttagccaggctggtcttgaactcctgacctcaggtgatctgccagcctcggcctcccaaagtactgggattacaggcgtgagccaccgtgcctggctgattagggatgtttaatctgtactggaaattgaacttctttaccttgctgttaaactcacacattgatatactaatattaacttttttgggtgaacaaagtattactcttgtagtaatagtattttaaaatgacagaagaacttaaaggagcaggaaagagtcacagtactatcagcgagaggcagttactgttaatatttcctttttgttagagagctggtttttgtgcaaatttggttgggaaagagtttggagattagtttagatattctgagtttgaggtggttcacatatcttaattatgtttggggcagttagatattgaacaggtgggtcagtgcaagagtagtgtgaagatctggatttagacattagaagcagaaagttggttggaccaatcaaagtaaatggagggatgatggtggttgtagaatgttcccctattaagggtagcacacattgagaagagccaggcaaaaggtaaaactataagttttgtagtgttaagaaggccaaacaggccgggcgcagtggctcatgcctgtaatcccagcactttgggaggctgagtggggcggatcacaaggtcaggagtttgagaccagcctgaccaatatggtgaaatcctgtctctactaaaaatacaaaaattagctgggtgtggtggcgggtgcctgtagtcccagctactcgggaggctgaggcaggagaatcgcttgaatccgggaggcggaggttgcagtgagccaagattgcaccactgtactccagcctgggtgacagagccatattccgtctcaaaaaaagaaggccatacaaaatgtgtattctgtatttataggttacatgtctgtaggataatttgtgtcttttagaattctatatttaatggctgtggatgttttttacggaataaaatctcatatgctaaacagtagttatataaaacacagttttctagtgtgaaatatttgctaatattttagatctgatcacaaaataaattaagccatgaatgaagttcaggatttcagacttgatgatatatttagttttgtgcaaatgactgtcattaatctcttgttctattaaatgtgcatcacagtgttgaagaataataaaactaagtacaacaaagaattattaaatacaaatgacacacttatcacagtgaaccagcttacagagacagagagaatacaagaagtagcactcatgtatttcctgttcagataagcattggtactaaagataaaaagagttgtgattccattaaaattttttctgtggctgagcgtggtggctcatgcctatgatctcagcactttgggaggcctaggtgggaggattgcttgagccctggaattccagattagcctgggcaacatagcaaggccccatctctacaaaaaaatacaaaacttagctgggtgttgtggggcatgcttgtagtgtgagctactcaggaggctgaggtgggaggattgcttaagcctaggaggtcaaagctgcagtgagctatgatcataccactgtactccagcctgggtgacagagcaagactgttttaaaaaaaaatttgtgtgtgtgatataaattattttagttctataccagaaaggacatttgaagataggccggaaattcatgactacatatatgtacttatttttaacatgtaatttttgaggtatctttttgttttgcacttttaattgtattttgataactttgctgtttttggtcactaaataagaagtattatgatgtggatatttgatttaacagagctaccatagaggaggcatactccaggtcaatgacaaaactagcaaaatctgcaagcaattattcacaacttgggtgagttaatttcttcctctttttcagtgtttatttaggcaaagttcttaaggattctaggttccttttgaggacataacagttcaaaagcatagtaaaatatatgcttatttaaaagtatctgtaaatattaatatattcttcacttgatagaaaatataattgaacttgctgaatcagtcaatgcagtcaaaactaaatgaaatttattttttccctttttaaaaactagtcattcaatagtgtttgagattataaatgttatcttatgcacatgcaatgtatttattctagttgtctgtaagttcctatttaaattctgttgtagtttaacagtgatctttaaaaactcacttaagataaactttattgaaatgattaagatgcattaaaaatgtctcctgtgattttatagactgtcattaaatcttccttttaaaaatttgtatt

SEQ ID NO: 115857 - DNA, 1094 bp, Homo sapiens
ttaagacttgtgataatgtaattaacccatttctatattcctgaggtccaaaaatattttaaataaccaatgacaaaaaaaattcaaggtcagtctgtcaatcattttattcattattttaatttcatcttttgcctaaataaagttgccatatataccactattatttccactggttccttgttagaaccttaattttcttttttacttttaataagttattcccatattttttattttcttagaacatttgcaccagtatgggatgtattcaaaacatctacagagaaattagcaaattgtcacttggatcttgttagaaaattacaagaattaataaaggaagttcagaagtatggagaagaacaagtaaagtctcataaaaaggtatcagtttttttcttgttaaataattgattggtcagatattgaatactttatagttcagtcattttgatggatcatttcatactaaacagactaaagaagaagttgcaggaactctggaagctgtccaaaccattcagagcataactcaggccctccagaaatccaaggaaaattacaatgccaagtgtgtagaacaggagcgtttgaaaaaggaaggagctacacaaagagaaatagaaaaggtaatcataataaaaattacatatctgtggtttcaaagcaccttgacatacaaaattgcatttaacatttagatcaaactgaaaattatctcattttaaagatgaagacactgtgccttacagtcctagtgattacccaagtaaaacacaggagatttgtaaagtatgttatctgtggtaaataggttagcgagcactaaaaaacaatgattgatttgagacggagttttgctcttgttgcctaggctggagtgcagtggcgcgatcttggctcactgcagcctctgcctcctgggttgaagtgattctcctgcctcagcctcccaaatagctgggattacaggcgcatgacaccacatccggctaattttgtatttttagtagagatggggtttcgccatgttagtcaggttggtctcgaactcctgacctcaggtgatccgcccaccttggcctccccaa

SEQ ID NO: 115858 - DNA, 1041 bp, Homo sapiens
cattaaatcttaatagtttgtacttgtgaaaaagttctgtatttgattcatctattttctctatttgtaagcagtatatatttttgttaaatgaatgaacaaatgggcatttaatggcaagattagggtgttaagaaggttggaatggagtggctattagaaaattttttaagtgaatgctaaataattatggttaatgtttagtgagctcttactgtgtgccatgtaccatgccaaccactttgtaggcacactttgattttcagcaactttttgaagtatgtactattattctcattttacagatgagggaaatgttcagaggtaatgttgagagatttgtctaagctagtacatggcagaaatgggattcagttctgggatttttgatcctggatcacaaatcaagtcacatgctttggaaaaattagactagaactaagtgtagatatgttgacataaattttaattttgagaatgcctttaaaccagggggacttgaccttaaatgtgaacctaaactgatgaacgataaccttttttccctgggtcacaaatgatccagagtatatttaagcaaaaagaaagaatacagagaatgagcttgaagtggatcagtgtttttcttaaagtattacactagagagtaattggaacattaaaatgtgttctgaatcaagccaattttattttgatttgccatttttttgtgactttttttcttttccctgatgcaatttttcccactctgctttggcttcctgggctctttttactgctttttgcttttatatgccagtgtcatttcctaagacactgctcagccaaaggctgacaagtatgtggcatgtgctgccttattcatggcagataccgttgctagatcattgcattcgtccccggaggagatctcagtctctctcatctcagtgctgtaggcagtcactgccaatattgagtgttggtactcatgttgaaacctgtcatctccagcttagttcaatagagactttttgtttgcgaatgtcagaaagccatata

SEQ ID NO: 115859 - DNA, 1050 bp, Homo sapiens
aaaacttgtcctgttgatggcctgagatttaggattgattccgaagcaacagggattattaattaaatatttcacatattttgtacttttcctcagtccacaaaacatttgtggtgatcaaagattaccgttcagtaagttgcttttcttcttgtaacatcttttcaaagttttaatccaaattaggtttgaatggattctttaggttgatggcttttcttatagcatttatttattcctacctgatgattaaagcatcatatttaagaattgttttgctttgaatcattgacctcttagagctgttcttctgttctatgagtttaattgaactcatagtggtgttttaaaataatgtgtaaaagagcatcaggagacagagccaaaatggttttatttgcttttatacaaactaaattgcccttgtgacccaacataaaatttaagtgctaagagcagttatttattttgacaaaagaattaattgagtctaaaacagttaaaattccagttgtagcaaactattcattaagactctcactctggctttagtactgtcaaaaaaaataacttgtcttatgattaaatagcagaatgatgggcagtggactgcatttgaaggagatgctgaataaactttccacttgtgaaacagttcagaagtgacatgctacagggggggtcagaatgtgcattgatatccagctgagttgtcaactggcactgagccaggcacgcaaagccttgccatgtgaagcggcatgtggagcatatgccatttgtaaaagaaaatcttgttcatgcatgatttaatggtttttttaaaaaggtagtatttagttttattatgccagaaatcattatttctatctttaatagaaaagtttgtgtggatggtactcaatttaaaatttttaatatatattttttgatttgaagtgatttggcatctttcaaaatgtgttttttttggacatttttctatttcaaatggattttaagaggatgtttagaaaacataagagaaatcaagatatgtttactatagga

SEQ ID NO: 115860 - DNA, 1031 bp, Homo sapiens
ggggagggagagggacattaagacaatatttttagatccccctatttgtagagaaatctttcttgttaatcaatcagtggctttcttttttaatggaatgatcaataataatgctgatcatgaatttgtacatagttaagcttcacatctcagaagaaccagtaacaaaatcctctatcatctactctctgtttcaagctctattttaaaatttcttcatatagcaagttataccagttaccattaataaattaaaaattatttcacaaaaaaagctagactttcatgaatttatatataaaaagtactaaatgacagcttagtgggagataattttttagtctcatatttagcttctgggatatttcattaggagagtaattcatgttttgctactttctcacactgccaaataatttgatatttcacatatatgaagtatgccatattttatggcaattaaggctagtctgagcagtcagtcatttcagggctattttaattgttttctaatgatttccactttatcatcatcctcttctacaatctatctctcatagcaatgctaaattaattgtccttgaagatctctttgtgggtggatgtgtatgatcttacatgaaaactcttcctatttcctgtaagctgtagttcacattccttgacctgctatacagttagagagatctggattataatcccaaggtcaccacttaactagtctgtaattagttcatttattcattcaataaatatttacttatttacccaacttattatttacctggcattttttaagtattgaagatacagtgatgaacaggacagatgaggtcccaagcttatgttctagtagtatttactatcttggtagccctgttcttcccatgaacaccaccgaggattcagcaaccacctttaccatgcttgtttcctctcattaacagtactgccagcttcttgaaagcagaaactgcatattcttgtgtctctagttttgtggcatcatatgtaattggttttcagtaaat

SEQ ID NO: 115861 - DNA, 1223 bp, Homo sapiens
actgcacctggccccatattatacttctaatgggtctgctgtatcatctttttatctaaaacaataaaattatattttgtggccctctaaaaagcaaacatgatttgacctttataacattatttgacgtttataacaaaatttagtataatgaataatgtactttctttgaagttttaagatatctccatatgcttattatgtgtaaggtgacttaagggaggcttaggaaaagaaaagaaaattttatctataaagtaaatgttctatgatcttttgataaacaatagactatgttttattaacataagaaaagtctaaccaatagggttgagtggttgctaactttatttctgtcatccacatttagcatcagcagttatgagcaaattatgtgtgaggatgcaagatgtatccataagtttaatatgtttatcaggaatgtttatgtttctgtaacaatatatatttattttaaaggtataaaaccaaggaaaagaaagacctttgctttgccaggaatcattaaaaaggaaaaagatgcagaatctgtgtaagtattttaaatatcgtcaaaatcctttttgtttttataagtgattaagaataagacttttgaatttggaaagaaaaaagtattttggaaataactcaaaagtatatgtgtaaggtgtgaaaaacaagcctttctaaatattaataaatacatttgccaattcctctggttttagatcaaagtattattaattatttgaaaatgttaagacattatagacaaaagctttaatgtctagaaatggaaagttttgaaatatccttatttttgtaaaatgataaatgcatattttaaaaaattaaaagtgcaaagaaaactaaaaattcatcaaagtcttaatgcctaagagaaaatctctggtcaactatttgatgaaaatccttctagacaattctgagtgtacaggcacatggtgatacctatacatacattgatggaaaatgttaaataggggagagaaaagccctaacattttaccatttatactaggtcatcatttttagatggaatatttggtccacttataagtctgatttaccttctttttttttttttgagatggagtttcactgttgttgcccaggttggaatgcaatggcgcgatcttggcttactgcattctccacctcccaggttcaagcgattctcctcctacctcagcctccca

SEQ ID NO: 115862 - DNA, 1037 bp, Homo sapiens
attctgtttttttcttgggaaacatgccagaaatcaaatctgtatactttattttaaaatgtggtgttcttactaatttattcttagctctattaaaatacaacattgtgcgtgcatttgagttcatttaagagcttgtcattttagaaataacagcaacaagaaccatggtcagtacttttctgtgctttttgttttattttaaagaagggttgcttatatttcttgattaaatgtatttctttatgtgtaattaaagaagacatcaaatggagctccctttggttacagtgagagagtagatttaccaaatgctgttaagtaatgtgtagacagacatatttttcaaaactgttcattagataccgttcatgttgataagtataggggtttcaaacaatctctgtcctttgcttattgttcttacctgcgtaactattgtttcctttgatcccaaaacattttgatcttttacagcatcatagtgtaacaaaataactaaaaatattttgtgaaacactgtgttttatgttacttaactaagataaaattagtattttgttttatattttggccttaaaatacaattatgatttgttaacaaatttatatgaaaaataagaaatagacttataatgagttacggggttaaaaccatcagtgtatttttggagttacaatgtttaccttaccacttggttactctgtttgatacccttggttaactaattaatgaaaagcagcagatgtgtttggcattaactttagtactcattttatttctgcattatttttatgcattttatttctgaattatttgtagcattaaattgatgatgtaaaattaaatacaactttaatacttcatgttttagtttacatatattccttttaaataaaacatttttaattcagtaactgatactattttataatgatcaatattatccaattttgaactttacttagtacttatccagaatacaaaagaatacagaattctaatactgaataagaagtgattgatgaatttgact

SEQ ID NO: 115863 - DNA, 2579 bp, Homo sapiens
tttagtctagtgtctaatcatattggcaaatttcttttcaatttaattttttgttttttaatttggaaacaaggtctcactctgttgctcaggcttgagtgccgttgtgtgatcatagctcactgtaaccatgaactcctgggctcaagcaatcatcttgcctcagcctcccatgtagctgggactacaggcacatgtcaccatgcccagctgatttcttaaaccttttttttttggtagagttggggttgtgttgcccaggctggtcttgacctcctggcttcaagccattttcctgcttcagtctcccagagtgctgggattacaggtgtgaaccactgttcctggccaacaaaggttttgatatgctcatactgttggtaggaatgtaaattgatactgtctgtcttgtggatagtttggcagtattgccccaaaaaagaaatgtgagttcatttttgaccatgccatctccctgctaggaatttactgttacagttatagtaacaaaactttacacacacacatacacacacacacacacattgtattagtgtgtatatgtgtgtgtatacatatacacacatatataaagtatatatgtttgtacacatgcagacacacttgatcaagattcatgcatatatagaaagtgataaatagatatttatttcaacattgtttatattagcaaaaaactggaaacatcaaagcatccatcaaaatgggaactggttaaataaattggtggggtaatagatgttataaaggattaagttgatctgtgtctgctgatatggaaagaacttaataaaagcaagtatgatattttaagtgattgctgttttaaaaataagataaatatgtggatatatgtattatatttattttagaagaatgagttacaaggtactttacttgtggatacctttggggccaagaattacagtgatcagtagagaaaggagacttgtttttacttattttattttgagatggggtcttgctctgtggctgatgtgacttggatttgtgtctctgcccaaatctgttgtcaaattgtaatccccagtgttggaggaagggattggtgggaggcaattgggtcaggggatagatctccccctcgctgttctcgtgatagtaagtgagttctcacttgttgtttgaaagtgtgtagcatctcccccttcactctcttcctcttactctggccatgtaagatatgcttccttcctctttgccttccgccatgattgtaagtttcctgaggcctccctagccatgcttcctgtacagcctgtagaactgtgaaccgattaaacttcttttctttataaattacccagtctcagatagttcttgatagcgatgtgagaacagacgaatacagtcacccaggctggagtgcagtggcaacgatcatagctcacttcagcctcgacctcccaggctcagccattcctcccattccagcctcctgagtagctgggaacacaggcatatgccaccatgcctggctatgttttttcatttttagtagaggcaatgtctcactatgttatccaggcttgttattttcttttatttgtagcctataaataataacttacggcctattcatggcttcctcttactaattattttttaaaacatcaataggctatcatggtagggaaattattgttcatttcttattcctttctttaaaggtctatgtaatttaaaaaattatttttagcaactgcatcttttgaaagttggccaaggaagtgtaattgctctttttttcttttttctttttctttttctttctttttttttggttttggcctatgtccacattccaaacagaaattaagaaacatttcattgactcttgagctccattctggtatatattttttaaattgccaccactactttagccagagtaaacaactgcctttaagattgatgggtgaagttgcctgttctattcttgttcatactgcttttgacctagggcttcactccagctgtatgggccctaatatagaaatcatggattgaatgggtaaagatgaacacaggtaatgggtacgtttttattaatatcaggtttctgtgcatagttctagcagtaaaaagatagtacactgagaatcactgcttttaagaaaaactttttattttgaaataaagatgcatagaaggttgcaaagatggtgtatgtaacagtactgtgtacttgttaccccttcttcctgacactaacattttacaaaactgtcatgtaatatcacaactgaaatattgacactaattcaatcaaaataggacattttcattagcacaacaatctctcatgttggttgcccttttacagccacttttccttacgccttccttaacttctggcaaccactaaccttttcttcattcctataattttgtcaattcaaggttgttctgtaagtgaaatcatacaatatgtatgcttttgagattggcttttttccactcagcacagttctttggagatgtatccaggttgtggtacatatgaatagtttattttttattgctgagtagtagtc

SEQ ID NO: 115864 - DNA, 6077 bp, Homo sapiens
cttgaagctgttaaaatgcattaaaactaatttctgagttataatatttaggcaacttctgctgtttttaatactcccagctagattatttttatctttttattttgaagaattctaaacaaattgtgtgtgtgtgtgtctgtgtgtatacacacatatacatatatatacacatagatatatacatacatatacatatacatataaataccatcatggtctctcattttggggtctcatcagtcagccccagcagcttgccccagccaatcctgcccatccatttcctctgcccaaattctagaatattataatttcatctgaatttacattatatatatctttacacttgatcttagccaaaaggccaagaagcgatacatcatatatatctttaaaacataatcacaatatcatcacatctagaaataatttattactccttagtattttgaaataaccattcagtatttatcatctttgatgtccattttattatgctttgtttgaatttgttgatatgtcttaagtctctcttgatctacaggttccccttccctccctccctctctgtttagctttctgctatttatttatttatttatttatttatttatttatttatttattttgacagagctcgctcttttgccaggctggagtgcagtggcgtgatctcggctgactgcaacctctgcctcctgggttcaagcaattctccagcctcagcctccagagtaactgggattacaagcatgcaccaccatgcccagctaatttttgtatttttagtagagatggagtttcaccattttggccaggatgatcttgatctcttgacctcatgatccacccgcttcagcctccaaaagtgctggaactacaggcgtgagccactgcaccgggcccgctttctgtgtttttattggcaagactaagtggtttgttttatagtttcctttagtctggattttgccgattatattgccatactgtattatgttttacttctttatattatttaaattggcatttggatctagaggcttgatcagatccaggttcaagttttttttggtcttgttttattttgtcagggctgcctctctcatgacacacatggtgtctggttgtcactctttatggcatgttggcagacattgatggtttgtcttagatagttttactagttcacccagacttaaactgcataaggaggtgctagatcttatatttccatacagcttatagcaataagaatatttagcttgataatagctttcaaatcacatgtactttttaaactaacttattcttcctcatttataacagaaactgtagattttgagcaatctgaattggtccccacctcagtgatttcttgccctgaaattatgagttgtgtttctcctgtttcattttgcaggtctttcctctttcaggtagccagagcatggagtgtgatttgaagctaattaactaaaaaggtgtaatttttcttcggtgttcatcatttcattaacctgttgatatctgagaagcggtttggttcctaagtaatacctgaggctactttgataatctctaataattttgtacattggagttgtcattataatttttttttctttttcccttagaacattcctgatgtagatgaagaaggctacagtattaaaccagaaacaaatcagaatgatatcctttcatcatctagtattcttaaggattatgttggcatataagtaggcagttataagaaaatcatgtattaaagcctcttccaattttttattaattataaaatatggttccttgtttgtcatttgacatgttttttgttgttgttgttttttgttttttttgggttttttttgagacagagtctcgctctcttgcccgggcaggagtgcagtggcacaatctcagctcactgcagcctctgcctcccgggtttcagcgattcttctgcctcagtcccccaagtagcttggattacaggcatgcgcaccatgcctggctaatttttgtatttttagtagagacagggtttcattatgttggccagccaggctggtgaagaactcctgacctcaagtgaaccacctgcgttggcctcccaaagtgctgggattacaggtgtgagctaacccgactggccttgacatatttttattaataaaagttagtagtcttatttctgttaaggtctgtttttctctttggtttttttgagatgaagtctcactctgtcacgcaggctggagtgcagtggtgcgatctcggctcactgcagcctcctactcctgggtgaaagtgattctcatgcctcagcctcccgattgtctgggaccacaggtgcatgccaccatgccgagctaattttttgtatttttagtagagacaaagtttcaccgtgttagccaggatggtcttgatctcctgacctcgtgatccacctgccttagcctcccaaagtcctgggattacaggcgtgagccgtcgcacccggcccaaagtctgtgtaactcttaaaggtttcattccttttttaaaataaatgtgtgaaaaactggttatacgtctaaggtaatttaaaaacaattctttaactgaaactcacataccaaagagaaccatttctactcatctagtgattctgactccgaagatgaagaaccaaagaagtatcggatagaaattaagcctatgcatccaaataactcacatcacacaatggcttctttggatgaattaaaagtatctatagggaatataacactctccccagcaatatctgtaagtacaaacacgtttgtactctttatataaaagtctttatttttcttacctacctgtgtctggtcaaacattacttagcaattgttaagcatgttgactgaggaaatacttagtttataatttttatacagggaaataaacttgtgaatttggcttaattttgcttttgaaagtagaaagtgaaaatgtcaaaaatttactatttctgccatttgttgcatttcataaacagtgctgtgtgtctctggcagaattctttgaattggcagtattaatttttgcctcatctaattttgaagtgtttcttctatgttttgtgagccttatgtaggagggaattttataaaaatgaatttaaagattaaattatatatttgcattttttttagtctgtcactgtaacatttattttcccatacttttcatacaaggaaaggcacagataagagttcttagtggtaatagttaattcctcaattctaaaataccgtatttaataggatttgagggagaaataaaacattatcccagtaaattttttcctcattgatgtcaattttaaacttaaaaatgttacactatgtgaaaaaagcaattcttaggataagttaagtatatctatatgtgatcatcatgattgacattaagtctgttcttcttgataatgaagaataaaggttctcaccgtttcatattgttgtctaattacatattttatgtagttacatgtatttgtttggaaaaaaaggtggttttctcccagtcatgtacttcagaatttagtttcagaactattttcttcctaccaaaaatatttctgaaatgaggttttattgtaccattactatttaacgttaagattaatgttgaagtacagagttgcttaaaagttggtgaatatagggccgggcatggtggctcacgcctgtaatcccagcactttgggaggccgaggcgggtggatcacaaggtcaggagatggagaccatcctggctaacacagtgaaaccccgtctcttgaaaaaatacaaaaaattagccggtcgtggtggcatgcgcctttggtcctagctactcaggaggctgaggcaggagaattgcttgaaaaccatgaggcggaggttgaagtgagccgagattgcaccactgcactccagcctgggtgacagagcgagacttcgtctcaaaaaaaaaaaaaaaaggtggtgaatatatacgaagtatgaggttgtaaaccattaaaaatgtgtgttatgtaagagcataactaatataaaatatgtatgttaaatatataaaacaaaagcctagaggaatatatgggtagtgagattgtgaatagttttaaattttctcttttgtactcttctcttttcagtttgtttttaaaaaacaatgaacatgtattaatttcatactatgaaaataataatcagaacaattttatagttaatattggataagaaaagattatatctgaatatattttgctgcctcatttgcttaactttttcccacctgacagtgtatgtgttttaaggtgtatatagtttagatatgattgaatagggaatgataaattattacagcacaaaaatacagtattcagaattctaacctaattttctttttcttccatgtactactagagacacagtccagtaagtacaagattttatatttttgcccattgacttttaaaatcattgtaattttggaagattgactttcaaaatatttgtattaaatttttagattagcaagttttagtgttttgttgtagatgttgctttaatattttaaaaacattaggtgttaaaactacatgtattattttttgctgtaaaacaaaaactactgttttttctctatatcttttatgtaaatacactttacaattgagcagatatactaaaaacaacataaaattaggttcccagtattaacattttaccaaatatttaattatcaaattcatttgttttatggtacctattttgcatctctgttttaggtacagatgaatcggaatttgtctagtaagtttgacatttgaattgtttattttatgtctattaaaatttataaggcaatttgttagtcttttacctttagctgtagaaataaatgatcttttctcatcatgagccctactgcgtggctagaaggataattattttaaatagaaaacagcgtatctatattatttcctgtagagctgagagacatgctttaaacttcaatacatggctacaacatttttcagaaatcaccaaagccaaaaagtaacttctgattcagaatgttaaacggtttcactggcattctctgtcttattaaccagaaagcgtttataagatgagtaatattgaattttacctatttttaagttgtgtcacaattacaaattctattataatttaattatactaaaaattatactaaaaacttttctaaggtgctaataccttttgcagaatcatgcattaaaaataacaagggttgtgggaaaaacagttgaagcagcccactcaaaagctatgtaattttgttaacagaagacttaacagaaactttaacatcagttttattaaaaattctaacagagtttaagagacctagtaaatgaataataaataccaaaataaaagtaaggattttatctttaaagaaatgttgattgtagcttaatgatagggggtgtgaggaaaatgaggataaatgcagggtgctgagttgtggagatgagagcaaaatgcagaaatattgaagaatagcacaataaacactgaggcaaaacaaccaaccaaactgagccaagtgaagaatgtagagtgaatggttatcatgtactgtgatactcctccatagtttgtggaagttactcatattgatgtactttgcattcatcaggtattgcttggtgatgcaaagaaaacatgaaggtgcagcaaaaattgcttatgcaccaacatgagtttttcattaatgatgctattcccctgtttaccacttgcttgtgaaatgaggcacattacaaatccaaaaggtagcaaaacaaactatcttataaagagacttgctccaggttgctgtaagattcttaatttttcaaaatatgacatcctcaagagttaataactactttttgtcaatacaataatcactaataatattcttagaacttgaaaaatgcattcatgattcatcagttaaaattcttaactagaatttatgtatttaaacatttttctaatttttaaagttgcaaccca

SEQ ID NO: 115865 - DNA, 3102 bp, Homo sapiens
tttcagttattttaatgtacacaatagaaaacttgttaaaatattgtttgtatttacattatcaattccaaaatttttaattgttatagtgttgagatatgtgtatagagtttctgtttttcattaaaatattttatttctcagattatgaagttttcatattttaattttttaattagatgaggagttaacaaaatcaaagccatctgctccacccaatgagtaagtttccatgtttaattttgttaaaaaatagactttattttttagagcagtgtttgatttatggcaaaattgaatggaaagcacagagatttccctttatgctccctgccccttcatatgcccagtctctctcacagtcaaattctctcaccagagtggtacatttgttagaatcagtgaacctgcattgacacatcataatcacctaaagtccacagtttacattagggttcattcttggtgttggacaaatgtgtaaggacatgtattcgtcattatagtatcatacagagtatttttgctgccctgaaaatcttctgtgctccaccttctcatcccttcttccacacacttacattttaagtatccttttgtctttttttctagagttttattagctctatagttttaattccagtaaagttctgttaatcatcctgttttctgagctgtcaaatgcaatgttggagtttttagaagtttaaaattatttctcgcttggtaatatgtccttttacaataaaaaaaatctatttaaccacagttggccttggtagcctcactacttctaaataaatgatgaaaccctaaattcatacatatctgtatttcagctggttattctcatgggaattttctcatttcttccttcagttttgactgtgacgttataaaataatatacttcgtaagcttcaaaaaaagaagtgtgtcaagttggaaagggagagagaggctagaaggcatgttgccagctcttcttaaaaaaaaaaatgttaagccaatgtttcatgggtctctttttacttctgtgtctatcagttaagaatactctctttgagttaatggttttttgcttgtctgttttgagacagggtcttactctgtctctcaggctggagtgcagtggcgtgatcatggctctctgcagcctcaacgtcccaggctcaaatgatcctcccgcccctgtctcccagctaatttttttcaaaattttttttttttggtagatactgggtcttgctatatttcccaggctggtctcgaactcctggactcagactcctgagcctctcaaagtactgtgattacaggcatgagccatcaagcctggccagagttaatgtaaaatacaagtaaaagtaggcttagttaaataggtagtttacaattatttgatacttttgaggtactaattgagcatagtggtggtatttattggatgtatcatttttttaaagataagttgttgagtgttttaaaactgtttttaggagtcatacagttgcaatgctaggctttatcatacgaggtatagtgtgctttcatgtaggtgcatgttgagatgctggatatgtactcttatgtaattacagcactttcattatagagggcctgtttttttgtgtgtgtaagatttcctaaaattttttaaaataatggcagtttgatgcattaaaatatgtaagccacctttctgtacttaagggcttaaaaaaatcactttaccctttttcttcatctttgaaaataagtatggccttataaaattttaacccaattttataccacttaaattttcttttcaggattgggtgctatgtgtgaaccagcagatgtgagcctgttttagaatcaagtagctgtatgtctttgggcagttcatttagacgtgtgctgctcttttttatttgtaaagctgaaattattattcccattatgatagcccccaaggtggttgaatctaacaaggcatgatgaatgggaattaatcttccccattctcctctgctaacttcacatgttatcttaggttacgcttctaacaaatattggctgttaaatctgttaattaatttctacacatatactactgatagagtatccaacttttaaattaaaaaaaattattttttttacggacggggtcttgctctgttacccaggctggagtacagtggtgcaatcatagctcactgcagcacagaactcctgggctcaagtgatcttccttagcctcctggatagctaggactacaggcatgcaccaccaagccaggctaatttaaaaaaatttttttgtgtatattgggtcttgctatgttgcctaggcttgatcttgaactcctagtctcaagtgatcctcctgcctgagcctccagaagtgttgggattacaggtgtgagccatggtgcctggccctaactttttaattatgtatattgagctgttagaattctatgaaataaaaataagtgactagaaattttatactaataaaatattctcgttaaaatttttgcttttaaaaatattatggtagaaaaggaaccagtgatttacttgcttgggaccccctatttggaccatctcttgattcatcttcttcatcttcactaacttcatcatcatcaggtaaatatatatatgtatatatgtatttttttaaataaagaatactttagttgctttttctcattcactttttgtgcattgtacttaatgatcaaaatttctaaaaatttgtcctctgtattgccaaataaaagtgattttattctggttttgttctcttagatactctatgacttaaacaataaaaattggtaaaatactaagtggttttttaaattggcatgttatttctaggcatttcatatcattatccaaataataattcttagtgtttatagataattcaaatacaaaatatatatcaatgtaaccagttctttcttgttggaagtttaagttgcatctaattttctagtattatgaacatccatagaaataacaaattttgtgcatatgtctcataatatgcttgtagtaatttatcaatttaaaatttatggcttacaagatgatgtccatgata

SEQ ID NO: 115866 - DNA, 1050 bp, Homo sapiens
cttcacaggtcaatttatatttcttgaaacactgcttctaatagaaatttgtagcactgatctccaccccaccaccagcaaaaaataaaacacaggacactgaagaaagtaaacaattgcagttatctccttcagaagcttctagaagcagtgcctaattgacctatgcagatataatatagattcatttataaacagtggtgttaataagtattgttactagcttttctcgaaaagcaaattttgaactgaacttaatacttctaccaggcttggtttgagtcaatctaaatgccatttggacagaccacttgatcagtaataaatgcctctgctgtgtaaactctctcacaagtttgaaataacataggctagtgctagtttcattgatgatgaacatatctttaaagtagatatgtaatacacagggaagtgttatgggcttcagattttggtgcacatttcttccagggtacagcttcaagtgtgagtgcagcatgaaagaactggtactgactggaaaaagacagtggcctcagaatctaagcttgatttactagcttttttgttttccttaagcaacctgaacagcgtttgcatcttttatctcttattatggtatgctttctaagtgattccctacgtcccatgcatgtacaactttcaatccgtgtgactacctttttctttaggtctcttcctactacctctatgcaccttcctttcatgcctccttgattcctccattgatgattaaaggcctttagctttgcagtttatttccccgtgtgtatacttaggcccacttatatatttttaattttgtacatctctaaactttgaaaacatgctgaatatgtttcttcccacccattatatttttcagtctctgaattatagcctgtattttagtgtgagccaaagggctttgaaaatcatttaagttaatttattaatgattattaaacatgattttaaagagggtttaaacctatttacttccattttttttactccttctttgattatgctaatacatttgtgactttt

SEQ ID NO: 115867 - DNA, 1129 bp, Homo sapiens
gtcctcacagtatagaaaaattttcccagctagtgcttcctttactcttccttgttaccacagtgatcatacctgtgagacacgacattgtccaggaggaaagagatttcctgagaaagttggcacattataaaaataccattcagtatccattgtctcacaataaagaagcggttttcatataattctacttaaagtcaaatgttaaggaaataaatggtggcttgttcttagaccttaaaagtatactgcaaggaggattatggaaggcatctagctcagcatttaaaattttacacataaggaaactggagtccacatcatccagttgacttataaaagtacatgcatgggtgggaaaagcattggtttttaaaagtcatcagatagagaaaatctatagactctatgcagtgaggctctcccagtctatttgcctttgatctggtttgttttgcttcatcttctacactaattgccagtttaattaccagaattaaatttctaagtccagtttaatcttttttcccttgatacacatttccagtggtttctcagtctgtgtggttgactgttttagctgaatgtacaagagtctttataaagctgcctcaacaacctacattaccagactaactgtccatctttctccccttttcaacctaggttccagccacttgaaacttttcagggttccttaaacacatcatggtcttttacatgtccatgtcttcttcctgtgctgtatctcaaatgcccctcagttttctatgtcacaaattgacttctttctttaagacctagctaaacatcaccacctaggcaaaaccctctttgatcattccttcacttatcttccttatacccagatactttgcttatatttttgttagttcatatatcaccttgtatgtactttttttgtgtgtgttacctttactgggctattccttcgtcagtctcatatcctcagtactttgcatgatgcctgttgggtggtacacagttatgaaatcttcagtgaatatattgaaaagcttcggcaccaagtattgaaatggtgatatctttcttttccgaatgaacagacttagtggaagtaaaataaaagactaggtacaagctgcca

SEQ ID NO: 115868 - DNA, 1051 bp, Homo sapiens
cttcatttttattttttgtttgtgtggttttaattttttcccacagaatctatattttagtcctaaaaaacctaactgggacctactagaaagcaggcaggtggtctgggtaaccttattttcgctttaggttttttttttttttttccagttatctttagattattcaggaggttttgtgtttgtgatggaaactttaatttctattgaattggtacatattagtttatggtttgagacattgctggcaataggacaaccaaaagcaggtgacagtgataatacaggcaaggcaggttgtatgtgaattttatacaacaaagatttttaaaatctacctaaaaagttctctttctttgccatgatttttcaacgctgtgtggatttaagtttctgattctccttgtttcttgaaaatattttctttttctgcattattttatttaaatacaatagaagatgataatttgattgggacacacactgaaattgaaaagcactgtgagacgtcaccaggtattgtatcagaagcaaatgtatgtgttgactaatggtccttaagtgtatctaaaatatttcgttatccaacttttccttttccagaattgtatgatgtctcagaaatcaagaattatgctaagattaactatttcagttttgtgctaattccatcaaattgctgtacaggatccattatatcaaatccccaacttgctgaataggatccattatatcaaatccccaactataaaaacacgatatttttgcattttcttctctgctttcctcaactcagctttaagaaatgtcaataaatcttaattctaaagctatccaaatcaggtaagaagtcatccaaaaagaattaaaaggaatatgtcagttaaaaaaaaaacctctaatacctaaattagtagggcaaaggctgtcatatacgaaaaccatacagatgaagttagaagcatggagatgataggagatagtagggagtgggtgtctgtgttttatttctgagcggaaaggaattctacataaatatccattgattgtt

SEQ ID NO: 115869 - DNA, 1034 bp, Homo sapiens
gcagtaaggcacgcagtggtaagaagagtgcgtttgtgaagaaaaacaaaggcaatgcactattttgaggggatacttcacttaggttacatttaaaacaataaacagaaacctgaacacttgcataaatttgtttacattttaattttgctctgtagacactgatctttctctgatttgactctaaaaggtgtcttatctgagtgaactttggccagggttttttttttttaaataatgttattagtcaagtatttattagtcaaatattgaggcaaagtaatgtgggaatacaatacaagcatcagacaaagaggaggttaaagagaattataataataatgagtagtgtatgaaacattactacttggatagaaaaacttaaatacaaaaatcctaaattggccttaaataatgccctgaagtatatgattgatagaacctggaggaatttggtatttgaatgtttttgaagccaatatttttgaaattttagctgtttagtcaagggcttttttattctgacattccttaaccattctgtctttccatttaaaagaaatgtctgtgtgacatgtcttcctggtttttttttgtcctttgtattaatgctccagtttgttttatactatatttcttagcccccagatttatcatgggacatcactgaaaccagtggtagggtcgtttgtgacagcctaacaatgtgaatctaactatcttgatatttaatttatgtctttctgaaggatttaacaagttaattgtgtatattctaggtgtgtcacggggtcccagccctgtcagccttggaaatcaggataccttacctgtggcagttgcccttacagaatctgttaatgcctactttaaaggagcagatcccaccaagttagtttttaaaatatatgcatgtatgtgtatgtatgtgtgttgggtggaggaggtggtggggcttggtggtaaattttaagaattacattttgattctgtgtagattacagttttctgttgtttatttacctgcttttttg

SEQ ID NO: 115870 - DNA, 1220 bp, Homo sapiens
tgatgattgcattcaatgtacattcattcatcaaatacttgagcacctattatttctaagactctgttacatgtgcactgaggatactttagtaaacaaaagagttctctcctgagcttgcattatagtgagggaaaactaaatatcaaagaaacagctgtatgtattggatattgatacacgctatgaagaaaaataaaccagggttagaggctagagaataacattagatagagggctactattttagatagaatgatcagggtaaacttttttgaggttaatttaagcaggtagttgaaagacatggaggagcaagccatgcagatatctgaggaaagtattccaggaagagggaaccagtgagtgtaagataccaaggtaaaagcatatttggtatattcaagaaacagcaagcaaaaccatgtcactgagtaggagtaaacaggagagtacttgaagatgagtccggagaggtatgagaccaggttaggcattgtaggccatgataaagaatttggaatttattttgagtaacatggaaagccagtggaggctttgagcagaggaatgatgaaattacatgtgttttcagaggagcgctggttgctgtatggagaataaactgggggcagagggtgcggtgggcagtcagaattgatgcagagagaaagttagaaaattaattacagaagtccaggtgagagataatggtggcttgtataagggtattagcagagcaggtgatgagtagtaatgagattctgaatatattttgagaacagaattgtcaagatttgttggaggcaaaatgctaagtttgaagtttaagacatcttagtggaaatgttgaattgatacttggatacatgattctggagttcaaggggtaagtctaggctagagataaaatacttggtagtgtaattagtttgtagataatactcaaaattagtggccttaaggaatagatggaaaagagatctgaaaactaagtcttgattccctccagtgtttagaaaacaggaagatgagaatgatttaacaaaggaatttgagagagcaagcagcaagagaggtgaggagagaaccaatagacccgtgtctagaaactaagtgaataaatcatttcttgaaggcaggtgtgaacctgtatctgatgctgcttgacaggtcaagaaaaattgaccattgacaataattggtgacattcacaagaa

SEQ ID NO: 115871 - DNA, 1830 bp, Homo sapiens
gcaagggcctccttgctaccatcaccatcaccaggcccagtgctttttggggtttgggagggaaaaatagccacaactaggtatagcgttatgaggaaagcaatatccttccagggagggaatggttatcacaaaaaagtgaaggaatattatcagtgtgcttgcatttgtgtttagagtttaattccaggaaaagatgatgctagatgagtatactatttcatgtatataatttttaaaaattaaattgaaaaaataatctatagttatgataaaggatatagatatacacacatataggtgcgtgtgtgtgtgcgcacgtgcacgcgtgtgcctttttaaaccaaatactttaaatagagattagagcattttatttaaacacttttcaaaatccctgttttaggtgtattgtgaagatcactggtgatatgacaatgtcatttccaagtggaattattaaagtcttcaccagcaatccaactccagctgtgttgtgcttcagggtgaaaaatatcagcagactagagcagattcttccaaatgcacagcttgtgttcaggtttgtgtactttttgttttgaaggttgaaatttcgttttaagattttctttcctgctgtgcacagtggctcacgcctgtaatcccagcagtttgggaggctgaggcaggtggattgcttgagcccagttgttcaaaaccagcctgagcaatgtggcaaaaccccatctctaccaaaaaaacaaaaaacaaaaaacaagaacaaaaattagctgggcatgatggtgcgttcctgtagtcccagctactcaggaggctgaggtgggagaatcgcttgagcctaggaggcagaggttgcagtgagccaagatcgtgtcactgcactccagccttggtgacagagctagaccctgtctcaaaaaaaaatgttttcccccttcttctttgaaataataatattcaatttgaaaaccataccaaaattattcttactaaacacctttctgctgtctttttattttgttttcagtggtgctaatagttattttaagattcttttctctctctccatcttatctttcaagcaagcttctcctgtgttccattcttcatcccctgatctaattttccttcatcccacctcttggtttatttctactagtttttcctgtgtcaccaaattactacacagaggcaaaacataaagataagtcaataaaataacaaatatattttttatatatgtagtgatccatcacaatgtgattccaacacaaaagatttttggatgaacatgcaagctgttacagtctacctcaagaagctgtcagagcaaaatccagctgcttcttattataatgtagatgtattaaagtatcaggtgagtgtcacgacattgcaaaaattctaaattaaaatattaaaaaatggaatctagcatataaatgaataagtatgtcatagccaagtgagttttttcccagaaattcaaggatgttttgaaattagaaaatctgtttataagccagtggagattttgaccagtttggtaaaattcaccatttattcatgattaaaatactgagtaaatttaaatgcataaatttgtccttaagctgaaaagactagcagtatcagtcttaacaatgaaactcccaaagtaatcaattaaagttaggaatggcaaagatgcccattagtagatcctgttagtatataagagttttctggatgtgttagccagtacagtcaggtaagagaacaaaataagcattaataaatactgggaaagaggaatcaaaattattattgcttacaggtgatatattc

SEQ ID NO: 115872 - DNA, 1067 bp, Homo sapiens
taattgctgggagtaggacagggagacagtaaagatcagtaatattctatgggctggactttgttgctctggtctataatcccagtactttgagaggctgaggcgagaagattgcttgagcccaggagttcaagaccagtctgggcaataaaaagaaaccccatctctacaaaaaatgtaaaattctctgggtgtgatggcacaagcctgtagtcctagctagtacagaggctgaggagggaggattgctcgagcccaggaggttgaggctgcagtgagccatgagcatgccactacactccagcctgggcaacagagtgagaccctgcctcaaaataataatcataatattctatgttagaaaatgagtggtatggaaaaaagaaaaagtatagactaaggtaaggaagattgaaaatacagttttcagtgtaaatttaaacagagcagtcagagtaggtctccttaaaaaggagccattggacaaggagcttaagaatttgaaggaattataacatttactgtgagtcatgtgattaaacatttgaagttggaagcattctaattccaacttgtggtactacgtggtgaccttttttctcgtgttctaaatctgaattcttataatgtatgaagaatctttgaattctgtgttgaatgttggaagattcgcaaactttacacgcataattaagaattccttcataaaatgctgatttctgggccctgtccctaagctgttgaatcagattttctgcagttggagctaagggaatgtgtgttataaacaagcaccacagcaattttgatgtaagtagtagtaggtccccacattgagaatgatccttactcctttgagataggtctgcttcactctgccaacagatagtcccctcattagatatttttgattttgtggacttacatgttcaagtgtccatgtcattaacatgacttcttaacttttcaggccaaaaacaattgtttgttcttttctctttaaaggtatcatcaaatggtattcagtccactcctctgaatcttgcaacatactggaaatgtagtgc

SEQ ID NO: 115873 - DNA, 1032 bp, Homo sapiens
gattacaggcacgtgccaccacacccaactaatttttgtttgtttgtttttttttttagtagaaacagggtttcactatgttacccaggatggtctcgatctcctgacctcgtgatctgcccacctcggcctcccaaagtgctgggattacaggcgtgagccactgcgcctggccatgggtgcaccgttcctggaagcactgcaataccttttttaagggaaagtttatgtaaagtttcctcctggaatttcatgccctcagttctagaaatgaccactaggtggaagttaatacctttagaatggaccagctgagattcagaacacatttgttcatctagattgagtatgtgttctctataagaaaaaatttattttgccataactttataaatattatgtaaatacttcttatatttacatgctaacattaagaaactatacctagtaaatttaaagaaatagaactctatgttccatgtaggtaacctgataactaattgaaactgatttaacacagtttagttcattctgttaacgggattctcctgacctcccagaaatcatgtagacgcttccaggctttaaaaagccccttgccgtcccggcacagtggctcacgcttgtaatcccagcactttggtaggccgaggtgggtggatcacttgaagtcaggagttcaagaccagcctggccaacatggtgaaaccccatctgttttaaaaatacaaaaattagctgggcgtcatggtgcacgcctgtaattccagctattcaggggacttaagcatgagaatcacttgaacccaaggaggcggaggttgcagtgagctgagatggtgcccctgctctccagcctgggtgacagagtgagactctgtctcaaaaaaaaaaaaaaaaaaaagcccccttgccttctgcagttctctaaaagaacctttttcctgtccatttccccctattaaagctaactatcagcagcattcaattttctgatgattattttaaggagaagcaagttatgcttctctc

SEQ ID NO: 115874 - DNA, 1011 bp, Homo sapiens
tctagtctcatctgccactcccctctacctgtatcctgttctcctgctaatctgatatagatgctatttcgttaaatgcatcatgctctgtctctgtatctttggtaacttctgcctaaaatacacaccatcatccccaccaccatttataattttcagctgagataggtgcttttgtgcctgtagctcctcagagctcctttacagcatttataatattcattataattattggtttactgttcctgccattccattagactgaagtatactgaataaatggtgatgatactagaaacaaaacacctcagaaatacctacttggcattatgttagaccagtaaaactttaaaaagaaaagtgaatagaaaatagcaatgttatacaactcttcccaaccgtagttacctttccatctttacttcttctactactcagtagtcatttcttttttaactttatgccacctatatccctcctagggtttttctctgggctgtcctcagttacttccttcttctcttttgactcgcctcaacatgcatatagcataggagtccagtagttaacatctctgaagattagtattgagtcaaagaaaagcatgggttatttacttaatgaaaattgatattcactaaaaaatatgagatttggaaacaggataatagtttgtttactgtgcacatctaatgaatgtagcacaggactgatgtagtttagcttacttgctcatttgattctattttgtttgaaatgtattttaccctgtgtaagtgctttattcttttctttgtaggttctgggtccctccgagcaaaatttgatctttcagaaggacctagtaaacccacgacacttgcagtacaattcctcagcgagggaagtaccctttcaggagtagatttcgaacttgtgggcactggctataggctttccttaataaagaagcggtttgctactggtaagttaggagatttcaaactttttaatgtacatgggaaacatttg

SEQ ID NO: 115875 - DNA, 2937 bp, Homo sapiens
agtggaaaatgtccttagagtgcatttgaaattgtaattgcaaaggtctgcttggcgtttttcaggacgatacctggcggattgttgatggacctgggaaagtgatgtggcttcagggattacaaacctgccattctgcattatctgttctttccaaacactattttaacttgtatgatgtctttcaaacttagacatatttgagagctgactacaaacattaaatcgcacttttaaagtgagtcattgaaataaatagtactgaaatgattctctatgttgtaaatgatcaactacaatattcaggaagcacatttattcagattctcagtaaaaatgaagtttttgtaggattaatttttaaattatttccagtgtctatgttgaaaaaaagggttatagtgtaatatcaggcctaaagtttcagaagagcaagcacaaagtaatttagctttccatacatttttagagtcagagataactttgaaatttcataagtttgatattcagtggatacaaatagaacatgaattctaagttttgggtaatgttaactcagaacacttaatcaaattgagctatgtgccataaggtaatcagaccagagtccaagttgtatgcaaaaaatctataatttgattctcataaacatattaataaagtataagtgatgttttatatgatttttaaaaaaaattctcaagtgcaatgtgttttaaaataagcttgcaaatgacagcagagacatttacttctgcagttagttaactttataggagttgtgatttttttgatgaattaatgctgtagatttaatttatttttatatggaattgcataatgtgtgccttttaaaacaataacaaaaaccagagatgtgcctatacaatttgtgttcattaatgtgcctcactttttttctcagtctgaatcttctgttcagaatcttacagtgatcaagcatttttataagatatttgcaatttttgtaaatatttttggcctgcaactgggaaggggattcagagtcataaagcctaacttaagaatcctggctcacttctttggtgatacactgtagccactagaaagagaaataaacccaatggcatgtgtttacaggaagaaagattaccttcagatacttgacattaacctcatcaaaagtgtgtgaattttaaaacaaattctaaaaaaactatagtgctaaattggtaactggtattttaactctcaatttagcattttccttgatactttatcattgaaaatttatgcatttatttactgattgtgttgtgaacatgagttttatggtattttgtgagggatgcattttttaaaagattaattttggaaacagaaggagaagcactgccatttgtttttatttcaacaattggaaaaattaccaatttgtacattttaattattcaatttctactttgtaaaaatagggaaattatttgaagtgatatatttggttaaacatttctaaaaataaactaccaatactaaatagtaagaaacctaactttagtagcaaatcttgattaattgaagaaataaaatatttcggataaggtttcataatttacaaatgggaatttcatttataataataaatatgagtgtcctttatttgcctagtagaagtgataaattgtgttatatatgataatttatataaaaccactaattgttccgttaagcttcacagaaaataaaacctctattactagacatttatgtaacatcttgctgtactaaatacagcagaaaatctactctttagcaatatataacacagtatatgcttttttatatattcaatgttagcccaagtctgaatttacatttgactaaagcagcacataagataatttgctaaaatgctaatctttactaaatagtgagctaaattagaatttctaactcttatattgtgctcttttaaatgccaattacagtcccttactggaattctaactgtaatttgctttgcaatcaaactgcttttagggcagccaatattttattattggaattcagacactgttcttaccgtgtttgtttttaatcaaatattacctaaaaatgtacaaattagtgaaatggttaaacttctgcactttcttagttaccacagtcttcataccaagtattgggtacaggttacaattttgaagccatatgagtttatattgattttttttttccatttaaaaatccactaatggtgtaaaagagaccagtagattttcaatgggaaatgtacctagcaagctggttcttgcttatatatagtgataaactttgtagctgcctctttaaccaagaatttgtaaacacaactctaataaatgtgagttttaaaggattgttatttactactttggattgtaattagaacaatgcacatctgtcttccaagattttgtaaatatttttgatttttttcattaaatgtaaattttacataaaagttgtgctcttaataaacatgtaatatataatttatcaattggtttatgtgtctttgtacttgatagtaatagctatatcataatgttaggacaaggcaagctggccaagtaattggtttttaactttgtactactgtttgaacaggcgtacagatcgaactgttatttattggttatatagaaagcttcatttggagtatatcccaaagtgtcaaaattgtttaacaagggattatttttaatatattttaagatatatttaaattgatgttaaatttttgcagactttcttcctaaccagttgctcaggaacacagtctcagacagttcaaaaatcataatgttccaaagaattagttaagacaatcaagcctcccaaaatggtaaatttaggaaggagcaaaagaaggaaattagaaaagaaagaatttatcctaactattgaaaattt

SEQ ID NO: 115876 - DNA, 1064 bp, Homo sapiens
tatagatatataatatatatgtatctatgtatctaatggttcaatttctgtgaaaagccctgactaatacagatggctttagtgtgacttctctaggcttctgatttttctaatctgaaatattaaacagtgggatctctttccatggtcaaagggtattgtctatgattctggagaggaaagaatttgaccagagttcgtgaatgatttaatgattagaaaatacatcctatcaagactaaggaattaatattatttgtatttatattatttagtctggaggggaaaaaggaatgaagagtacctttataatgttttttaaatataagaaaatttgttgaccagctattctcaatttcacctgaaaatagaggaaaagtaaggaatgaatttcaaagcactatggggaatgtaaggccgacttttctgccactatagagagtggttctcaaattttaatgtgcataaaacccccaggagcttctttaagatgcaggttcctggcctctaaacttagcagttctgacttggtggatctgggatggagcctatgaatctatattttaattctttttttccaagccaaactgtatccagctttattaaagatactttccataaacaatcatggcatttcaggcaggatatgggcagacaattgttaacagtatacaacaactttcaaactcccttcttcaatggactaccaaaatcagaaagccactataaaatctaacaaagtcttcatctgatgctctgaacagggaaagtttagagtgagggttgacatttcacatttagcatgttgtttaacaacttttcacaagccgaccctgactttcaggaagttaaatgaaaatggtagaatttatctgaagatccataatctagaaacggaaccactgctgttttgacaggtgccatctcagtggcatcactggaaagtccagattgcctgacacactggtaaccaatgactgggggtcagcccaacagatgtctgggcttaagggagttaagtctatgctgaaggatggaaagggagaagaggacataaaaatgga

SEQ ID NO: 115877 - DNA, 1050 bp, Homo sapiens
tttcctcgaatgttttattgctttattattttatttccactaggaattgtggagttataaatattattagtggtttaccacttttgcacacatgtatcctattatttttggagatttatatgtggagaaagagactggcctctttcattgcacccattcatctacctgctcacatagatgggctcctgtctatttaaagaattcagaagagaccacacagattctaagaaacttgagcagaagaactacattgtgagtagctgacaaaatggttttattatagaaaaatctctagtaatgatattaaatttttgttcttcttttgcttgaaaacagtttattttaaaaaagcaacgtatgatacattactttgctctacaatatccttacataaattcttagaaaaattatgaatattttcatttaacaagtcaataaaatatatgaaaaattaataacaaagaaaaaccacttcttataaaatgctataaaaagtgtcaaaaattgggcatttattttgagattcttggatctgtataacattatagccataaagtagcataagggttgaaaaaaatacaaataaacttcaccttaaaatacttatattgtaggctgggtgtgttggctcatgcctgtgatcccagtgctttgggaggctgaggcaggaggattgcttgaggtcaggagtttgagaccaccctgggcaacacagcaagacctccatctcttaaaaaaaaaaaaaaaaaaaatgatcaaggggaaccaaagacccagatttaatcatctattcattctttcttttatcgtgagcacctactgtgtgccaggcatagtgtgatgtggatacaaaaatattagacatctggttggaggtggcgagatatgtatactcaccgaaatacaacaattcttgatgtgttgtcatagaaatatgaactgattgacaggattgacagagaaaaataactatctgggagggatagagaaagcttcccagaggaggtaatattttagatgacctttgaagaaggaacagaaattaaactt

SEQ ID NO: 115878 - DNA, 1051 bp, Homo sapiens
tcccctcgttcctacttttttctcctgttctttcatgaatttaaaagtttgctgcgtgttgaaaatataaaagattacttaatagtaaaaaagaaaattttgattttctttttacgttctgttttggtttggtttttgtgcttttctatttagagatggaggtcttgctatgttgcccaggctggtctcaaactcctgggatcaagccatcctcccatctgggcctcccaaagtgctggtagtacaggcatgagccacgatacctggccaaaattttgatttttgactccagctgcttctgctggttttatgagtagtcaggaaattctgattcttctaataaaataattatatactagacttttcaaaaatatgggatttttttgtttcaaaaaaagttattacattgcaatcttagctcaaggatgccaaaagagtaacttgtgctaatgtgggagccatttccagtatgctcccaatgtctatggcaaatgtgggtaattggctcccacgctttcctgctgggcttcaaggagcctaagaatcatttactcagcactcaagattgtatctgtcaatagagaaggcaagaaaggtgaaccctgtttgccctccttggtttctagtttatagcctaatcaaagtccatgaattgttttcatctctcagctggatttgagtcagcttcagcaaaagccaaaatatccactttatataatgcttatttctttctttcttttttcttctttttttttttttttagtctcatcctgttgcccaggctggagtgcagagcactcggctcactgcaacctccacctcccgggttcaagcgattctcatgcctcagtgtcctgagtagctgggattacaggtgcccaccaccacacccagctaatttttgtattttttattacatgtttcaccatgttggccaggctggtctcaaactcctgacctcaagcgatctgcctgggattgcaggcatgagccaccatacctggccaactcaatattcttaataggtggtagggctatttccctttttcac

SEQ ID NO: 115879 - DNA, 2258 bp, Homo sapiens
ggagggacagggcagaggaggagaggaaggcgatgcgacggacaggcgcacccgctcaggctgactctcgggggcgaggtcgagccaggggcggctgccctgggggcgaggcgacgctgtctcaacctccacctcgcggcggaacccgaggacaggagcctcaggtaccgcgaggcttgcggagagtggccgggccgggcaggccctggctaggccgaggccaggccagggccaggggtggggggtgctggccaggcgtggggtagagcctttcatccgggcctgccaagagcggggagctgtgggggagtggtggggaggcgggtgctctttgggctccctggaaacccaaatttggagctttgcggggtggatttgggatccaggtttcggcctgtgtaggacgtttattttcctgctggtatcttgggaaataacgagcatggaatgctagagtgagctaaacctatccttgctgaggatttcctctttttctagatgaaagaaacaatcatgaaccaggaaaaactcgccaaactgcaggcacaagtgcgcattggtgggaaagtaagttttaatagttcgggtttgtgggttttttttttaaggtttaggtattttaaaaaacatattccttttgcgcttcttatattatcggtgacaaactttgcctatcgagggaaattcacggagctagcaaatctcgaggagcgggggagacgagggttggagacacatcagtgagacgagctaaaaacatcgcctttgtgtaaacatgtttgtgttttcagtgttacagagtgtaagtagaacacaaaagtgtttcctaatttaattagtaaggaaaatgtgtcatttcagttagatcgttgtgcacatcatacccttgacttgttttggcctgagttttctaaagtcagtgcttgtttgtctctcttgtaaattgagacctttctgtactgctttctgaactaaatattctttagggtagttgcatatttcaagggtatttgaagatacgggtacattttggagtttaagagcagtgactattagatttgaaaatataacccaagtaggtatctttcctgttctgactttgtattactgtaaaaatgagggaattaaagtgactgatttttaaatgatcagtttttgattaattgtttttttcctggtggatactgattcacatcaaggggattcttttttgaagctgatttttagattgtcctgtaattaataagaagtccactgtagacagaggtctacctagtttgtattgttagcacattcttagtatttaacaaggtgtggtagcttgttgaaacagagcatgtctttacttggtaaaacttgtaaagcttccatggtacatgtttattaccttttagtttttcccaactttaagcgtttaacttagagttagctgtgagatagccagaagttgcacttagacttaaataataatatacagctttgttaaattactgaactttgccagcggtgaatttatcctgatttttttttactttttatttttgttaacgttagccatcttcaggatccacacccacacatttaacaacattagatgtttcttgtcctctttaatcaattgttatcagactgtggccttcaagtgccagcaaaactcaaattttttgtgtctcagtgtttggatgctcttatattggtgtttttaaccactcttactttcagtacagtttcagaaggagtaatttgaataatgtgcttatgtgcagtctttttgttgttactctcatcattaggctttaactttgggagacatcattttagggtaaaggaaatcttgagatttgctaggatatttaaagctgataacaagattaaattttgtgtcctaacatcttaatactcgtttagctaataatacaagaagtatttctgtagtcacaatatggaaacatttctacactgtttaagaaacgtacttattatgggatgtgaaattaggtgagttaattttgctttagagaaaactgcaggtgttaggtgctcttaggtaaatgttacaaaagccctttattttcatatctaatcacagcattaataataattatttaagtgaaaattgaactctacatatgtgaagtgtatgaaacctctagaaagtatgctgggtttgtctttacaatcttagaaattcctttgagtttcttagagaagatttctttggaaaccagatacatacatgaccatttcaaagtgatttt

SEQ ID NO: 115880 - DNA, 1077 bp, Homo sapiens
aactgattttaagcaactgtccttgctcaagtttgcagtaattgatgtagcgtgccatgattgttacacttgattttgtggaatgttttctacttacttgatttggatcagatactttattaactagaaatgatgaaaatgttaatttggtgctttgccaataactacttgtaagtttggaattgaaaaaaaaattagtgtaaattatgaaattacttcagtttcatctatatagttcgtattaccagtaatcttttaaaaatggcttgccagtattctggcatttttaattacagtgtgatagggattttattcggggcagaaaatagtgtagctgaatatacatctgaggatgtggcagtgttatgctgttttctgtgcttaaaattttgaagaataggaatgcaggaggaagtcagaggcttatatatggctctttagttacccatgtttttctaggtattgacttaatctgcctcaattttcatttttattatcacattgagttgcaggttctaaactgtcagggctttcagagctgaaataggcttttgaagtatcccactgatgcctgtatgggcctagtacataactctcctgtgtacgttcatattcttgtgtgataaaggagagtggatgcttaccactcacagactctttaatttttttactttaacttttttcatttcagtaagtggttgttgagcatcacccttatgccacacacagagtagttgagaaaatggcatcttcatttgtctcccaaaatctcaccatgatttggtatgtgggttttacctgcactctaagagttccctactgcccttatactacctcagggcctatggtggcccagagggattgaaaggatgggtatggaattttgtttgttggctgttcctagtattttaacccatttgtagacattagaatatcatgttattgatagtatcatagataaaatcccaaatgtcccttatcatggaaataagttgtaacaacacttggcatttcatctgttctttttttttttttttttttttttttggtgaatatttattaaaaacctagacaaat

SEQ ID NO: 115881 - DNA, 1406 bp, Homo sapiens
tccctactttgaaactcatgaatttacaagaaggtgtggagttgttcaggtatcttgggatatatatatgcattctaaaatctgtagcagcataactcctttgggaatcatgagacatttttgtctcttacctgttattggataaatttacgttcttctaaaatatttattgggcaggagaatcactggactcataaatattcccactttgcatagacaggtatccttaggaatccaggaaaattttaacattgtgtgtcattgtattctttggttctgctcccccactattgaccaatgtatgagatgggaagaggggggcatttttttcacttttttttttttttgcattcttgttcttggggctatgacacagtatttatcatcattggcaaatgaatgtctttccttcatccccttttaatatctgataattatttgtagatttggcttttttaagaatttctactcttttccttttcctagatcttgtggagaattttgatgaggcttccaagaatgaggcaaactgaattgagtcaacttctgaagataaaacctgaagaagttactgggagctgctattttatattatgactgctttttaagaaatttttgtttatggatctgataaaatctagatctctaatatttttaagcccaagccccttggacactgcagctcttttcagtttttgcttatacacaattcattctttgcagctaattaagccgaagaagcctgggaatcaagtttgaaacaaagattaataaagttctttgcctagtatacagttttatttttttatttcattgacaccgatctgtacacagtaaaaaaaattgcttatagaaagctaatcatggcatgtaatatggctgataacctttggaatttgattaaagatttaaaatcacggtgtagtgtaacaaaggtggtataaagttctcaggtttgaaaactttgctctccaacagtccttagtgcttccatgatttatatggtgggtgtaaatatgagaatagagtattccttagtggataaacagacatttctccctgatattctctattgtaagcatatgttaagtgccttttatgaattacctcggtgttatctcctttattcctcaatttgtgaagaactaatagctccattttgtagatgtaacctgaggtttagaacttctaaaaagtaaaagtaatctccagatcccttctttgtaggatattttataaggtgacttggaaaaggtagtgtttagaataggagtggctcctgggtcattgtcttttccttaagtgtcaacactaataaatgaatagggttatgtttttatttaataaaaaatatacagtaaaattgagcatatacagttaaaagaatttataatgtctgccactat

SEQ ID NO: 115882 - DNA, 2208 bp, Homo sapiens
aaaccccgtctctacagaaaatacaaaaattagccaggcaggtgggcgcctgtaatccgagctactcaggatgctaaggcaggagaatcgcttgaaccccaggggcagaggttgcaatgagccgagactgcgcctctgcattccagcctgggtgacagagcaaggctctgtcaaaaaaaaaaaagaagaaaagaaaatgaattcactattgtactctttctacagtgtctttatgcgtgagctttatctttaattgtgtatgagtttcagctgctctaaaggatgctgtttgtttgaagtgtcttccctccaatccactaaagtaaattctaagtaccccatgcactctgtactttgtcagactatcctaaaacattctccaaactgaaaaatctctccagctatttgtacatgagccaataacagacaaacatatctgcattttcatttcatttatgtagtttttctattttggtatagaaagtggggctgatccaacaattgaaactgactctggatataattctatggatctagctgtagccctaggctatagaagtggtaagtatgttagaactcctgtgtctcatcttagtaaagctctgtaaatagtataagccagtactccaaaccatctttatcactgtaatcctaaaacatgttatcccaactcctgacatatacttttaactttgggaaaagtccacaaattcctataaagtctagaaatgagtttgttactatacttttcaccaacccaaataattggttactggaggataagtgcatacctgtttataagatttatttcatattttgatagcaaactatttatagggcaaccttaggataaccttgtattctggactctccttgagtttcaaaaataaagaaacaaagacacaacgtccagtaacttggacagttactcagtgacagactaagtttcaagttttttaaagtattgcattgtattattgccctcaggctatgtatgtatcctgcttagaaataactttattttaggaaaatattggggataagttaaatttgatagttttaaaagaaattttatagtcactgtgctgtaatcttgattacctatctgttctagttcaacaggttattgagtcacatttgttgaagctgcttcaaaatatcaaggagtagacacagtcatcagaaaatgtctgcccttttgtttacttcttggtccttataaatgatagttttgtttacttataaatttttacctcagttgcaatatttactggtttttagtaggttttaataaatatttctctgagtaattcactggtttataataaatgtaatactctttttataactatgttttactgtatatttaaaattataaattaatgttttcgtggcatgtaaatttttatggtacagatagttatcatcagtctttgtatcaagtgctgtaatttgacattttcagaaattattctaccctagtcatcttcactcgtgtattaagtcattcactttatatagggtttgctataaatccctagaaaaaaattgttcttattgttgaataaaaaagtgcacagtgtgattgtttacaaaatgatattataaataaataaaatacttcttctgtcagtttgcatactacttttttaagtatataagattattaaagatttctttcagatttttaatttcacccttctgtcctgccgtaacacttcattagatcaaacaatatatgtaattaaaataaactgaatctaagtcaatcaacaaagacattgtcatttctagaagtatatttagaatatttttctcttttaaggaagtttttcagtaggaaaagacctctgtgaagagaagtcaattcttcaatataagtgagatattctgtaatggcacaaagggagcactatgaatccatgtttcacagaagccatgaagaaagagccatgggttagatgttgattggaccactgagtgtaggacttgacttacatcacttcacctggaaaataggatgttttgtcagttatggtacttggttgtaagccacataaacttggtctagctaatataaacagaatggaagggaaagctgaagaagcatgcagtcccaaggaatgaaaggcagctaaggatctcagtcaggaaaccatggccaggcatttcagatgctgttaatatgatgtttagctttaaacccct

SEQ ID NO: 115883 - DNA, 1651 bp, Homo sapiens
tctgagggctatcatataatctcacttttattatgatcctcccaactgtacgttgatgtaagcaaggaattctgtatattgaagaaattaagtgtcttgcccagggtcacatggctggaaagtgacagagccaggattcaaactgtggtctcctgattctgagaccagtgttctcttgactgccttgtacccgacattatgtcatgtctggtagtttatactttaagtaatatgctatctgaacccggctatgtacattgaggcatattttaatacactcagactacaaattacaacaacatgcaataaataggacaccaacataaagtcagcacaaagtgaactttactgagtattataatcagctctttggaatgccagtttttcatagtgatattaagatatggttgttaaattagatcacaaaaattgcttttcttttaaatagaaaatgttatcaatcacacggatgaagaaggatttactcctctgatgtgggctgcagcacacgggcaaatagctgtggtagagttcctacttcagaatgtaaggaaaatgcctcagaaaatgtatatgtatagttacttaagttaagtctttagtagagtttttatatatccagccagctagatataatggtagaggctaccaaaaaaagtttaatgcttttcatattcttgtggaacttggatctagttgggaaggcaagactaatcatacatgcaacagtgagaaataatttaacgcccagacccctctacatcccacgggaacagaagtactgtcagctttgaaggagaaggcttcatggaggagctgtgacttgactccagagtgaaaggataattaggattgatacaggacggaggaaggaaggcatccaggcaatctcaataaaagcatccatgagtaaaagtttccattatttctttattaagcccagaacattaccaggcctagtgttgaactataattattgttgacaggaataacaatattcttgtttaaactaattgagaagtcttttatctctacttcccataccagggtgctgatccccaacttttaggaaaaggtcgagaaagtgcactgtcgttggcctgtagtaaaggctacacagatattgtcaaaatgctgcttgattgtggagttgatgtaaatgaatatgattgggtaagtttgtaatactaaatttaaaatgactctagcaagttttagaatttatttggtttgggagagatgcagtaagttttattaaagaagaaatagactgagcatcgtggtgtacacctgtagtcccagccacttgggaggctgaagcgggaggatagcttgagcccagaagtttgaggctgcagtgagctgtgattgcaccactgtactccagcctgggtgacagagtgagaccctgtttctaaaaaataaataaaagaataaataaagaagaataattaattagctacatagaagaaaaagttaatatcatagactcaattattagttctgatttaagtatccttcacaaaatattaaaattactttaaatgattatatgtctaattctagtaaaacttcttacagcagcattaaattacttgagtcttgctcaccgtgaaaaactctgaatcaccttttcattttgcagaatgga

SEQ ID NO: 115884 - DNA, 1008 bp, Homo sapiens
gtttggattcatacccaggtttctctacctctgaacattatattctttctattatgtgtaggtgctttcaagagcattgttacaatacttgattgaaaatgattattttgtgtgtttttacctaagctgatagaatacttttaattttctaattttttctttcagatttttaaatatccagattccaagaacacactggatactgctcttacaaaaccaagaggaaatcatgaagaaatgttttagttattgaaactacagttgaaatcatggatacatcaacaaatctggatattggagcccagcttatcgtggaagagtgtcccagcacttatagcctaactggcatgccagacattaaaatagaacatccactggacccaaattcagaagaagggtcagctcagggtgttgccatgggaatgaaattcatattgcctaaccgatttgatatgaatgtgtgttctcgatttgtgaagtccttaaatgaagaagatagtaaaaatattcaagatcaggttaactctgacctggaggtggcatctgtcctatttaaaggttgaaagttatggtataaatatctgcatttgtttttgtttttgtatatttgggttattttcccaatcatgagattttgagtttgggaagacagtttagaagtcattttttaatatgattttctggaatctcatagaaaccaaaattaaaataatttcagattatataatatctaatttaaaggaagtacatgttgatttttttaaaaacttcttgtttaatatttgtttacaaattccctaatgaagttccctattattccttttaaaatcatagggccaggcacagtggctcatgcctgtaatcccagcactttgggaggccgaggtggacagatcacttgaggtcaggagttcaagaccagcctggccaacatgatgagacctcgtctctactaaaaatacaaaaattagccgggtatggtggcgtccacctgtaatcccagctact

SEQ ID NO: 115885 - DNA, 1932 bp, Homo sapiens
gagtgcaaggtctcgcgaccaccgacgacagcagacagcgagtcgggccttcccatctgaggccagcttcagtacaggcctccaagcccgggcttgttttggccgcgacgtcacttccgatttcttctttcgccttctggctaaaaaacgttccgcagcaatgcagctgaaactttcgggttttcttttttttgtccctctctccttttttttaatatttttgtttttgccgcctttacgctccgaggcccatcctgccggagtactacacagacagggtcatttcagttgacggttctgggtcaccagagcagaggaagccccaatttcgccctccggtcacacctcctactccagatcgccccgcccacctgacccgcctctgcgccgccgggctgcgtgagtctcatgagcgtgctctggtacgtcatcttcgcgcgacgttcggttcgctgtgtgtgtcgccggctccttgagggtccatgtgatttttacgccagtgctgctgaactgtgcagggtagggagctggcacagtccgattaattgtccttgggtcgaggtgtctcgtcggaccctttggggctcagtggaggtaggtgaaggcggctcccattgagggaagcccacactcacacccggccttcctgtgttaatctggcatgctcttctggggcttcccaggctatataggagagtggccaaattctttaaccggctcaagttcccctcaattaagcttcgacctaggttcttctctgcgattacaccctttcctgtccaccgttgttagttcccggagtaatcagcaactctccaaggcaatggacacatttccatctttgcctttgcttacgaggctccctcaggtgaagtgaacctaatggagttttaaaatatttgggagataaaatcagcagatcttgttaactatttggatgttaggagtgaggaagaaaaggacacgtcaaggctgagtctaggttaatatctggtgccagtcaccagccaaaatggagtatattggagtaagcaaaggcacagaccatgtctttatttcattcaccattatagccccagtgcctagagcagtgtcctgcacattggtaggtactttaatgaacagaagagtgttcccaaagaccagtgaaatacaatcattggtcattgtatttcattaaagcaccttttaaatatatgttacacctatttatcgtggtgttactaatgtaaagttttcaggctttttggaatagatgatgagcagcacctctggaatcatttacctgataacattgaatctcttttgcaattgagtcgttctggaaaaatgttttggcttgattgcatgttatttaaaagttttatcctattctgccactttagtgttgaatttaatttcaggactgctttattacagttttctttcctactgtttaaaccttttaaagtaaatttaattttaagcttctacattagaatattagctttgtgtttcttacttcttggcatttttaggctttcaggaaatcaaatccgtaactataattgttatagattaaatgtcatcttaaacttggtttcaggaaacttgtatttgcagtttcaccttaatatttcctgttgccaaaaaatggacactcaaagccagcatgatcctttttggtttggctactgtaaggctgtgctagatttattcctaagtgttgtaaaatggttggctaggtgtgagaacctttgtgtacagctgaatagatggtgcgatatgatagccttcactttaattattcctgcttcctatagattgccttttctgggttagaattaaatggcttattggtctctaatctatatacttccacacagactttttaaagaaagcagagtgaaaatcaactatgtgtacaagcttataatatgtatataaaatatt

SEQ ID NO: 115886 - DNA, 3741 bp, Homo sapiens
caatcaatgccaaatgaattaaattttaaaatttgaatctcatatgtgtaaagatgtttattgaagtattgcttgtaatagtagaaatcttgaaaaacccatgtctattagtagtggactggtatagtaaattacagtgtgcccttataatggatggtaagtctattgctcctatgaaagctaatatgtgttactaagtgaaaagaagcaagatgtggaacagcctacatggtatgattatctttttgttattttaaaagtacaagtacgtggttattgtatgctggtgtagacatgataactttttttttctggtagaaatcacagtaaactcaatagctgaagagacagagtggggtgtggctttctaaccatatgtttatttcagtggcaacaagaatagtctgggtgatgagatatgtaccttttttgctttctttgtaattttatgttaaatacaacttaagaaatgttactaagaacaaagagaaacggtctgtaagaaattatgtaatgcataaataggtcttaccagtggtaactctgttaacacactattattttttattaagacccctgttcagattaaggaatttggtgcagtttcaaaagtagacttttctcctcagcctccatataattatgctgtcacagcttcctcaagagtaagtataatattaaatttctttatttttcttttgtatagtttactactgatcttgagccatctggtgaaatactgtttttcatcttgtagattcacatttatggccgatactcccaagaacctataaaaaccttttctcgatttaaagacacagcatactgtgctacttttcgacaagatggtagattgcttgtggctggcagtgaagatggtggagttcaactttttgatataagtgggagggctcccctcaggcagtttgaaggccatacaaagtaagagacagttggtttctgtgtgttctggttttattttgttgtaagctctttttttctctggactttggttaaaaagatagagatcagttttatggagattatttgcctataggtactatatttcctgattgttctaagagtgcttaacttgggttccgtggtccagtttcatggggcttatgaattccctagaattgtatgtgatattttaggaaatacacgtttatctagggagctactctgtagcttttggttaactttagtggggtctgtggcccagctgagattatgaattactgacctgaagacaaccttacagctggtaatgacagctctataggcctgtactgtcttagaggctcttatgttgaagtcaagtaggaaggtggattttcttcttgaatttatagtgttttgccccttaataaattaagtggccatcacaattttatattataactttgttttcaggattgccaatgtccgtgctgaaatttgttaaaatttaacagaaatttatgtaacatgattctatttagtggtaaatctctttagagttttttaaagaactttttgaaattttaaaaattaaagtgcctttgcttccatattcagcagctaagtggaattgtttatatactagaaaatataattttaaggctatcctttaattttttttaactttacaatataggagtatttacacttcttaattggtttgggggcaaacacttgtaagttttctctttctttcatgatttccccctatgaagactccctgaaactcagctgctttttttttaatctgagaaaaaggagcattttatgttagaaggtatcagaaaaataattttcttgctttttaatatactgaccttcaatctttcagagcagttcatacagtagattttacagctgacaaatatcacgtggtctctggggctgatgattatacagttaaattatgggatattccaaactccaaagaaattttgacatttaaagaacactctgattatgtgaggtgtggatgtgctagcaaacttaatccggatctctttataacaggttggtgaactctattccctcctgaagcaaataatctcacggggatgtactttaatgttgctatgggactcttttgggatggaggggtttaaattttttttataaaggaatatgtttctgattaattcttcagtttttaaattaatttttatgtatgtatgtttgcatttattttcagacagggtctcactctgttgcccaggctggagtgcagtgatgtgaccatagctcactgcatctgctacctcctgggctcaagtgatcctcccacataagcctcccaagtagctgggactacaggtgcccaccaccacgtccagctactttgtgtatttttttgtagagacggttttgccatgttgcccaggctggtctcgaactcctgggctcaagtgatccacctacctcaatttcctcccggaggactgggattacaagtgtgagccaccatgcctggcttccaattgttttttattttcttattcttcttttgttgattgttcatgtcttccaaatgtgtttggaaaaatcaggctgtcttgaaaacataatagactctcagaactgtaatgtatagtaccctgcctcaagcagccaagaaacaaagagtgcagtttagcctttgtgggtgcctttacaaagatttccagatgattcagtagtgacagtagtccaaagaaagaaatattttaagatcagagcaagttagattctgtatagtattatgtagtgcttcttcagacacgatcagtagtagatggtttggaggtcctgtgtcttcatgaatatacatatatgtctttttaaaactccatctaagctttttttccttttaaaatttatatctggatacacacagtttttgttgttttaaacagtcaaactaaaaattcaaaaattgacattttaggatcatatgatcatactgtgaagatgtttgatgcacgaacgagtgagagtgttctctccgttgagcatgggcagccagtggagagtgtcctacttttcccctctggaggtcttctggtgtcagcaggtacttcttaaaaatagctttcaccaatattgttggttttgaatcacgtttgtttaaaatcagttgctctttgtaatttatcagtgtgcatttgaattgcatatctaagtctttgttcaaacagttgataggtaggactggcaagcagttatcatttattgtgtacctaatgtgagccaggcactgtgctgttacatatgaactctaatgccctagatgatgctacaaggtagttagctttttccctactttacagcaatgaaataaaagttttaacttatttttcaaggcaaagtggtaagtggcagatctgaaatcacagaactcgagagctctgtgtatttagccctgtgccatcttatttatttagccctgtgccatcttatttaaccccagaaatttagccctgtgccatcttatttaaccccagaaatttagctcttatgtatttagccctgtgccatcttatttaaccccagaaatttagctcatactccttttactcctacctaagagatctgcagcagcttttgaaaatcagttatttgagatctagtaggcttgtctctttttctgtgactctcttgattgaaatgccactacccagcaaatagctgctagtactagagaaaggagataatgtggcctcaaaaggggccttggtacatttttcaacaagttgggactgagat

SEQ ID NO: 115887 - DNA, 1056 bp, Homo sapiens
agactggtctcgaacttctggcctcgtgtggtctgcccaccacgccctcccaaagtgctgggattacaggtgtgagccactgtgcctggcctgaaaagttttttaaaaattagataaattaattttttttttttttttgagatgacatctcgctctgttgcccaggctggagtgcagtggtgggatctcagctcactgcaacctctgcttcccgggttcaagcgattctgcctcagcttcctgagtggctgggattataggcgcttgccaccttgcccggctaatttttgtatttttagtagagacagagtttcgccgtgatggccaggctggtctggaacttctgacttcaggtgatccactcaccttggcctcccaaagtgctgggattacaggcatgagccaccacgcctgacctaaaagttagatagcacattttatttagcctaatatctaatgtaaaaataaaatatatattacatataaaatataatttcagtatgtaatctatgtcaaaattattaagatactagaaataaattaagcatctaaacatgtgcactatgatacaataatcatattttaggttggtacagtggcttacacctgtaatcccagtgctttgggaggctgaggtgggaggatcacttgaggccaggagtttgagaccagcctagggaatatagtgagaccccatctctacaaaaaattaaaaaaattagctggccacagtggtacacacctttaatcatagctactagggaggctgaggcaggagaagcacttaagccggagtttgaggttgcagtgagctgtgatagtaccactgtactctatcctgggttacagtgataccctgtctctaaaaaaaaaaagataatattttataaaaattactgtctcagtttttaaattaaaattagataaaataaaaaatttagtttctcattttcactagccacatttcaagtggtcagtagccatgtgcagctagaagtatggcacagttctagaatttacatgatttattattaattttttttttttttgagacag

SEQ ID NO: 115888 - DNA, 1026 bp, Homo sapiens
ttctttgttactgctctttctgaaatgtatactgtcaagttttatgagaagccacatttgggcaggaaggcatttgactatattatatagaaatctgatttgggagaggaaaagcttattaaaaatatttttggggggcaagatcataaaagtcttgctactgtgtaatctttgatgccgttaactatgtattatacaaactttgccagtgatattttacaagtataagttctgtcaatgtagttgtatcctaaggaaaaaatgatttcgctttaacgtcttgcaccaatcatcgttaggcagactatgtgtatttgaatggaactgttggtgaatgtatggacaagcagcaaacacatggtaaatgtgttttgaagtaaaagtactataaattacgagttaagaatagactaacttatttttctaattgttattagcatgaagatgagacaatagttgtaggaatgaccaatggaatactgagtgttaaacatcggaaatctgaagcaaagaaggaatcacttcccagaagaagaaggcctgcatatcgaacctttattaaaggaaaaaattacatgaagcaacgggtatttgtgcatttctcatatttgtttaaagggtgaaatttgttagagtagccagcttcatccctgcacattactggaaagcgtagttcacatggcactttattttgcttttctctacatcagaattatttctagattgctagattggggacattattgatgagtaatggggaacaaggactactttatgtaatactctgcatcataacataatgttataatgctttactgcattcaaaataatgtctttcacatactacctgatttgatctaaatcccaagaagtagtagaaccaatcatgtccctgtttggcacctgagaagactgagcgacaaataatttgtgattgattcaggatttcattactggtatccagagttgttgagactagatctcattatctctgattgttgtttgatttctctttctactgtacca

SEQ ID NO: 115889 - DNA, 2651 bp, Homo sapiens
aaatatcttgcttttatcaaatctcaatatggattttcatggagaaaacaacaagtcagtgcagtttaaaaagtagtaaaatgtttatagtggtgtgactttgaattgatgggactagggttattataaaaaatttttttcatagacatctataatgacgatgacaatttttcaaatgggaaaatgaaaataagtcaggaactccaccctatactttctgtaattattattttttgaaattaatttactcagagggattgttatactttctataaatcattaattaattataaaataagtacagatttttcagtgttcttatgtttaatatttttatacttttaaaaacttttgcttttcacttaatgtatggaaagatattgctagttaatgtgttttctttctctctttttagatatatatctgcctgtaattggtcagtcccctgtagttgataaaaagtttttactacttcaaggacttgtagaaaaagagattgattaccaaagagaattgttagaaaccttggggatgatggatatgctttttgccaccatgagaaggaaggaaggcacttctgtgttggaacacacatctgatggatttccagagaataagaagatagaatcatagtgtctgctaaataagacatataagaactctgaagttggaatagatttgactgtattaaatgttggcgagagactctctttgatacattaaaaaaactgtttgcagaagcagttctgtggaagagactggaataattatggccggaaaacaagtacccgttttaagtaagacatggttttccatgtaatattttgaattatagcatcttcacctagaagatctcaattgtcttagtcacagagtaggtttatctgggatggatattaattttaatacaggagtgttctgtatcaacatttgggttggtattcagatgggaattcaaatatgaatcctctctggagagggtccaactgggaatcctgctaaaggagcaaagccttgtattacctctggaagacaacaaaaacaattggcaacaacaaaaagcctctttcttgactttaatcagtgcctttgggatttctaggcccttgcttagcttgcttcctgtctccttgatatctacacttgtcttagatcacatgccctgcttcagctggtaatgggactgcatcggttccaagtgtggcaagtaagttttcggctctgaagaactgacactagctagatttgtattcagagtgtgagagcaagctctacagatagaccttattggactacttttttttttttcttcatgcagcctttctaccaagttttcaccttgtttcaggtcagaggaatgatagaatttgtcatttttcttacaacagcctttcagactattcttcatatgtttcaagctaatcttgtagctaagctacctaatcctctgaaaactgttttctctgatttgtatttagattcctccccccattattcacaatcatattgtatttcggaaccccaatgcagagcagtttgctttgaaaaatagttgtttttaaaagtttaatgtaaataattattttttagaagttttttttttttttttaaagacagggtctcgctttatcgcccaggctggagtacagtgatgcaatctcagtccactgcaacctctgccctcccgggtttaagcagttctcctgcctcagcctcctgagtagctgggattacaggtgtgccccaccacgcctggctaatttttgtagttttagtagagacggggtttcaccttaccgggctggtctaaaactcctgacctcaagtgatctacctgcctctgcctcccgaagtgcttggattacaggtgtgagccactgtgtccagcctgtaactattatttttttataaagagagattcttattttcttggctttttgatgtatctgttcctgatagataatcattggctagtaactcctagtacactggtttcacagttgctacctctcctgcttttctctaattattacgccaactcaagtagttaaaaatcagtaagaaaaatgtcttgagctagaagaacccatagaggaagattttgtaatgcgaatctcctctcataattttagttctgtaaattcagggtttttttttgtttttttgttttttttaagccgaaaaaatgcttaatatgttccagtaagggtattaagtaaaaattaaataaacgtattaagtttaacatattaaattaatttaacatttagactaacattaacatttaaattaatatgttaagtgaatatacttaatatattctagtacaggtatgcttggaaatagggcgtttccttttcatgaattgatttcgtacagcacagtggcttataaggaaccagcagtgtttttccctgagtaattatgaacttagtcaagatcagaagctgggttttggggttgagaagagttcatttatttaaataaagtttctatttaaaaacctttttaaaaagttaacatcataaatattctgataatttgcatagtagtaaaaattagaagttgaaattctacctaaagctgtagttgccgtcaattgtgtaacatgtgacaaaggttttcccatatgtcatttcatttgattctca

SEQ ID NO: 115890 - DNA, 1056 bp, Homo sapiens
ccatcaatacttaaattcaggagtacttttttgtttgtttgttttgttttgtttttagagacaaggtctctttctgttgtccaggctggagtgtagtggtgtgatcatagctcactgcagcttctgtctcctaggctgaagctatcctcccacctcagcctcctgagaagctggggctacagggatgagccaccatgcccagctaattttttattttgattttttgagataagaggtctcaccatgttgcccaggcctgaggcaatctcctggtttcaagcaatcttcccacctcagcctccttaatgactgggattaaaggcatgagccactgcgcccagcaggaatggttattatattcattgagataaactgtagtatttgctgtttgaagtatttaaacataattggcatattacaatatgtgacactggccttaagattctaatttaaaatgcttaacagacttttagacttatgagtttcagttgaaaggtattttaaaatgttactaagtctgcaaaagtactgaaatgtttcagagaacttggaaagtcaccgtatgtttaatttattatgtttatgagatttaagcacttgggaaggtttatgctaatggggtcaagcatttgcaatgctgcttaaaagaatcatttttttaaatgtataaatgctattaagttgtttaaaggaatttgaattgtaaatgggattgttaaaacaaatttagtctgttcaactcaatgagggcatttcattttctaggaacaaaataccctcttagacattaaaaagccgcatgcctgttccctcagctatagttaactggaccatggtggtacaactgactcaacccttctctaagcagggatttgtaattgggatttataatgaaattcctgatctgggaaaatgggaggctgggaatgctatgtctaggtcatcagcggagaaagttggtttgtagagaatgaacaagaatgaaacctaagtgcaaagaaaataaagattatcctgctttaatagttcagactagaggagagagaaaccatctta

SEQ ID NO: 115891 - DNA, 1017 bp, Homo sapiens
gtgtttggtcccaagaatgttggttgctgctgggctcattgtgggtgttgaaggtataatctgatgtctagaggtagtgggggaaactctatcctattcagccttttctaatttctggatgttggtatagcttccatgaatacttggtggagcatgctccccttggtcccagccttctgcagggagggccggaggacagggcccaagttgtctggatggactcttccccagctcagggaagcagcttcttattgaggtagtaagtgacttggtggctttgttctggggtcacccagcaggggccttcttccggatccctgcagattccctgtggcttttgggtcctgtggaaggaaatcctgtcctccagacactgcccttctctcttggtggccctccatcccccagtgggctacctatgactggcctcatgcccatcaactcgaaatattagtctatgagggcatcttggggacctttgcctgggcaccctcactttgctgatgaggagattagtctccaagagggagattgactggcttgactaagttaactcagctggtttgacactctggattttaaaatgctctattagaagtcataagaataattttttttgactcagaaaatttgttagtggcagatcccacaataagcctggggttttccgaccttcactggtaacgaccttccccactgctctgccacatctccatttcctcattgaccaagtactcaaaggcaccattttatcctttcctgtcctgcaactgcctttgagctttctgacatgaatggggctccttcatggaccttaaattaaagggtctctcttttcttttatctcactagaggatgctgctggtaactatgtctaggcaagccctgaccttctgaagctcatttgctcacaagaagccagacctattaattgatggtcatttgctccattcagttcttcccagctcaaaataatagaaattttcattagctcaggtgtcagagggtggtaggtaa

SEQ ID NO: 115892 - DNA, 1048 bp, Homo sapiens
cgtcgtgaatatgtaacaatagcttttccgaaggaagggagggaaagataattaatattcttgaacatccatgacatagcagacactgtgctagctgtttcatcaaccttttatttaattcccattacttacccagtgtgctaagtatgatttcctctctctaaaactcagagaaattataaatgctgtgtccaaagctgcacagctatttaccagatgtcctgggactaccagagtgtaaggactcaataaatgtttgtgctatggatgaatggaatgtgaatgaaatggcctgcagcccaggcaagttttcacattaccatttgtctctcatctcaccatgtgtttcaaaacataaaacgctttgtttatcttttaggaagacccacttttctttgaatgggacatgaaaataatgggtgtggatattcttactcctatttattgttgaacatttggttcctgatttaaacttcaaagtacgactcctatgagagtttaatctccagaaaatccctgatgagaaacaggcagatagatatctattttatgataaatccttattcattcagaatttcagaggcaatgaagatgaaaaaggcaaatgcatacatatctctctctatccatatatattaacaaataaggctaaccatgttttaaagtagccattttttgtgatctgttttaatgaacagattagtatagtactgtagttttttatgttttaatttagaccgtcatcttgaggccttaaaataatttaatatcttaattagccaaagcattccctttcaagaacattagcttgctagccatcctttcttatgtagtatgaagatatattttagtccatattctaatttaataaagttttacattattttcaaagtgtctctgaaagagattaatgtaattgtggttcagtaattattcctgtccctgttctaggttagtctcctctcttatcttctccatagaaaatgggtatcactgttttccatttgaaggaaaagaatttttttttttcctttgtgatggagtcttg

SEQ ID NO: 115893 - DNA, 1041 bp, Homo sapiens
tttcagcaatttcctaatattgctaggtactttaatttcatctaccttttacattattgttgtcacacattgtagttctacagatattttaaactccgtgacattataatattttgtaaaacattttcttatatattacacaaaatatgtaattttataattttgtaaaattgtttgtatatttgatttaattatatttattcacatatttacctactcgctattcctcattctttcctgcatttccatgtttctgtttgagattattttatttcttcttgagtaacttccttcagtatttctttcggtgctggtctgttggcactgaattctctcagtattagtcttaaacattttaatttcagtttcattttaaaagatatttttgttagatatggaattttctttcatccctttacagatattacccaattgtcttttggcttccattacttctctgagtggttctcctctctggtattttgttacatttatgtcctcattgtttccatgactttttatttgccagcccttgttattcctggttgttttcagccggactgttggcctgctgtggtctattttatcctatctggagatggacacctactataaaggctgtttctcaaaaaatgtgttataagtcttttaagttattttagttaaccttcttttaaaaaattggcattctgatatttccccctggatttaaccaatttgtatttacgtgaatgggacaatacatttgaataatcttgatatttcaaattatataaaagtcagacgcttttaaacatgcttcaaatcagatcaggggttcttcagttttttgattcacatgttctttgtgtactcttctcagaatctgtaactgatagacagactccccaaataaatgccccaaactgttgcatacattttccggaggattagggtacatttcccctcaccgtatctatctgtagatttcaggatgggaactacattaagaacataaaggaaagattgagttaaatgaaaagctgtagataagtcactaaa

SEQ ID NO: 115894 - DNA, 1048 bp, Homo sapiens
atacgtgttttaaatgtttccaggtctaataaatccattcatggatgggattagaagtagagtgtaagctaaattctggtgatatgatgatagagcttccatattctaaattaacaacagtgaccttattgctcaggttcagagaccattcatctcagtggcttgttattggcatggggagttgttttctggaaacttctggagtccttgccagtaatgagtgtcaagagtttggagaggtcccccaagacttagagtaaaactgttctttaaggatctctttttgtcactccatctgatggagataacatttccttcattggaaatatactatatttttgtaaagcaaacattcattaacaaaattaggtcatgttaaaagaggaaaggggcatagagctagttctgtgaattgaggaatctgggaacaatctggtgggatgtgacatgctgaggtatgctgtaacccaagaacattaatatttccccttgaggtttctttactgttactattacaggaccttataagccatccagaatattgcgatactaaccatgaagcctgaatgtaatttacaaatgtacaaatgttctcagccaagatataacagaaaataagtgtatattcaagtcttgaatatacatgactctccaaaaaacacataatttgaatcaacacaacatttaggttggaaatgtcgttcctttgtgtgtgagtgtgttcagaaatacaacatgatcaaatttgtgcatgttttaatttgcataagaaagaatttacaacagtggtaccatgtgttatgaatatctcacttatttatgacatccaaacctcaccatgttccctggagatcatatctgttttccacagtaatcacctaataaaccactggctgccagctaatttgttctactacaggtagccccattaaagtgagaggcatcttttcagattaaaaggagaatgaaatgttgaggtaaagtactatgtttaaaattcagtactgtttcattctttatgtaaacctttaaagtatgtagtatatgt

SEQ ID NO: 115895 - DNA, 1060 bp, Homo sapiens
gaggttggagctgagggctatgctggtgttcttgaccttcagtgatgtgtaaggaaaagccagacctcttatataatgaattacgctcttttaaaacatattgaaatctgtggtatttgaggaaatagacatgtgggatttcctcaggtgggtacgagtcacgtccttacaatctgctattttgaagaacttgcggtagtgagcagccttcctttggaatcaagggcatttatttatttaatgataattttttccccttcaggatttcctgtgagagctcctgggcttgtttccatcttagtccacacagataataccagagtatggacagtcgggttattagacactctgctctgtggagagctgatttttaagaggcctaatctaaaaacctatctctgtgcagaaggctcctgggcaactcatttacacttgtcagctagtagttgttgttcttcttaacaaaagctcccatcagcagatcctgataattatttcttttgcagagattaagaattcagtgtccagcagatcagcagctgaaaaggaagatataaaggtaatgaatgactccctgcttctttctttgcacgtctttccataaagtagaaatgaagatttagtggtaataaaaatgtttaaaaaacactaaaaaaaggatgtgccccaagtcactttcagaataatgtgaaattctgttttctttttctttcttttttttttttttttgagatggagcctcgctctgtcacccaggctggagtacagtggcacgatcttggctcactgcaacttctgcctcctgggttcaaatgattctcctgcctcaccctcctgagtagctgggactataggcgcccaccaccacgtctggctaatttttgtatttctagtagagatggggttttgccatgttggccaaggtggtctcgaactcgtgacctcaggtgatctgcccgcctcggtctccccaagtgctgggattacaggcatgagccaccgtgcccagccccattttctttatcaaattcttaatccctattctttataaccaaaccta

SEQ ID NO: 115896 - DNA, 1483 bp, Homo sapiens
ttcagaggaaccaggtgttcctccacccttggcaaggtagaggtatttcctccctctgacctgggaattctcatctgattacaatattctgtttcacaactccctgaggaccccttcctaaatctcctcccaggtactctctatttcttcaaggctaatttggaccccagccctatctcttgagttacttagaggtgaatagagcataatgaagctaatggggtgtttgaagatacaggctgagctatcagcagaggctgagtttgggcacctggatgtctgtgaagacctctggggctgacaagtgagaggcagatgagcacgaaccactccagttggtttcctctggttctgtgaagctgaggcatctcacacacctggaaggcacacatgggcaggacagtcttagaagttgcaaggggtgaggtgttgctgatggtagtgactgagggctcaagctgatgtgaaatcaggaaaagctaaatcaatgctcagagtgagattaatggagaaggtgggtaacccacggggtcaccgtgagcctacacgtgcatggggctccctggaggctgagggagtgtggttggtatgctgtgccaacacacgacagagcagttacaaccattcggaaatcatgctgtgtagagcagagcaaggaggaagcacccttggtgttggttgatggtgttgctagtagcttggccacatgccagaggtggtttccaggatcttgctgcatgtggccctactgaaattggaacagaaatttagacccacactaagcaatatacacgtccttaatatttttgctatttaaggtaagagtaatgatttacttacagaagaggggaagaggaaggcaaaaagagagcaaacatctctgtatagatggctgttgtgggccactgatgtcagggccattgctgttactcacgcacacaggatgtctcagctacaaattgcatcatgctcctgggaatgttagctttgaagaatgtttgctaagatgaattgctgggggagggaggtaggctactaaaagtattaaacactgagacgatcttaatttcaggttttaaaaactcactctagtttcaaacttgtaaacttgtgagcaagaagcatgtgctacggaaattgtagtagtctgacctcgtctgagtgttttgtcagtaacatcattaagtctgtgaaggatttgagaaagataaatgagcacaactttagtccagtgatttatgaaaaggaccatgatgagtgtttgttgtgctagcattttctttttggttcatttaaactttttgaattaataaagtcccctgagtttttgcaaaggaaattataacagattttcaaagaacctgagagagaaggggacagcaagctgtgagcaatagtcagatggtcagacacagtctggaataggaaatgggctctccctggaggccacttcaacactcttttgttatttgttatctgttat

SEQ ID NO: 115897 - DNA, 1849 bp, Homo sapiens
aaatgttgtgccaaggagaaggggagtgaacatcttgcaggaacaagtggacagcctgtgggaaatggagtagatggggagtctcagctgtaaaactggaatcccaattgcaaacaaagatgcataaaccatcactgaatcagcaaagctgcgaatggcttgattagacactatcttgcaaactctacttttaagaggttgaatctgaaaaaataaagctatgtggctttggttagaaattaagatatccagttaaatgttaagttcctccttgaggactgtgaaaccataatgccagtgtctcagggggaattacagaagctcctggaacatgatgctcctgttctttcatcgaataatatgtcaaagtgtgagtgaggttgtgggtgacagaccagatgtggtgacactcatactgaagctgattttcctgcaataatatatcactcatggtctgcattagattaaagaggacatgaaatttatttggccaaagctgaatatcttatgactatttggatggaaaaaatgaagggttggtgaaactgacatgtcaaaacaagaactgtgtgagcatgttttgactttccctatgagggaaggtgatagggagatagagacactccctataggtgataggggacatgaggatagcactggctggcatcctcctttctgcttggagagtctcagtactttgaagctctaggcatgaagcgctgcctcatctactcttccaggtctggctggtagagagtgggcttggcgcaagtgcaagagaagatattaagcatagtatcttgcaaagtaagcctcttggaaaaaaattatgttagtcttctataattatagaaataataaatgttcacaatagaaaaattgggaattttagaaagagtagaaaaagaaatccctataatatccccacccaaaggcagttactattaaatttgggtatatttcctaccagcattttttctcatgcatgcatttcttttttacgtagctgtgatcatgaaaacaagataattcgtgtcctgtgttattcatttgacatattccataagtaagctccattatagaaagtaacttaaaatgatgttgtatgtttgtttttgtttgtttatgttttaataaagcatgtggattacttctataagacgaaagggaaaatgtagatcctatgcacaagtatttatttccctccaaaccccctttttataatatgtattgttgattttatagagtgacctgatcagtacatgtaggggctcaaatcacagctattctttaatacttcgggttacttcattgctattattgtttgttactaatatgtaagatgaggaaaagacaaccttttggtgggtgttgggactgggagggagggcattgaggacagatgaaccaaagctggatatggaaggaaacccaacttcataccaaaaaaaacaaaacaaaacagaaaaaagaaagaaaaaacccgtctagaggccagttgggaaaagaaggaagcagaaacaaacaataggatatgaggttcagatttctttaccaagaagacacagatctttcatgactgtagacaagaccgagagagaaacaaagcctccccaccccgaaagtcccctgaaaggaaaaacattgggaaaagggaactggtaggaaatgactggaagaaccaaagaaacagtcctcctaaacagaatgttaggtggtacgtaatacaggttttcaggatctccatttgtgggcatactgggagagtgcaggcctacatgtgctagtggtgagctggggggaaatggtgcagtcaataagtgctagtttggcaaacaaccagataata

SEQ ID NO: 115898 - DNA, 1043 bp, Homo sapiens
gggggatatatcattgaattctgctgtctgcaattacaatcagccagtaacagtcacctgttgaatatgaatgagatgtaaatagcatcttgaattaatttaaatgcaattatattgataaactacagaaaaaaaacccacttcaattactatagaaaacaaggaggataaatgatccacattcagaagaaacgtgttggtgagcaaggaggtaagctggcctaaaaataaaaagggctgtgcaaacactatttttgacttcactttctagttgtatgttaactgttcatggctagtcagtagaaatcattttattctttagaaaacactgataaatggtaaagcaaatgagtacattggaaagtctcttcttttgatatctgagttattttcacatatgtcagttgggtgtctcacatgtattggttaggtcgttcaatactgtttcagaataattttgacatcaagaatcacttgatatgtaactggtcaacaaggactgcatttggaagaataagattaggatgaatctgtctggaatctcagctaatagaaatactttttatgcagtttttttcatctctctctttgtctatattgccctgaagttcttctgacctgtcactggtagtcacgggaggaacagcctattccagtaacttgctgatgtggggtttatctacctcctagttgagtgactctaaaacttcaataggcatgagaattgcttggcataggggtggtgcttgttgtaaattattgcagattcctgggccaccctcagagagattgattcaacacatctgggatgggaatctcataatctgcatttaaaatgaacagttttccctcaggccccttcctccattctgatgcctctgagaaattctgcccccgattctgctttctctacatttgtagtcttctgaacgctttgtcacatttctgaccaacttaataaaacaagttagggagcccctatagattgtattacttttgttctgtttgtaatttaataagaaacatgtctttctctttcccat

SEQ ID NO: 115899 - DNA, 1120 bp, Homo sapiens
taggcagccccaggacaggccatactagcggcccagcagttaatgattggagtgggccagaatccattactgttccacttcaagggctccaggaatgcctgattttctgtttttttgttttgttttgtttttgttttttttaaataggagattcaatcaagaaatgtattgcttattaatcaacgattgaaaaatacaggaattaggctttacccaaggttctcataattgtcattcaatctttaaaatgcatactttagtataaatcattaggccccaggaaatgttgaaatgtttattcctttatgccttttatccacttgtgcaacttccctcgttctctccttccccagctcatatcatatgctgcctttccagtgacacatagtgtgaacatttgttttctttttgctggtgcaaaaccaggctacaattgccaaagaaggcaatgcataccagaaagcttgacaaccttggagagcttagatagcaccatattttctctaatcataatgaaaataactaatatttatatggtaccctattaatcataactactctttactaagctatagtacatgctttacatctatgatatctgagtcccaaaataactctgcagtacagatattgtctctgttttataggtgaagaaactgaggctgagttttacagttattcccaaagtcataccaggaaacacagggaacagtaaccatggtagaataaagaaggagaagggatgaaagaatgacatatgaataatgtggtttttgcacatgttgtcttgtagaagacctgtatgttagatgtgattgtcatcttcatttattagttggggtctccaaggctcagagaggagaaatgagttgccacaaattagagctaataaatggcagagccaggccaagaaccaggacactcgagagtgtccttcctggtatgtttcaccacctcttagtagcggtaagggatggtaaacttcaatgggtagctaccttgggttcaaaaggtgccattgtgcctccccatcttagcttctccctctcctctgtgtatctttactaggaggagaagtgacagggagagactctggaggagcaagatggtagggttgttt

SEQ ID NO: 115900 - DNA, 1035 bp, Homo sapiens
tggatagattggagtgaaaaccgttagctggaagaaaccagcctgtagtaggaggaaatactgcaaacatgtaaagagaagtagatgagtgagagggtcctgcctgtgttctgggcccttgttgttgcccaggttcctgcctctcaaggcttggatgcttaattcttttagttttgtgagccaccctcacatgccttccatacatctccctccctccctcttttatttttgttttagcaaagtcaggtaaatatttctcccacttttaactattaatctccaacttgctgtttaagatgcagcttgagtgtactttttaccaggaggcattctctgaattcccttggggttcagcattgtatctcctgtgtcactctgccttgcgtacgtttttaggaaaggccctctcgttactgtatcacagctgttattaaacctctataccctaagacactgaattccttgaaggcggccagcccattatcacatctccagcacttggatcccagaaagtaggcagtgaatattgaaagtgcctcgtggcacaaatttacccacactacacccagatagtctttatctacaattgatctgatcatcttcatggggtcccactctataggcagtggggcaggggaggggaaaggatatattttagcctaatatagaaaacttggtctgatacaataatgtaaatagtcatttttggtgactgatgggtatctttacgtaaaatattcagtgtctcaaatttcttccctctcctactcttccttgtcaagctgttgttgaatgtgatttcctggtgacagtggaggttaatggggggtggaggtggagggatggaaagtcccaatccttcaatctacactgcacctcctgggtcctcctaggttctgctgtggcttgactggcctaggctcttccctgaggtatgagtgctttattactgggtgttctggcatctgtgataaaggtcagcagctgggattgtggtgctagtcaggacctggtgattctccttctggcttcacc

SEQ ID NO: 115901 - DNA, 1034 bp, Homo sapiens
aggtgatgaagtctacgctaactgtatggtgattgatcaggtaaggcccaactgacattacaggatgatttctacctctctccaaaacctgggtttgtaagaaatagattcagcattgttgtgttcctttgacaattttagcctaagagcagcaaagaggatgctgttgtggggtctcattgtatgagcatttaagcatttaacttaggtgcttacttcagaacacaagacaccttactcaacccagaggcactgtcagggaggggtcttgagatactgccaaatgggaagagtgtgagagctcttcttcggggcccaagtaggaaatgacaactgtgcaaccaatgtctcctctacagcttttcaaaaaacagtatgtatatgacctgattatgcaatatttgtattcaaatccagcaaatgtaatgagcaggtgcttggtcccagcaccataggaaactgtcacataaattacttgcttaatcgatacaacgcatctattaacatgtagtaagattgtagagctttcatattaatacagaatggtatcatattataaagaagctggaatcctttggaactttccacccagtccctgatagagacttttgagttaaatctcacagaagcagatggtttgaatgtgctggcatcttcttgtcttttgttcttttctctagctcagtgatcttcaaattttagtatttataaaaattatagatctgaagatttctacacactaatatatggaggatttaagggattttcaagggtagttttgatgacacaaagtctgccttataaactgactttaaaacttaatccctatataagatccaccctatctactcactgagcagtaagacatttaacccttttatgttgttagtatgcatgtattttaccctatttatagatatattctgtgatctaaactttttttttttccatctagagctcaatttcagcccttcagtagcacatctctgcattttccttttgtgttacaaagcactgttatatcaaatgcagca

SEQ ID NO: 115902 - DNA, 1046 bp, Homo sapiens
aggttgtagtgaaccaagattgtgtcactgcactccagcctaggcaacaagaacaaaactgtctcaaaaaaaaaaaaaaaaaaaaaaaagaaagaaagaaagaaaatgaaagaaagaaatggcttttgctaggtaggaatgttcattcggggtaacataaaattttgtttaaaaagagatttggagggaggagaaaaaggctaattaaatactagttggaaattaaatgaatacctattgcaccccccccgccccagtgaaagaatctggattcagagaagtagaaaccaatgacgctctgtgtccttccttgcttctttacttacttgctggctttgtgctttagttctagccttgatgccttggacgccgacagtgaaggggaagggcattctgagccatcccacatctgttacactccagggtctcagagctcctcaagaactgggattcctagtggggatgaattggactcttttgagactaacactgaaccggattttaatatctccagggctgaatcccttcctctatcaagtaatctacagtcgaaggtattcttattgctattaatttggtatattgcaagtgtggagaatatgttgtctgcatttacccatctgtatctgaaagacatattatattttattcatacatatgaactatttttttgagacccatgtgatatctgattgagtctgtctttttaatctttcccactctgttttaatttttataatctttactcaaaatggctgatttacattttcattaattcaccatgagtacataccatctttctttcacatacttggaaaattttatcattttacaatgatttctcccatcatctcttaagcaaagggagaaaaaccgatagtattaaatgagtttaagtgatcaaacttgttttgctcacgtaaataattgtatggccctgatgatgaggtaaatgatgttaataaggtagaagtgatatttattgagcatttctggctgcttgaactaatccggaatatcacagattttgtcaacttttccatagg

SEQ ID NO: 115903 - DNA, 1056 bp, Homo sapiens
gctgcatctgaagacaaaaagcaaggatgccaaagataaagagaagctgaatcgacatcagtttgccccaggaacattctctggggttctgcagtgtttggtttgtgataaaacactcctggggaaagagtcactgcagtgttctagtaagttctcaggtctatgtgcgctgtctttgttttcatctcctgacagtaaccttgggaagaggctcattgctcaatacatttacataaaccttttcagtgccacacatatgactgaaccgtttaccaagcaaggactgatactggttagagtcagtgtgttttgtccataactgatagcctgtctgaaccccagatttgtatgcctgtctccactgggatgtctaaagagcgtctcagatgttacatctccccattctgtgctcacctaaaagctgatgctctcggcctttaatggcaacttgatcattccaaccagatgttcatgccaaaacttttggagtacatctttatacctcccattttctcacatcccacatccaatccatcaacaatcctcttggctctattttcagaaaacatataaaaccaggcacttgtcacccctaccactgatatcattctggtctaaagccaccatttctacagcattccaactgacttccttgtgcttttacccctaaagtctgttctcaaagcattagccagagtgagctggtaaaggcatatatcactgcgttcaaaaaaatctcccaatggcttcctatacctcaagtatagactgaagtccttaagtgcttacaatgacagcaagttcccatgtgatctgtcctccccctcccttactccctctgctccagtcacactggcatctttgctgtttttcgaacatggcagtcatgctcctgccttagggccttctctggctgttccttctgattgcaacactctttcctcagatacccacacggatcactcagacaacagcttctcaggcagcctttcctgatctcccagtgcctggctcatccttgccctcctcctggcattttttcccattataatattt

SEQ ID NO: 115904 - DNA, 1086 bp, Homo sapiens
aacacatagtattgtgtaagtattcaaaattcttgggtaattttcttcttgttaaagcctgagttgctaattttccacaaaattatatttctataaaattacccttgcttataaataagtttcttggctattatgttgatgttacattatctgttacacataaatttatatatcataccttcattgcagatttaaccttaatcaacataaaattatccttttaacttcattagatgccttttgcatttagttttactttgtctaaacttaatactcctcctgctttccatttgtttgtatttctttcaactatttttgtgttttcgatttgaggtgcatgtctttaatttagctagaagtaatctgtaatgtagctgaaggatgttgttttataacagggtttttaacattttacatttaattttactgctaccaacatatcttttataggtccttgctcttttccttgatgtctagtttagctatttagaccatgtgttgtttgcttttgtcttctccagggatttggcaagatactctcttttaatgtcaactaatagtagctttaaggctgtggaaggctaataatttaatatctttttatttcccttatgtttactctcccccggcccagcctctgttaatacactgaattaattattattcttttcctaagattattatgtttaatctttcaagtataattttctatttcaaaaaaaagttgacacttttattcagctctatctctacctacagttttttagatgtggttctttgtttagcttgttttactgctcacttttgtttctttaaaaaaaaaaaaaactacagtgaatccttcttgaactcctaattttgattctgtcctcaaaaggctaaaataggagtgatctgttgatctgaaacttcatgtaccaagggacctatttttttttttcacacaagaaaaacaacttagttaaataaattcttggaccaaagtcttttcccttcattgctttgccaacattgctgcaacagatgtgagcatttattattaaagtggaaaagtctagggccaacctgaccctattcctttgttga

SEQ ID NO: 115905 - DNA, 1019 bp, Homo sapiens
ggactgagaaaggaaccttatttacagaaaagacaatggaagctgagaaagttgttaagtcacttgctggaggccacagtcactaagtggcatggtcaggactgagacctgcatctgccccactcatcaacctgggttttctcttggaggtcttactgcttgctaattagcaacatctttttcgtggactttcacattagtggttgtattcatgttagtgataatcttctatggtaaatactatttcatagaaatactcactaaccaagaccaacaaatttgtgcgtatttggaggagaagctgcatatctatgctgaacttggagaactgagcggatttgaggacgtccatctagagccccacctccttattaaacctgacccaggcgagcctccccaggcagcctcattactggcagcagcactgaaagaaggtaaactgctgtgagaagggtttgggtcgacacgttcagaaaatgtttattgaacacctgctaagtgccatgcactgtggtcttggtgctgaggatacagcagaacaagacaaggtccttactcggctggaacttatatttctagaaatagccaaatataaagaaagaaatatgtcaggttgtatcaagtgctatgaagaaaaataagcaggataagggagagagagggtgatggagttgggatcgctctgttttagatagggtggccagggaaggcctctttgatataatgatatgtaagtggacatgaaggaagaaagctaagtggtatcttgagggagagtcttccaggcgtagggaatggccggcacaaaggtcctggtgcatggaagtgccaggctcgcctgaggagcaggcagggggacagcacaggctgagggaagggagggtggggtgagcagtgcaggcgatgagtccagggttcactaggtctcaggttgcatggcgggagagaaggacttggaatttcatcctgagtgggatgggaagcattagagaattttgagtggaggagggacttgactt

SEQ ID NO: 115906 - DNA, 1056 bp, Homo sapiens
cccttgattaattaagatatatagatgcagtatagctttttaattctatacttcttttttttttcttttttaaacatcagcaccactaattatcttcctctctcaagttctgctttatctaatcctgagtttctagtttcagaatgcgcacgtatgtttttcattttgacacagcccagattcatcaggggagttgtactgccctgggtgatttccttttaaaagaagaacctcattatgccattgaggagtctctgtctaaaaatacgtgcagggatctgctgagggatctgctgctctcagcctcgccccagggacagctggagaggctcccctctgcagctgcccgagcccgcggtcgtgccttccctcccttcaggccaggcagtgaaggtctccttgtctgtatccacatctctcatgactggggagagtttcaaagggacacccgtggcatttgccagaaccattgagaggctctttagaggggtctgatgtcgggattcaggtagaggaagtaccgaagctggctggtggggtcctgtaccccaaggcctcttcagttctgggtcagactggaacatggtgctatgagagtttgattctctttataaagttgttcaaggcacaaggctagttctaaatgaaggtctacaactgtgactgaatgggtcggttctgcaaatgacttggagaactgggctcttcttcatcaggcttatgtcagcctgaggttataagccaagcagacagctctattttcagtcttcagtatacatgatgagtatcttctacttctaggaaagttctgttcactggagaccctctggcccaccctgaaattggatacagggacagggacctgatctgtgttttattcttctgccttgtcatcagcttctttcccatttgattttcctaatttctatgagggagtgagaaacagagtggtgaattctttagtgatgcctttggccactctttaagagttaggaatagcacccaatagtagaaccatttttcaaatgacagagaaacctataaaatgtccctcat

SEQ ID NO: 115907 - DNA, 1013 bp, Homo sapiens
aaaaactctcctgtgtatatgtgtgtctgtgctctctgacttctggtctttctgccctgcaaacctttgcttctcacccactatgtctggcagctctggcacccgggggcccttttgcaaccagatggcgccaaagtaattgaaacaccttttactttggaatattcttgcttctttcaccttccttgaccctcctctccttgcagagttgatttcctgtcaccacccacatttcacctactttttttgtggttaatttttaattaatctgaccagtttttgcttggggcacagcgattcccaaagggaatcctcttttttgacttactgctatagacatagatattaactctctctttaagaattaaatacataaaacttcctattaatgtctactgaaagtgagatgtcagaaatagggaaggaataaaatatgattctgggaggtggctagttggcctcttcctgcttgtcagggctccagagtttagctttatctaaaattgaattaggtacattaataggtgccaatatgtgtcaatgtgaaaaaatggcaaatgtcagatcttctcacatatacaacatattttacatattatatactttttgtgtatattacataagactgagaaatcaagtcaaggacttttaaaatccagagaaaagacagctgtgactgagtgttcttttttaaacttcagaggccaaaatgagcataggaatgtaatattttactccttctgattgtaagctttctaatgtattgcttcttaaaatgttcctgcttttcatcacttttaagtgtgaagtttgtggtgtccaactgtgttaatagaaaagagagagtgaattggacagtaataatttaatcttgaacgcaaagttgggtggctcctacccctaaagtctccctcttccactccaattcagctacaggtagataattgaggttaagtgtctgggttcttctttggattaagctatctgcaaaattttttgcttaataaggcatt

SEQ ID NO: 115908 - DNA, 1021 bp, Homo sapiens
gtggcagaacaactccattaaaaacgcgaaatttcctgtcttgtgtcaaacctagtggcttttgggcataagtaaccgcgggtagcacagtccaactcatttctatggttctaatttttatagactataaaaactctgtgccatatggtcttactacagaagcagtggagtgtggatgggccacgacagagccagaagagcagcgagaacgccaaccatccctctagggcgggggttcttagagcctgttctctcccatagggtttggcacagatctaatgtctttaagcttcatctccattttcagcctctgtcttttctctatcagaggggctgcttacgagtgaaatctttaattggcagtccaagggaagcggaggtctggctagctcatcctggcatcatcagcctaaactaattgaatttaacaagttcaaaattacccgaggacatgaccatggctggctgctttttatggcttaaaattagatgagacagtaggcccttgaggacagggcatctgatggtctcccatagcgtaaggtgtgaagtttacagtgggtgatcgatatttatttattgaatggcgtgccatcgagttcaactgggagtcattcacttgttgagtgtccgtgctatgtcaagcatcattcttataatatggagcacatggacaaagtctcgctactcactggtttgcatcctagggagagaaggccgacaataaatgaataaacaagtgttcaattatggaggctgcaaaccatcactatccacgtgtgcccttaatgtgtgctgtggaagagacaaagaacaaggcatagaccctctccctaaagaacagacggtctcctgtggctggttcgtggcctctgctgctagtacttctactatggcagtcactggtctggtgatctctgactgtggtgggatctagagcagcccagctacgcgcgccactatggccaccgtctgagtctggtttcttttcccaactgctgtatatgttgatatcgtgaat

SEQ ID NO: 115909 - DNA, 1055 bp, Homo sapiens
agcattagattcttataggagcgtgaaccctattgtgaactgtgcatgcaatctagggatctaggttgccccctccttatgagaatctaatgcttgatgatctgaggtggtacgctttcatcctgaaaccattctcaccacatcccagcccatccattaaaaaaaaaaaaaaaactgtcttccacaaaacaggtccctgatgtcaaaaaggttggagaccactaccttagaccatgcaaagaaagaggctcagtgtgtccgatggcttaatttactcattaaaatgtatctcgaaaggatatacatgcaatgtttggattgttgaaaaatttgtagaaaaatttgagaatacaagtaaatgaaagaaaatgatttctgattctacaaagagaattaaaattatcatgttggtgtataaggctccagattttagaattgttctctgtgcactcttctgtaacatgtaactttctctgtcatcaactattattctattgcatactttttaatgattatatattaaattcaactctgtggggtttattcaatcccttattgtttacacttttgtattattaacaacactgtagaggacatccttgtgtactcatctctttgaatacatctgactatttccttagggtaaatgagaagaattattttgtttaggttttcaatagactttgccaaaataatcaaatcaaccaccattctctctttttcttccatttgaagatggattagggtatctgattattttatttgtacttctttgattactactgagacaaaacatttttccctcactggtttattattcattcatgcttcatatcttgttgaatttaaaagaaaataaaatgaagcctaagttttcagcagaaaatataaaggcatgctgcattcgatgttttgttatttagacttcgactctatcaagacttctttctcttatgaccttttattcttgctctaggaccaacatctgaattgttaaagccttggattacatttgagtatatgacagtgctcatcttatttatttttctatgcat

SEQ ID NO: 115910 - DNA, 1001 bp, Homo sapiens
ttgatgttcttagcaatcaatgtatcatgtaagacaactaatctttcttttaaatgtcagctgggaagggatacagtttgagcaccagccattaacttgggggatgaaaacattgagcatcctggctagtgttgccggatgaaaacactcacaaggtcatgtgtcttcttttcaaccctgaatgcagccctgtgtagattcaaggttcggaaaagctggatcacctgaatgacctaatttttgcaacacattaggttaaaccaacatgggaaatatcaaagtctacagtgaattattttaatctgagctggtccaaggccatgggctttgaaagatttctgttcatggcacagtcgtcttttttgaagctgaatgtcttatatgtgactgaagtttttacataaacaattttgaatcaggtggaatgaaatttgatccctatatcaggaaaatagagttagaaatgaggcatagacagggctaaaaggaaaagacacagatattctagcaaagtaaagttaagagagtgaattgggaatttccctaaacttgaaaagcaagtgctgttctctgtcctaaatataaatgtaaactttaagtgtgaagattattcatttagctttaaatgaatatttaaatttagatgaatatccgatcttcagattccagctctatgcaagggaaaagaatggccttatcccaaatgttagatagacatgaagaatacctcacagaagcacttaattactgtagctgtaactcttacgtgagagttattgtctgtggtagttttgacatataaagtatgggatttttgtttgtcttaccatactggtccctaaagatttattagaattaagtggtgatgtatagtctacaattttctttagccagatcaacagagtcctgagtggcttattgtgtgctaattatttcatatttaaagatcatagtaattaatacctattctggatgataatcattgttttatttataacaac

SEQ ID NO: 115911 - DNA, 1050 bp, Homo sapiens
acttctttaatatattatcttacaactttactacaatagagagcagattgcagaattctttttctaagcacatgttgctttgctgtgttggttcattaatctgctatttacagtgcttcatgtggttttgtcagcatggttttacatactggctttggtataattccgaaactcagtttgagttaaaccacattcagcttttgtttaaaagaagcatgtctcttactttttgtgtatctcccatctttttctattgacttgtgcttcaaagtaaaactttttaaaccatttggcagcatacttgcagtagatagaaaatgtactaaggaaataaacagtgattatatacaaaaccagtctatccacatgtaaggaattagagccaaaggaaatgctgagaaatgtacttacgcttaagaaattgtatgtccagagtaggccaaggacgctcaggacattgacaggagagaagaaagtcaactgtggcttaaatctctcaggaacatcctggtttatataagtagggattacatcagaaatgctgtgtgtactgttcaccactggagttttgcagctagtcaaaaaaccttatttatgtttacttcatgataagcaatttctacaggggagaaaagaaagtcagagaataggcggtgataagaaagtggattgagaataggatatatacacttaaaagagtggtcaaggctagataaaattattcaaaccctccagagctttcacagcttttatcattgacagtaacacaacatcagccactggtgatggccttagctaggctccgtgggcgcttgccacacatgatcttgggggacagtgactgcggggggccggacaggaagaagcaggctccagggtgtgctgggtggtaacagctgatgtgccagaaccaaggaccaggcagtgttgttgtcccctcttctgtgttttgctgctgaatctgggtgagtggccatcagtgaccactactgaggatctccatagttcactgtaatctggctaacataatttgcctataatgttgtgggc

SEQ ID NO: 115912 - DNA, 1058 bp, Homo sapiens
tcaggggtcgcctgccaacaaagtgaaagtgtttcctaaacgttgttagaaagccaatagtttaaaatataaaataattagctgtaaattgggaaatttttcactcagattggaaatacattagaataaaaagggtaactatctttccatatcaatctcagaggaggtgtttgtcagtggatcaccagaattgttttggggatgaagctctgatagcacagcgttttgcttcttccttttgttcctctgtctactggaacaagttacgtaagtcaaccacatttttagaaccagatataaacacccaaatgtcagatactctgacaacatgactgaacatcacctccatttgggatggaaagcttcctatctacagaccatccaacacttgttggttacattatgcaaatatacccccaggaagacttctaattgtactttggtttctggagtgggctctcctactagaaagaaaatgtcaaaagcagcctacaggaatattctagtgtaaactatttgtcattttaagtctaaagattctgttctagtttatcaccttaatctctttttgagtttggttatcctgaatcaatttgtacttgttagttctggagaaactgataaaagtcatggttcagcatcgccagaaagcatctcttgttagcacttataatttgaattatatggggtaataatttatgtaatgtctgtcccactagagaggaagcttcatgtgggtagagcattacatatttctctcttgttaactgctctatcaccagcagcaagtagtgtttgatatatgatgaagatttgataaacatttatgaaatgaatggaggagtccaggtccacactcattagcagaaatgaaagcaaccatgagctgaagccacacagttgactcttttactgaggcactgaaagaagttgaggtatcagagaaatggggtgtgtgatggtggttatcacaggcaggatagatgagtgtctccggctagctaactggatcaagtgtttgttttaaactttttgtaatatggtgcatgttagatagc

SEQ ID NO: 115913 - DNA, 1044 bp, Homo sapiens
cctgaatactgtgaatatcaatttctcaaaccagaataggtatgtaagttctttgacatctcataattttgtagttgataaagaggaaaaaacaatcatttgtagaccttagaagtacccccagcacttcgggaggccgaggccagcagctcatttgaggtcaggctttcgagagcctgaccaacatggtaaaaccccgtctctactaaaaatacaaaaattagccaggcatggtggcaggtgcctttaatcccagctacgtgggaggctgaggcaggagaatggcttgaacccgggaggtggaggttgcagtgagctgagatcgcgccactgcactccagcctgggtgacatagtcctactctttctcaaaaaacaacaacagcaaaaaaattaaaaattaaaaagaattggttgccaatttttaagaagtctggtaataacataattattaagaagcaggtagaactaattagcttgggtgtgttaggtttaattgcttgccttcttctctggctcaaagaaaaacattgcatcttgtatgcttaagaattttaacagctgtttttccctctactgaaccagtaagaagtaaatgcagcattaaaattcctaggttgatttcctgccttactcagctggcagagaaatgaatttgatttttcttctctcagcaaaatgagaggcataactcttttagtgtgggtagggttgtgaggcaggccgctccccagaaagttggcttttttgccaaggtacttagaagtccctggtctctagagccttaagaggaattcagagtcatgagaatactaccccattcttgaggttgatgacctgtatgtcatttaattcagcgcgctcagaaaaagttctgacttctttttatttatttatttatttattttgagacggagtctcgctctgtcacccatgctggagtgtagcggtgtgatctcagctcactgcaagatccgcctcccaggttcatgccattctcctgcctcagcctcctgagaaaagttcctacttcttaacagagact

SEQ ID NO: 115914 - DNA, 1032 bp, Homo sapiens
aaaatagctactatttattgattcataaccctgtaggagccactgtgccaaatgcttttgtagacaactcatttgtcatccgtacattattattatcctcaatgtacaaaagaaaattcacaagctcaaacagtttagacaacctgctcaaggccacatataagtggcagagcaggaattcaaagccacatctccatgctgcgaatcctatgctatcaatcactccacaatatggttcttaccccttcagtgagtgctatggtctgagtgtttgtgtccccctcaacctcatacgttgaaacctaattacccatgcaatagcattaagcgtattaagaggtggagcttttaggaggtgacatggtcatgagagtgcagcctcatgaatgagattagtgcctttgtgtaaagctcaagggagcttgtttgtctcttctaccatgtgaagagatagcaagaagataggaacaggccctcaccagacattcaatctgctgatgccttgatcttggacttcccagcctctagaactgtaagcaacaaatgcctgttgtttacaagccacccactttatgatattttgttatagcagcccaaacagactaagagactggaaattcctgaaggcagaggcagaatcctgcctttctttgcatcctcctcacatcacaactcaatgtcctgcatatggtgaatactcaattattgtgttatttggttgaatggttgagtctttttctttccaggcccacattctaggcatgaatcatccatcattcctgtgtggcatatcctgtcatctacatcataggaagagatctaagattttgttgaaccaacactatgtaccctctccccactatattacaagagctatttgggccacaaaagaaataaattacatagccctttggcttaaggaacttcttttccatatctgagggataaaatataaacaactgaaataaattgtgatgaatcaaaatgccccaaaacacctacctagaaagcaaaggcctgaaccgaatcttc

SEQ ID NO: 115915 - DNA, 1016 bp, Homo sapiens
cttacttttgtaatcaaaataaactaaatattttttaaaaatactctttaaagtagagaaaatattaagaggcaattaggagattatctcagttggaagtgtttttctctaggcatagcatgtacaattgaaatggatcttgtggattctatcaccaatggataagtagacacacataatgctaacattgtatgtttgctgtgtgtcaaacactttactcagtatttcatttaatggttataatgattccagaggtaggcattattttcttccccatttatagatgaggaaactaaggcgcagatgtaggaagtacatggtcccatgctggtatatgaagagccaggttttggacctactaagtttaattctaaggagacacccttaatcattatattatagtctcttaccacatttgtatgtgtttgcatatgttcttagctaattctttaaaataattgtgcttatatctatacatatatttgtttagtgaagaatatgcataggctcttgaacaagttataaagtgaggacaagaatagaggtcagtagggcatctctctgagaactgtgataatatataccagaggtggctacacaactacctgattcggaatcctcatctctttttctttcctctgtacttttccataccaataaatagtctcccacccttggcacaggggagcactgggcttctgagtgcattcagaaaacaagcaacacttacacctgtttagcctcatgtttcctaacagctttagaagtacaatatggccctaggtctttgtttcagtacagtaggtggagggggcttcttgccagccagaaagcgttaaaagttcatggcagctgcctagaaaccactgcaatgtttcccataagagatgaataagctagtttagactcccatgtatttccaggaatgtaggagtgttcgatctattgttctttccattctattgtttcagagctctaattaaataatgccacatataagattccccaacgcccta

SEQ ID NO: 115916 - DNA, 1048 bp, Homo sapiens
gaaatttcttgagaagaaaggattgaccacaattatcatgagatatacttgtggtaataatctatcacatgtaggatgcatcctatgggctgcctcagattctcctggcttcacctgtcccctgggccagcagctgagaggaaggattctatgtagaacctcatggttccccctgtgttgtcttcagctcttccctcacttctgatctcataaaaggccacttcttatggtacagggtctgcttcccccagaggtctgctgccaaaaggggccaggtgaccaacccagaactacaagaggattaacttccatggggttcattttggtaaatgggaatgaggagacaagagggaatcggcaggctttctctccatttgtccctctgatgcattgttctgaggtatggttttccatacaagcttgtccagagacatcctgcacctatcaaacaactggctttgtcactttgtgccttattgtgacacagtggccaaagccatcactcacacatccttgcattggcttcttgtttccattctttacttcccttcctctctgatatggtcacactttgtgtccccacccaaatcttttcttgaattgtaatccccaggtattgagggagggacctggtgggaggtggttggatcataggagcagtttcccccatgctgttcttgtgatagggagtgagttctcataacagctgatggttttataaggggctcttctccctttgctcactctctctcctgttgccacgtaagacagccctgcttcctcttccaccatgattgtaagtttcctgaggcctccccagccacacagaactgtgagtcagttaaatctcttttgagtcaattaaacctcttttctttgtcaattacccagtctcaggcagttctttatagcagtgtgaaaaaagactaacacactcttactcttgctttcctgtgataatacttcctacaaagcactcaacttttgcttaggcttgtccctctccttcccccagggaatccctgttaaaatatatcctgaaatttcc

SEQ ID NO: 115917 - DNA, 1036 bp, Homo sapiens
attccttaaagtaaaaggttgagatcattgtcatcggcaccagcatcgccaatctgtgtgagatgtttatgcttttttagttcagttaatcccttggaaagtgtgaccaaatgctttttatactgtgcttccatctggttttaaaatgcctacatcttttgaaggaagacactccagcagtggggctataccaaaacctcaaccttgttcaaaggcatatcagtatcattctctaaagtttttgataaattatcatcatcaaaattgatttttaacaccatgtttacatggagctctgtgctatataatagtcaaattagcagggagttatatttctaaaaacttaagacttgagatagcactcactaggatggacattagagaaatatgcactaccagccaaaccatgtttagtcaaatataaacaaagcaagcatctacagaaaacattaatatcatgaacagggaaaagggtcatacatgatgtggtataaggagcagtggtggctattgcaagcttaaatggaacaacggttataacatacacaaaacacacaccacacacaccacacacacacacacaacacacactttcctggttttggcactacatggagatcttccttatgggtgggttaaaaggctgctcatgttttctacacctttgcccaccaggttggatctcaggaatgcatttctccctttttgttttaaagttcaatcagaaagaacctctttccaaccaatgagtatttaaagaactcctcccacgagcttgcaaatggtaccgggacagaggatgctgatttttgcaaagataatcatcataagccttcgagttagagaaacagagagctaccttatcccagagtgacagacaatattttgcagaagatattagaggaaagcaggatcttccatagaaatcaattcataaagacatcatcttcgaaacctgcatttgggcaaattataagccaaaaagtaaaatttaataatgaatacattgaagcaagcagcagacacctaaacatgg

SEQ ID NO: 115918 - DNA, 1051 bp, Homo sapiens
gctgtctgtcctgccctgctttagttgttatattattgatcactacctgacatgcatccagttgaaatttgttcatttgattgttgtcagcatttttattatgtgagcagggattttattttcttcttcttttttttttttttttgagacaggtctcactgtgtaccccaggctggagtgctgtggtgtaaccatagctcactgcaggcttgaactctttgcttcagcctcctgagtcattgggactacaggtggatgccaccatgcctgcataattcttaaactttttgtagagatgtgggtctcactgtgtggcccaggctggtcttgaactcctggcctcaagccatcctcctgccttggcctcccaaagtactgtgattacaagtgtgagccactgcacctggcctatgaacagggacttttgttcactacagtatccccagtgcctaagacaactctgagcatatagctggagctcactaaatattgaatggatgaatgaattcctggttctaatgccctgtatcctcagctggaacttgccccataaggctttaggtggtgatggggatgccaataaaaagaaactattgagatggtcaaggctttttagagaagaagtgaacgtaggagaagtattatttaaaaactaaaggaaaagaaaataagcagaaagtgatcctggatagcactcacccattcattcactgaaccgaagccaggccagatctgttctctgcagttgctgaaatctggttcttgtcacaaactgacctagacatctattttgatacacatattatatgtctcttggcatgcagagtactcatatcatttactagatttattgaaatgatggaaagtggtgtgaaatgcctcctgccatatgggaaaagaggtgaaaatgctgacatttggcttttagccaatttcacaaaagtttagagtttcagactttttttctcctcctgggtgtggtgactctgtcttatcaaacttctattctctgagtagccataaagacacgtctgtgcatctggtggtattt

SEQ ID NO: 115919 - DNA, 1014 bp, Homo sapiens
gtcaccaatattggtttgctgaagatagagtttaatagagaagagtagggaaggatgggtcattttggaaaagttggctgggagcctaaggagtgggtctttgtgcagcgttggcatctgtctgagatagcataggtttggtcaagtaattcctttggcatctctttctttagatctagtaccactggggaaagaaatatggaaaggagatccaggccatgctgtgaaatgaagttctcttcacttttttggctactaactgaaaactacatccaggtaccatttagctgtacttgcacagctgactcaggcctccaactcacacattcctgtccagtgcacagtttcccaacctatcattcccatttcaaggataagtgatctacatacttggctgaagttattttcaccaagcttacaaatagtgcccacccttttacccagaaaccacaatcaaaccaaagcaaaccagaaggatcgaaaggcaaacatactggtggaaaaagtagtgatgccctccttaaatagcctttttgaacctcttcagtttataaatagcaactaatttaactccataaaaataaactggctctgggtcagatcatttgggtctgtttgtgagaagatgaattatgtaacagatccagccaaatattgtagcctaaatattggccctattcgaactgttgagctgaatttttcagaacaaaattcataacattcctcccctcccagttctattactgcctcaaacatgccttttttttcctgtttcttaagcttcagatgggagcccccagagcgacctaaccctcgttgacatattcagtttcctgatttatgggaatcatgaaagattattgtactttgtctgaacgaaggtcctcactgtgaaaacctctcaaagaccacaaacgtggacacttacctgccgcagccaggcctcatggcctttgaaaggagccattcagcgtgcaggctacagcctgggcatacattgaattctgtgggctt

SEQ ID NO: 115920 - DNA, 1111 bp, Homo sapiens
atcatgatattccaagctgttgaactttcttcaaggggtggaagtttctacgttggcttacaaatgtgcattatttgccaaattgcctaggaatacaggcctttgtacaaaggaaaaacacattctttttagaatcattgagaataacaggcttgtatgtgtctggtgatattttcagtgatcattctgcagaaatttcgcaaataaatatatttcttgatttatagaacagataccacctagcaggcttggaaaaagaacaaatgctggtaaagcagatgatattttccagttgacttttatgataatcagggctctgttgctatggaaaaaatccatcagtatgctgagttgaaaacacttgggaagaaggctgatggttatttccaatcccatagagtgcaacactcacccattccacaaatacttactgaaagactactatgtgccacacggtgttctaggagcaagggatggcagtgaacaaagcagacacaaatctctactctcgagagtacattctggaaggacaagacaggcaataaaaaaacagctaaaatgtagactacgtcaaatggcaataaatgctatggaaaaaatgaaagcagagaaggcagatagggagagccaaggtggaagtgggaatggacagggaaggctttgctgagatgacgatattcaaatgaggacctgaaggaagggagggagtatgctatgaggctactggggatgatctttcaggaagaggtgcagcaagtgcagaggccctgtggcaggagcctggcatgcagagaaacagtataaagcccagtgtggctgtgctgtggtgaacaagcaggagagtaggaggaagaggtcagaggcagcaggacaccaggttgtacaggcctcataggacctgccatcatcggtttgtaggacttcttctctgcagctggcccttctcttagcacatatatccatagctcaccatcctagaggcttagctcctcttctgagccattgttgtcttctctggccaccaccattgctgaagccctcgctggcaaccagagcactcattatctcctaggtcttcctgtactgctacaatggttgatttatgtgtcag

SEQ ID NO: 115921 - DNA, 1004 bp, Homo sapiens
ctgagaatgtgtttttctttagacatccacatgaatccctgattcagttctttcaggtctttgctcagatattagtggggattccatggccacctttgtaactataaattgtagttacttgtgccctgccctcagaactctttattcctcttccccatgttatttttatacatatcacttcttcccaatgtgccacacattttacactgaagtaccatacataccacacatttattgtatgtttcccaacactgcaatctgagcatttttgtgtgtatcctctgtgcccagaacagcacttggttcaaactagacattgctaattttttttttcctgaatgaatggatgaagctcttttgtcaacagcctttctttgcttttccacttccattacgggtattcatctggtagttctatgagcaccaaaacttcaagagaatccagcacagagagtagtcatagagaatagttacacattttgtctttagttgcaagacacaattgtatgaagtctgatttcctttaggcatggctttctttcagcttctaccttatagactggtgatcatttaagcaatagcaggaaagaaaaacatctgaggtctcagtggtctgaaagaattagaatattggattcaacagcgatctagtccatgatgagtaaaagcaacatttctgcatgcacaaggcatgactacccctattagaagtgagttagtaaaaagaaggtatcacaaaccctcgggaactcggtttcagaatgcttttgtagacttgactcatatagactttgaaaaacctcacaatgccctgtcattagcatgtagtgcctgtcttaagatatgtatgtgcctttcctccctagataagactatttataaataatactagaattgattaatatcaaaagacctgcccaaataatggaaaggaatgctacagagagaagccaaaagccatagacactacagctcacattcttttctgacagcattatgctttc

SEQ ID NO: 115922 - DNA, 1040 bp, Homo sapiens
cattcgattattagattttgaacattttattttcctgctagaccagcatgaacattcatggtcaaaagtaactgtataaatactgagatgcccataatgaccctagcaagaagtcttaagtggctagtttgttaagacccatagtgattttgtaatgaaactttctcttttcaaggtcctatagtatggtcaaggtaaataccctgagataattaactcattaacttatttccattttgtgcttaaaatatgaataatgtcaattttagagaaccacacttttatagttagagcttttgtttgaaataaagtagctttcatcttcagtgagttagactttcatgtgagttagaaatatgaaaattattatatttatagatttttttgacataacactctcaatcatttttatcagtttgggtataggggaaataaacatcctaaaataaccctggacaaatattcttcagtaaatctcttttgaagcctgaactactgtgtggtttccaggtcctggcagagtcctttttcctctggagactgctcttgctttgcctctctgcctggcaaactcctggtgatctcccagaactcagagtatgtcttatattctcaggatagatttctcacccctacccctttccttaggtttgatcttgttcttagacattctcacaacaccctgcacttgatgacactgattacaattgtaatcaaagctgaggacagggaccatggctgctttcgcccaccactgaatcctcagtgcctagaccagagccttgccgaagtttaaatgatttaacttcaatgattgagttgaatgattaagtgatcaattgacagctgaatgaatgaatgcatagataacaacatgtaagagatgattataagaaatgtcagggtttaaaccagctctcattgaaaacatgtctatctaatttgctgcacataaacattataacaaacattattttgtttccttttttaacgtgtatggtctataatgtctaacttttagtttgtaattctgacatagt

SEQ ID NO: 115923 - DNA, 1142 bp, Homo sapiens
ttcctagacttcaagcatccaccctgacagtgctggttctgctctgagccttcttttcctcactcgcatgaagatgcctgtctggttgacagcatgtctgggcaaatacttcttatccattaactaagcattaacagacttgccccgtgtggtcctcagactggggtactgattactctgatgagagatgtatggctgccaacaacaggggtctggaaaaagaggccacattgtttattttatgcccaggtccagagtggtccagagcgcctgtacaaggcacagtacagttctataaagtcagtgtcatctcctttagttaagatggggtggaggcagctcacaggtgaaattcctccctttggcatcctctggagaaagcccatgctctctctgacactcactggaatgtgggccccagggcagagatggatttttctgctccagcctccactctgagcactcatgctaaagctgctggtggcaggctgaggctgtttcatggattacttggaatgttgcataaggaaaatcttcagagatgagctggaattctgaggtatcagtgtgatctcagttttgtgcaaacattgtcctccccatagtttctaaactatccatcctccctctccaagtctcttcgtgatggctctgctgctgctgccaccctagtgtctcaatggattgagtggctgtgtggcatttgcccaactctgttctgctggctattgaccatcaccatggggtgagcttgaggaggagccccaggcttctgtggccacattgtgacagccctatgctgggtttacagaaaccaggcagggacagatgaaggagcccactgagtgaggacccagagctcaggactatgtggctgtggctgctgcttcctcagaactcagaattctgtggggtttcagctctggcaatgatgtcagcaagagggtgggcccagcaaccacgacaggatgttaagcagaaacatactaaagtctttccatggtatgacttactaagtgggaaaaatggtgggaaacatgtacagtgtgtgctttatatctgaataaacatgctgtcactaaccgatcaaaaggaaatttattttcctcacagaacaattttgtatttgaaaggaacatcac

SEQ ID NO: 115924 - DNA, 1007 bp, Homo sapiens
ctttgacagctgcaaaccaaccacagatccttgctctaagaaaaaaaaattctccaatggcaggtccattggtaaaagtgggtgacaaaggaaattctaatgtgcagcaggcgagtgtgaatgtgtatgtgtgtatgaatgtgtgtgtgtgtgtgtgtgagagagagagagagagagtgcaaatctcacaggcatcacttgacagagtctgtgtttgtgtaactcattagttgcttatggagtcattagggctggggaaccagttctacctcattgtagaactgtgtacctgccacaaattgccttcacccagcgtactttctcttcatatacttgtcctcttgggttgaaacccaggctttgtactggctaaaaaagacatggagggagcccaggacatagattagatggtcttgtccaaatctggcactgccaggagaggcagcggaaatgacaaatggcataaatcatgaatggagtcaggttttctggaggtaaatcctgaaactgctgctttccagccatgtgaccttggacaagctacttaatatttgtgaacctcattctctttatttgtaaaatgcgaatggcaatactagtacccacctcatggggttgatgtgagggctgaatttgttagcacaagtcttgttcacagtaggctccatataagcacttgctatttgttatttatggcacaatggggatggccttttattctaaccatttccagagttactaccctgatctgagccattgctatctctcacctgggttattacacagaatttcctaactgatctcccttctccctaccctactgaagccagagcatgtcacttctctgttcggaatcatctgctgactccccaagtcactcagagtgaaaaaacaaagtcagtatattggcctaaaaatccaatccagcaacctgcaaccttctgtctctgacgccgtctcctgatcccccttcccttcctcaatctacctgccccactggccccctt

SEQ ID NO: 115925 - DNA, 1027 bp, Homo sapiens
tcattaatatatgaggagcttttataaatcagaaaaatatatatatatatcctaatagaaaaatgatcctagaacggggacaggcatttcacaaaagaagaaaatcaaaaggtcaatgaacataaaaaaaaaatgctcttgtagtaacaaagagcatgtgaaatattgataatgtattagttttggagaacacattggcaaaaattataaaaattgcaataaccaataatggcaagggaatgaggaaatcaatgcttttatgccctattaagtggtatcttaatgggtacgggctttctcaagagcaattttgccatacatgtgaaagactttaacatctgtattctctttgaatcagaaattgtgattttaaattatggtaaaaagtgagcaactatgcaaaatgaattcatcacctatattctttatagcttcattaaaatgtggaaaaattacaagtagtctaatatctcacagtagaagattggttaaaaaattttgatatagctataggatgagatacatgcaggctttataaattctaatgagatggaaaatgttcacaacatgcagttaaatgagaacagcaagtatcaagaccatctgcatatctgggcctgtaagtgtgtgtgtatatgtgtatgtgtatctgaaatgatgactgaaaatgttcacagtggtcctcattggaggtaggattatgggtgattccctcctccatttaacacttttaaaattttcatagtgagtatgtattacttttataatttggaaagaaaaaaaaagtcaatgtatatattttaaaatgatctccagaataaagtcaaatcctctaaatgtggcaaatacagaccctttataatctgtttctgtctacctttcaattttcacctcccttgagtacccactaccagctcaatgtttctatagcaacaatgaatttcttggccttttctgaactggatcctgtgttttcataaatctatgtctttacacatgttgttccttctggcctggatctctagag

SEQ ID NO: 115926 - DNA, 1037 bp, Homo sapiens
agctcgtgggggcagacgtcccccttgctgttctcatgataatgagttcttgccgaccatgtgaggatgtgcttgcttctccttcaccttctgccacaattgtaagtttctccctagaagcagaagcctatacagcccacagaaccatgagccaattaaacctcttttctttataaattacccagtctcaggtatctctttatagcaacatgagaatagatgaatacaccaggtaagatttgtcctctgctgcacatctatagccactgttcctgattgctggcaatggtctagcagttagaacagacccttgggcctaggagaactttgttattcattgctgttctatcaaactgggccatttgctgttgtggtcccaggtcagagaagtgccagcagtgcctttgcttaagcctttgagaatgttctgccatccctcttctgcattttgaagaaacagcttcaaggcacctatttttaaaaggacagataaattgttatataatggagaacacttttcagaccattcaagtcttggggcctgttttggctgagacatgagacaaaactgtcctctttgtgggaactagttctcttgtccctcttgccttttaaagtcattaacagcacgctaagcaatttggaatgtccaaccactgactcagctaggtttcattgctttgtttactttgctttacatcttcagcctcttcatattggcattatgtaaaaggcttcttcctaaaaatatagacatttcagttggatttgagcaacccagaaaaagttgttttcttaatttgggaaagatccatttgtcagtgtttttgcctatctgtagatgtacatgttactatacattgggtgatacacacacacagttcattggagttggggttcatcattccacaagcatagattgagtttagaaactacaggaagccttggaaagtattcaccacttttaaggttttgataccttggttcagttcctaagtgttgggaagtttcaaagggtaggacaaactgggtggggg

SEQ ID NO: 115927 - DNA, 1030 bp, Homo sapiens
aataaagagaaagaaatttctcaccaataataaaaatattattattttaatgcacccataaaagctgcattattgatcactgttttctagtgagtattttacatttcattaatatttacagtggcattaatcatggtctggatgtgagatttgagtgacagcactttcattgaggttcccactcatttttaagtttgcagtctgttgctcatctcagatgtctccaaaatgtctaaatcaatgtgatctactggacaaaaaatgtgagttgggaacttgagagttttgagtttctattggtgtcactagtgacttccaatggaaccttaaaattcttgcctttcattatctataactttgaaataggactaatacttgttttctaaataatggatttgatctataccttccctcctagcacaagtattgtggtcatctaatatgtttaggacatttttttccctttatttcatcagaggcagtgttgtgctagagaaagcacagagagttgggggttggattttaaatctagagtcatttactagtttgtgacatggatcaaaacacataacctttttgagtttcaattttctcatctgtaaaatagggataacaatgatcttccagaaaggagatgagaattaagtgaaataatctaagtaagatgcccagcatattaggcattcaggaaagtttttctcccttattatattatgtaaaatgttataattaacagtttctgaaggcttggagaaaaaaaagtcctccctttttatggagatttttcaagaatcttttcaagaaggattactgtttccttggtttatgcatagtgaataatttttttccttttttcttgtatttcttctatttgcccttttattcacttttcaccagagatatgcaggattgcccattaagttttaggaatatttttaaaaaactgatgcgaggggataggtggaggtggggtatctcttgatgctgtaataacaatagggaatttagctcttttatgaaataaatgtga

SEQ ID NO: 115928 - DNA, 1056 bp, Homo sapiens
agttaccagttaggcactccctaacgtagaaggtgactgcagcctctggagactagggcaaggagagggtgagttcaaaataaaatgccagcgtggctaaaggatgttttagctaaggaactgttggttttggggaacagaaaccctttcaaggaagctcaagtcaatagggagtttataaggatgcaaagagatcccatagaaacacacaggaaagatagcaaagtcttctggtaactggaaagtctctggaaaagtccatctcttgtccattttcccacatgctcacttcatctttctttacccgaagactttcttcttgactctaactacaggaggttttcatagccccctgtgaatagccattctagtcccagggtcttcatgatcttctatctcccctcccgagaggtaactgacccaatttctgggtcttaattccatgtccctgggagactaaatctgactggccttgctcggatcaagcatctacctttggtctgatattgtgccccagattaaggacaggagctgggaaaatttagagtggggaggataaatttctgaggtgtctgtgggtttgaaatctctttaaagagacacggatgggaagaaaatttcaagtatagctagaaagatgcaaggccagtacgcactctggaccaacttcagtatgaatcaaagtcatgcctgcattccaacccaatatggccaaactttcattaaccccagctggcccaggagtctacttttcaggtaagtttctgtattgagtgatgaaccactgagaacagactgaaaaggacaaagtctttggaatgactctatcagtagtctattgtcaaatggtcaccacatcaagggcctttgccttcaaagaaggcaatttattcttctgcataattcatagatcttccacttggaaatgttctgaattacagtttcttattcaaattaggtttaagaaaacagtttttatttctgagacacttgcctctcaaagcatatttcttgaggtttagcaactattctcttagtttttcagggactggtaac

SEQ ID NO: 115929 - DNA, 1042 bp, Homo sapiens
acctaaaagattaaaattcctaaacaattagttttgttaaatggggaataaatcattgattatcttccacctgggttgacatgatttcaagtgtttaaagtatttctgaacatgatgcatgctcacaagtgattttcattgccatctcgtcttggttggttttcagaagttgaacttggaacattcctctttccatctgatccactcttctttcttgtgttcccccccccccgcccgccaacgcctccttctaatgaaacatctgaacagactgtggaccagttaagtctttgggggaaataaactcttaaccattaagaggagggttgggtgcgaatcatctggcaggatggaagggcacagactttgaggctggacttgggaatcttggcactgccacttgctggcttgtgatcttgagtaagttgcctttttggcgtgttagtctctttatctgaaaaacaggcataatttcatgagtttgtttgataaggctgccataacagaatactacagactgcgtagcttaaacaacaggaatttattctttcatggttttgggggctagaagtccaaggccaaaatgttggtggggttgtttgcttctgtggtttctctccctgacttgtagatggctgtcttctctgcgtcttcacatggttttctctttgtgtttctgcatgctaatctcctcctctcataaagacatcagttatgttggattaggcccagtgtaataacctaattttaaataagtacttctttaaagaccctatatccaaatgtagtcacattctgaggtactgaaggttagagcttcaatgtattaatttgttggggggtgggggagacacacttcagcccatagcactcatctttcctaaaggggtgctctgaaatactgcagataaagtgcctggtacataataaagatgttaaaatattagctctccttccttttctcaattttcattccttgtccctggcatagaagggaatgtatttcctttaccttcaatgtaattgttcctcctttcctttg

SEQ ID NO: 115930 - DNA, 1022 bp, Homo sapiens
agtctagcagtttctatgaaatgtctttgtccccaactggcagaatctagaaaaacctcgtggggttggaatgacccaatttgctgactccaaagccaggctttggtcatcatgcaggcaattctgtcttcatgcggttgcatgcaggtgaggctggagcagacagcatgttctggaacaccttaatgatgtcaggacgcttttcattgctcatctatcacgtaacagctcagatttgcaatgtgctacctgcgttctccctttagcacagacaatgcgttctttcaacagtgtgcggctccatgggaaaggctctgctgaaagtgaagtggtggggtccacagctgcccctctgggaaggagtggtatgggggcaggtggggaccagatgcctggccacagccgagctggggatgagcacatggaacaaccgcttctggttacacttactcgtttctctgtgctgaaaggtgtcatataaatgctaagaacagagagagatggggcctatttatttgcattttgtctaatgtgagcagatgcagatagaaaagaggcttagccacagccgttcacctgccccgctaggccttccatcttcagttcatttcaatgcctcccgcgtcagttccgctccagtgctgcagcagacatggcatggggtgcaaaaggggcacatgccctctgtcttcagtgggtttgcaaaacttgtgaaagagacaggtttaaccacaggaaccatctgaggacaatacaacccagcatatggctcagtggtaagtcatggggaacaattgaaatgctggaggaggttgtggaagagaggaccacgcgtggatgggcaggaaggcttcttaggggaaatgaactggacttgccctgtgaagctggccagcaggtaggtgggcaaagatggtgagcatcgattgtctacgccctttgccagaccctcacatctgctattctactgacatactcccctcctctctttcagtggttgggtctcccttatcaattaggac

SEQ ID NO: 115931 - DNA, 1733 bp, Homo sapiens
ttatatcacaccttcttcttttgtcttcatcctttcccccacttcctgtgctttccttttgtctcctctcattcttaggcaatgggtttaaggtcaaagacacaggcctgggctcagattcttgccctatcactgaccagctgtgcagttataggtgaggttctcaagatctcttggcttctgccttcttattcctagaaatcagaaaatataagtctctttaaaatgcatctgttttgagatctaaatgaaagcctgaaaagccttttatcacagtgaaaagtgctcaataaatgtcagccatgctcatttaaatggcctaactctggtagtgacatttggggccaaaggatagctcttgatggctgggtctgaaagcccgtttcaggatgaggtagtgtcagctctgttaaggtaacaggattgggcctgagctgttagaaacttggcctcaataagactctagctgaggtatcttttctttctcaagaatctcaagggcttaggccagcacagcctgtgcactcatgcttttaaaaaaaccaaaaacccaaaaccaaacagaaaaatgcagcaacaatagctgcttgggcccacatgtcactctattatctcccaccgttggcctgtgccagtacaatcaattgttccacggtcccatttggtaacttggaaactgtttgcgctgaggatctatgataagcactttggctggaactaacgtccctttggaggtgaggagggagaaaaggaaagcaagatgacctggctggggacaggcaattctctaaatgctggcctaaagggactgagttcttgaaagcaggtgactagaaagagaatattgttctacttccttcttttttctttattctctgggctcacatttctaagatctttaattttcaaaacttaaacaagaaagtgtattaatcttaaatgtctcccattaatcatcaagtccagcccagcgacgagagatagatgactcacttccacaggtgatttcttggtaatggtgggtcaaggtttgcccctccatttcccctactgtctcactaatggagaaagcgtccccttaggaagtacctgtcttggagcaatttgtcaagggaaaattgcaggtgggaatagccactgacaagaaaatatttctcttagggaaacaaggtgagtagcatagcatggtgattataagcataggccctacctttgagagttgttgtaggattaaattacagaattaaataaagcacataattcagtgtgtgacatagtaagtaggtctgcgataaatagtgaatatttactacacccctttacatgccagacactgtactgaggacttttgccatcatttgagccacatcatatttcattgactgagctattatttccctctggtttacagacggggaaaccaagatgctacgtgacttgctcaagatcacacaggtagtaagagacagaaccaggatttgtacccatgtaatctgactctgaagtgcatgttccaatcactacacatgctgctctcggtgaacagtgactcttactatgaaacaggaggcaaaatgagcttgctgccatgaggatagagcccaggatgttgtcctgtgtgttgtagagtgatgtatcctcttctacctcaacgaccactaggttcctgtaggcaaattaggagtgattgagccatgaggaataaatccagccactccactgcttttgctgac

SEQ ID NO: 115932 - DNA, 1096 bp, Homo sapiens
ccctccggcgtggatcctttgttggtggctgctgcctgccctgtgctctcgggtcttggtctggagggtgagccctgccctttcttatgtgtctccagtgaagccttctgctcatgctgaaaacagcaaaggtggctggctcagcctatcccttcactctcaatgtctggacaattaatatgtcatttcctaatcagtgtatgttgatgcgttatttattctagcatgatgattgtggccaaagatcacctctggcattggctctctattgttttgtacatattatttctcagcacaggcttgagaacaatgggctcattgattccacctgactcttgggaaggatggactttgccagactaaggctctctgaatgccagcctggaagttcatgaatccccttttaggagtaagctgagcctttgcggttgggagtggtgaggaagggaatgtgcctctattttccttgctatttattgctctgcattaaaaaaaaaatctctttgcttctctgaccagaaagatggtgtttcattgaggtagagcccatagtaattaggccagcaatcagcttgtccacaccaaagtgcatcacttgcattctctgtgcacactctctctgcctgctccaccccgccacatccctcctctgcctccctgtttacgcgtttggttcagaatgcagaaacaatgaaggtgtttagggatcctagcctcacggggtagcaattggtacagagaggctgtgacacagagtgacctggaattccaagtggaagattgaggtacgaggacagctgagattgtgctgtggtcctttcttagctgtattcttgtcctgtgagggtccagtggtccagtctttaactgaactgttgtcctgggatgtgaagattactattgggtggcattgaaaggccccttatagagggtctttgatatttcttggccactgccagacttgaaacgttagttttggggatgtgtctccttagcagtcactaccgaggggatacaatcaacccagtgctctcttttggtggccagatggcaacaaaactggtgtatcagatatgtaatcctcctctccctcagc

SEQ ID NO: 115933 - DNA, 1021 bp, Homo sapiens
agaccagagcagggcttagcccactcatagcttcaggccaggtggtccccaacatgctgagtggaggcgggagaggttgggcgcctggcaggtgacagtgcttcctcacgcctcacaactgctaagacaaaaggaaggcactctgggtggggacagtagctgctgccaacccagaagtagttcagtggtataagggaagtggcctcctgccatcagggccttggatggcaccgtgctgtccaagtccaagccatttcacaaaatggccaagtttgagaaagagcaggttcctgtgagtgtaaaagtggatccagatgaacattctcttccaaagtcttcgtggagcttccccagtgggaatttggtgtcttctccctgtgtcactgcagacacgtttccctaagtttagtcttgtcacacgatagtgcctgcttttaaagttgcccatatgtgaaccgcacgctcactctctccctcctcatggtgttaaaatgtgggcgtgtgaaacactcctccccggttgaaatccttgtcgtgttagaactatgtgtccattctgtcccccgagggaaatggaggtctctggattttggctaaagccccaaagcagaatgcggtgggcagtaagtgtctgcatattataaagaaatcagcccctccagagggaggccaaacaggccctttgcccttcaccctgcccactatcccatgaagtccacattagcaggagacacagactcatagcaaggggaatcactgactggtgagctgagggcttttggggacggggctgtggcatttgccctccccttcccatgttgcccccttcaggcaggtgaaggagggctgaggagaaccctcatcagaactgccctcgggtgtggcccctgccgtgccctcttcctgggagagaggccctctctggaattcttcagcacactcctccccatgaagcaggagccagagcctgtgggattaaggggacgtgtcctcctggagaccatgcctccgcctccccatc

SEQ ID NO: 115934 - DNA, 2810 bp, Homo sapiens
agtaaagagaaatgcctgtaaaagttttaggccttgattcatggcagaattgggaggcaggttcccatcgtgccacccatccctggcagtaaagctacccaggctaatcttttgactgtttgtaccctctaggtttccttgaaagataaacaattctatcatccttttcctcagtcagccccctccagcactattggcacttctgcagttagaaataagctgctttgcatcacaaatgggccagatcttcagagctgggccagcagctcctttttcttgtgtgggaaagatcagagtaaggaaaaaagcccagagcccagaaacatcaagctggaaccgttgaaaggttttcttcctgccagactttgtccagacaggcggataatgcaacatccttgggaatttgtcctggaatggtctgagtcttgtgggagaggaatgaggtgcttgtccaggactgtgctcttttatccacagctgattgctgtcactttggtgccttggcctgtcctcatgcacccggttccctcctgtatcccaggaatgcaggacagggtgaacacacagtgctaggggaggcccagctgtaggcctctctgctcactcaaggagcacagcctgggtgtgtccacgcatgtgggactggtctttgggaccaaccacttagatcatccaattttagggtggcattaacagggtatctggaaagaggctgagattgcccacagcatgcctgtgagagtgagggcagaggaggtgggaccaggatggcattcactgcaccaatctcctgctgcacgagtgtgatagagaaaaatgaacagacagcctgttgggctttgagcaggctggccaagagggaatggacatattttagctgaagggtacactgtctttccctgtagacagggcaagagaatagagaagcaatgttaggtggcaattgtaataataattacatggtcttcatgatacatgtcttcaactcattttcatatgcaccttgctggagcctgcagataaataccacacagcaaagtactcttatctcttatcctcatatcacaagaattcagagtgtcatgtgacttgtctaaaatttatattgctagtaaattgcagagctgagtcctgtcttggcccataccttgaagtgtcctgcttaagtgtcatgatattgcacactctggagtttcagccagctgctttggtgaaacccacattggatgtcatcaatggagtcatacaaatgggtaaaataaataggcaacttagtgaatttgaattcagtgtgggttgggatggtcattgcaggagggtactagaggggcagaagtgggagtggcaggtgttcttctcagtggcatttgccaggtatagattagggccacaatgtgtccactgtggtcagtcggcaatcctcaggaatggggtccagctaggatgggaagagctgccatggtctaggggaggaagcctgaattttcaaaggctagggctagggtttcaatgagaaactgaaaagatgatgggaaaccaaggcccacatgagaagacggtgaaaaatctaagccctcctcatgggggcagagtgtgaacattaggatcagatgcttttgtggcatctaggggctgagtctgtcttatttcccagtagaccctcttctctagtagctatgacagattgtactttccaaagatggctgcagtaatatctcccatctcacatgcttattttacactgtaactttaacactcctctcatggagaggtggaatctatgttccttccctttgcatcttgacatgtttgtgactgtggaagaagtcatgctatatgtcttctaagactgggtcaaaaatggtaccatggtttctaccttactcactggaatgttcatgccaaagccctgagatgccatgtatgcagctcgacttctctgagattgccatgctgggaggaagcccaactagtccatatggaacagccacatggagaagccctgagactgcatgaagagagatatctggccagtccccagtttgtcagcttccccactgtttcagctcccaccaccaactgacttcaactgcatgacagacccccaagccacagccacccagtagcttcccaaattcctgatccaaacaaaatatgaaagataataaaatgattgctgtggtttgaagccactatcactaggctggtagttaccaagatttgttattcatcaataactggaaccatgcagaacccagttcttatggcccacttggtgctgggatcactgggaacaggtatgaacacctgggctgcattgggatgaataaacccaaggtcagaccctagtgcttgcttatgtttggagaaagccccatccagcagggcatcttgtgagtatgtaaaaattcaagaaggtccagttggctaacattgagaaggttccaaatgagagtgcaaggtatcccaacaggaggtggaatgtattagtattcagatatccaggctcattcagcccatgcatcaggctggtatgcagggacagagaccaggtgtgatagtgattctcatgaggtgtggttaagtattaagtgaggcaaatctgagcacgcagcctagttctagcacatagaagcttctcaacaaatactgagctattctgattatattattttagactttttcttcttcaagaggttgttgttgccattattgttactatttggcctaccagtgtaggcagagccatggttctagagagtcgacattaataaaccataaacaaagaccacagtgttcctattcaaagc

SEQ ID NO: 115935 - DNA, 7038 bp, Homo sapiens
ttctttgacactttgaactgagggagttggtggaaatttagaagcccggcacacactgctgttggatatcttagagtcttttttcttgcttatgtagcttcaatatgagggctacatccactaggatgtagagcatgattctagaccccgacaacttcctgctcgttgctttcagttcacagatgcaatagaaaatgtgagtggggtggggttagtgggagaggatgcggtggagaacaggtgattggtgttttactctggtaccttagaaataagcacttgcacaatagaacttactgttcagcactgacctaggcctttgagacagggcagacaggggaaggaccagaggccatctcactttctttgccatgtgtgggtttccctgcttcaggagaacacctgtagcttggccactcactgtttctctgaatccaccttctgctgtcttggagttggtgaaaatgtttctccacattttggcaatttgtattcacgctaattttgaatttcattctttaaaacatgtagtggggaatgtatgtatatttactgggaaattgagagaggttgagtcatggactgctagccaggtgtcattgtaaactggaagttcttcacactgatatttttttgtttgacagtttactcccagacactgagctttgtctggatgtgcattagtggcaccatcagcatctgatcatttcttgacacctcattcacccacttatccattgccaggtctttttgccatgggtcttgtgtccgtggtcttctttccatccccaccacttccaccgtggctcaggccttcactgtttgccatggtgtcatgtggttgctggctgcctggactggcaatcaccagccttgcctccttttccatgcttcgtattactgttaaacacactctttttactgccgtgggacagtatcatgggttcctaaaactgctcagtggctcctctttgtgattctaataagttccaggttaacatagacattctaggtacctcatgacctgtacccaacctacgttaccagtcctaacacctttactctattcctgtaccctttgctcttactcaactggcttatcctccattcacaagcatgttctacatttccctgccaccacccttctacttacgtcattccttctactgtgctgggatctgcttctcttttatttctctttgcagtaatcttaatcatcttctagaaccccattaaatgcaatcttttccgtgaggcctgaatgcaatatcttctttctctgagctctgaaactggatcatctattgaatacattctgctttgtgttggagtttgtgtgtgtgtgtgtgtgtgtgtgtgtgtgtgtgtactacctgctacctccccttctagattgtaagttttttgaagtcccccatcacattttacattggttaagctattctattttgctaagccctaatttcctgattaaactgagtgcaatagtagtgcttaacttctaagtttgcagcattgttaaatggaataaatcatctagagtgctgagcagagagcttgacatacaacaggtcctcaacatttattggtggaacaaataaatgaatgagtcttctcgttttctcttgaatcctatattattgcaaatgcaaaatgttttcctatcctaaactttgctaaatttgcagggccctcagtactagttgcattccacatttttcttgagcattgccagaaagtttaggggcaagaagggaatgatcaaatgtaactaccattagtgaaaaccacaggcactgaacagctggataatgtgaacagacaagttcagctgaatctccagaaatgcatcaatcataggatgatggcagcttttggggagagttaagagatgcttgaaaaggagccagagtgtggaagaaaaaagatgtttagagttgggttttcaaaaccaaagtcttcatcatggccaacaaactatgggaaggtggcaaatgtgtgtaaaaagaccttttcattttcttgagttctttagaaaattggagagttttgtttggtttatttatttatttatttttgagcagcttaataatagaaattgcctcagggatggcgtctgccattgcttttcaaatgcaatactgttctccctccggggattgtgctgcagaggctcctggagtgaatattgcaaaagccactaataatactccttctcaggtaacattttctggtataaaatatcttggcttaatatagtctaaaaacattgaagtgtaatgtggccaacacgataactttctgaaatacaatactattgtccttacttctgtcttggtttctgtggtgtcagaggcccaaaatgaatcaagatgacaaatccttagctaaggcaatgtagaagccaccatggtactgtacaggaattatagtctcttatttttcccgggagagaaagcatggagtaatgtaaagaacactggatgagtgtcaggattcagcttcaggaggggaaagccaatagacttgggcccagcacttaaccactgtgcgccttatctcttaattggaaggaattgggctacagggtcttaggggtccttctaaataagaagttttcaattctaaggtttcttctgtctggagaggagcatatcatgatggattggtctctggaatcaacaggcttggttttgaactaagagatcttcgaccagttgcttacccacccgtggcctcatttttcttatataaaagatggggatagtgatattacttgtatcagtttggatatgcagctgctgttgatttgttgattcagctgctccacaggaacccacgctctttttgatgacttcaccatctttaatttcatcttcatgtttgttgcctcatcttataaaaaggcaccagcctctccaggtattaagtcttcattcccatcagaaagcagggggtgggagtgggaggtgatagcaggattttttttcaagtatatgcatggggaaagggtctatgttctagggctgcttcttccttttctctgaaaaggaacaacttttcccaaactcccacatgacttcccattgtattttattggccagaacaggaccacaagactcctcacctgtgggaagttggaaaagtctttttcagcttctgtgatagtggttaagggagaatgggttggaagtcctttgaagtcagccaacaaacaggtttgccagtccgccccaggtgacgtcagaatgtcatgaggtacgtgtagtggttaatgctggttgagtgcttaactcccgggtcacggcctgacccagagccagcactggataactgttagttacccttctctaacagtctattcttccctttgcacctgattcaacctcactgcagtaattttcaactttatcatatgagaatccagaatccttgatatttggcactagaagccccttgacttctttctcttctagtaatgcactgctttcctgtgcactgctcatgatagctttagtgtcttgtccaggagtgtgcatgtcttaaactcacaaaaggaaagctgggtcacacagcaagggaggctgagattgtcctgtacaaggtgttttgcctgaacaaagccacgggccattccttatgcatggggtaccatgcttttcacgatgaccctgttctattctgaccttagcagtctggaccagaggatggtgcctgactcaaaaggcagccagtgagaggctgcagtgagatttctgtccaataagagaggtccatagagagtagtaattaatggaactaatcagtctctctgtcttagtgtcactaagtgtcattcaaatatgccagattttagagatgtgcataagctaagaggcacgtagagaggagacaagcaagtagatggcacaagaaacggaagctgtgagaaggcagaagccatgagatggatgcatttgttgaagaggccttagcatctgaacagagaatggctgacttgccattatgggaggaacagcacatgctgttgagggacaagatcagatctctggagctgctgctttgcctagggtgttgctatggccatcctgtatcctggagcatgccccagttctcccctggctgggctgccatctttcttgctcctccgggccccctctatgaaccccttattctgaaggaatgtgcaaagatctctgatcttggtaactatggagccccatttacaaaggaattcaaataatttaggcacaactgagttgtcctgttactaattagagtaagagagggtggctgatgtgcagacttcttccacctggctgcccctcatggagcagccaccctcatggtaggagaaacctactcagcaaagatgagctgcgattctattctgtgcaggcccagggcccaccagctgggcaccagggccctggccccccatttgctggccagagagtctcttcagaggggaattcaggggaggctgccttgccaccagacaatggctccgtttacataatcctcactaggctgtggctggtgtaattcagttatttgattgattttatattgtgtgatgctggaagaagtgaggaaacaacaggtttttggctgtaccctctggcctgttctgatctgtcttgttggcttcaaggatttcacgaagctttgtgctgctgccaactgtctccctgggtgttgttcacaggcagcatcctgcttcccatgtgcatatctccacagaatccgtaggaagtgggacctaacccttaagttgccggctcgtgggtggggcatgcgggcagcagaggtttgcgtggagtcttcagtggccccacatgttgcagagtttctcaaatgtttagtgctcaagctccatcttgtccctttatccccaggagaaatggctgtgtattggtttgattggaatgatctccctatgtctggcagctctaacacaagttaacacagctttaaaaaccagttttcttgatgtcttgacacagcagatttcctagtatggaattgttaagccacatttcaacttcatttccaggcatgtgtcttcctgtttgtttgtttgtttgtttgttttttgagacggagtcttgctctatctccatggaggctggagtgcagtggtgccatttcggctcactgcaacctccgtctcccgggttcaagtgattctcctgcctcagcctcccgagtagctgggactaccggattatcggcacgcgccaccgtgcctggctaatttttgtagtttcagtagagacgaggtttcaccatgttggccagaatggtcttgatttcttgatctcatgatccgctcacttcagcctcccaaagtgttgggattacaggcgtgagccacagtgcccggccctgtttgttaacttgaaggttctgccatttcttatagagcctccatctctggcatttattgttgatacgttgtttcttttactttttgtatgtttattttttattcaagtgagactcatgttgacacattttgtttttctcttttctttcagctttaaccaaacttgagtaagaactccctgacttggaaacactcaagtttcccacacatgactggatggccctggccacactgggaacggaatgggggcctcccattggaactcagggtggagggggaagctcgaccagctattgtggcccccacttccattgacaaagtaagtgttgcagacgtgggtgggtgggatacagggtgtgggggctggttagtgcctggcatctggaattaaaacctaaacacatttccctttagaaacaatattattcacgagggccaaaagcccactaacccccccaagagctgaacgctacggtgtaagttctattagtgatttttaattctggctgtgcattaaaatcacctggatgtgctttaaaaccctgcatgtgttcctccagcagaggttctgattaaactaatctaagcaagaacccaggcatgcgtactttttaagtttcccttggccatgcgcggcggctcatgtctgtaatcctagcgctttgacaggacgaggcaggtggatggcctgaggtcaggagttcgagaccggcctgggcaacatggtgaaaccctgtctctactaaaaatacaaaaattagcttggcacagtggcacacacctgtagtcccagctgcttgggaggctgaggcaggagaattgcttcaacccatgaggaagagattgcagtgagccgttatcatgccactacactccagcctgggtgacagagtgagactctgtctggaaaaaaacaaacaaaccaaaaacaaaaccagtttccctggaaatcctaatgtgcaggcagggttgagagccctgagattttatatctgggtcaggactaggctgaggccagagaggtgcctaggtacaaagtgtcaggaggtgctcgctcttggagccgtgcaagttggcccactttgcaggtcacattaggaacttcgtcagcatgggagtcagtgtcttggatggagatgggttttagttttaaacttacctattgtgaaaaaagtctttagggcacaacccatttataatttggtgatttctcccttcctttcttcctgcttcttttactgtcacactcttttaactcctctcattccaaacctctctgccttgtttttactctctcctcatttctagcactttcttctccccctgcctcctcctcctccttttcctccatcttcttttccttctctgttctctttcctctgagggcggctcttccctttctctcttcttgtgtactttggctatttttgttagccacattcccttctcattattccaggcccgttcatgtgtcctggatcgctttctgtttttctccctcccccagtccctccactccagcacgcccaccattgccccaccattggccagtctaggacaattctcccaaggctcctcccaagcccacactggctacatcagcctccaacagttgttcatggaccttgcttggcccttggtgacaccag

SEQ ID NO: 115936 - DNA, 2918 bp, Homo sapiens
aagaaacaaatttctgttttttataaattaccaagtctaaggtattttgttgtagtagcagaaatagactaagtctcattcatagacccggtgctttccagctgctcaaaattatttgctgtgcagtcctaactgggtccgcatttgatggcatctgtgggtcattacaaggtttctttccctctcaaaattctcctaacttctcttggaagccctgccctttctgtttataataaacaacttctcttttaaaaaaagatagccattatgatgattactatcaacactattataccaccaccattaccccctactctttgccaagccctgagaacacacaaaaatataaaaagactctctgccctgggagagtttctaatctgggtgcaggaatataaacactattgatcacaagtcaattcctgtcttacttctaggataaaatgcttatgcattccaataggaaatataagagcatgatgccttagcccatggtacttttgagaggccaatgaagagatattcagaaaaggcagggaccctgaaaaaatcatatcacatcaatgggtatctacaaaagcctacctttaaaatcttctctaccacctgtttccagctgatggccctgtgattgtccatagtaaaaccacacagggtgtatttgggggtggccttttttgttgtgggggtgattctgtgagtgttgctgtagctcaccctaaattactcatgtccatcctaaagcacagcggaagagatgtacatgactgtcagaccagagcttctgccaagcagaggcaggatgcaacaagacacttgaaagcagaaatcttcctgtttctgtaacatttccagctggaaaaccaatcagagccacacattccagctacacttgggaaacactgaaatatccaagtagtaatcacctaggtatgctgctaactgcagctcaaaataattctggggttgccagtgccatgtaccttgtaggcttccaattacctgtgctcacttctctcttttctccaaggaccaattattgggggaatttggcatttctcctcctctctgcttcagccattcaaagaaagattgttatacaccagaatgtctgaccattttaattaagccagtcaaaggtaggtgctgaaacagtttagcccccgaagcaaggattaaacacttaaggttgaggaacatagaggttagttagtgtcaaagagttggaagagaccctagagtaggatgaccatacatttcagtttaacctgaaagcccctgtctcggtgtaattattatcacttcttttctctcaaaagtgctcagttgggacaaaaatgatatagctactttgccttaaagattatctagtctgcctttcagtttggttcaaatttaatgtagaaattatctttctgtgaatgatggagacttgggagatgtaaaaaaataaaaaaaagcttttattttatttaaaccttaaataaacctatttatttttattaaaatctttctgttttctcttcctttcaaacacatggtcatctgtttgctattaaccaccagtaatgggggactcatactttgcaaggaatctctaattaatgagttctcagttctgcatcaaaatcttccttcctctggcttcaccctttgattctagttccttcttctgaaacaatctagagtaaatttcttctctcttccacaaaatattttccattttggtatatttgtggtgtctttttcaagaaaataatcatgtttacttcacttccttttttgaaattcgaaggaaactgatctgattttggactgagataccttattttattttttatttttttgagacaaggtctcgctgtgtcacccaggctggagggcagtggtgtgatcagagctctctgcagccttgccctcccggacttaagtgatcctcctacctcagcctcccgagtacctgggactacaggagcatgccaccatgcccagttgattttaaaaattttagttagcaaatagctcttgctatgttgcctgggctgggctggtcctgaactcctgagctcaagcaatcctcccaactcagcttcctaaagtgttgggattgcaggcatgagccatctcgcccaactggactgatatgtcttaaagacaaaagcaagaattttgctaagctctattatagaactcctaggtacatgcccaattgtttggagattgtaggtaagatcatgcaggagttaccaacaaaataacaatgccagcatcctgtagtgaaaacttctttatgacattgttttatgaatgcaggtgaatgacctagataatgtctctaaaactttacaggcaggacataagcataacatgaagaaacaaggctctctttaaagactattccaagctaatgatggaagcaagattcataggttttgtttaaaaagaaaatgtattttattattgtaaaaataacacaggatgattgttgaagatttactacacctcaaaaaaaagaaaaaaagaaaaagactaccatcagagataatattccatgtccagttgatttttaaaaattttttgatgtacgtcctttttttcttttctctatgtggatatacttgataaataatttaacaaaataagaatcatattgatatagagtttgctctacttttgtattaatattagataacaattattccactgcaccattaaataagccttaacatttgattttatggtttcaaaagactcaacaatatatattttgtacttttccaaacatctattgttagagattgaggttatttttaactactcctctaatgctgcaggctacatcctcaatccttgcctgcttcactgattatttccttaggatagactcctagaagagattctggttaaataattttatt

SEQ ID NO: 115937 - DNA, 1134 bp, Homo sapiens
attggcatccttcatgaagatggtaacatctctggtccatcaggagggaggtacattgtgctttcttcagtagacactcatatgtaggttattcttcagtttgtaactgcccacagcacctgttatgccaagttattcttaccttgcctgctggattttctggacaacccataacctttgctagaaagaagcctgcacgtgttctatttctggagcttcgctagtctgccagcagtactcaggtccccagggtacctacctatttcaagttgcttgaaggtgtgcttctgggcacctgggaagtgcgttggacccctagaatgtacctgccctggctgatacttaatatgaaagctgcctcgttactactgtccttatcagctcagtacccagggaggtgtccaggcctggacattgctcctcaaacaatagtttggtttcattccaggagcttttgttgttgccgtcttattggctgttatttggaaagcttagagatgaggctagtttaacaagtcaagagtcgctgtgaaatatctattttgctgccctgtaaaaacagaatacattctctgattttgactgtggtgaggagcttgatgctggattgatgctacaacaacttcaaagtactggctttcttgaaggtacaaagagttgaagctatcaccatttagcttttagataatctgcacattttgttcttccctgctgctcaattgccagagtttaataaggatgccttagaacacatgatctctccttgcagtttaaatcaatcacccattaattgacacacaaacctctctagaaagagctcatcttcttggtttctgggaatgtgacctggttctctgttcaggtatagggtcacctttgttctctctgtttgtttcccaagctttaggtaaaacttctaaccaggcatggtttgtcttcagctctatttaatttgtttcagaggcttctaatctactttagatctttccctttctccctccaaacttcaatttgagaatgaattcctactgcaataatattaagggtggggcctttaggaggtgattagatcatgaagactctgccctcatgaatgggattcgtgcccttatacaagggcttaagggaatctgt

SEQ ID NO: 115938 - DNA, 6839 bp, Homo sapiens
aaatggtttgtaaatttttttagcccttctcatatttattatggccaaatgtaaaattgttagtctctgggatggcctagaataaatatttatggttttccactcacataaaacaagagtagagttattccccatgtgtcttagacttatttggctctaaagagtgaaactccacctgcttcataactataactcctaacaagtttatatttctttatgtgcccatctttcctttcaatatattattctttcctaagtttctattttttctcagaaaattttgaaatccaatggaatttgcatttctgcttctttcttctagttgtatctttttaagaaaaccagcaaacaatggcttatgttaatgaggtgtcatgagaaatacaaaggaagcagagacaccagtctttgctcttctgctgtttatagtattgtatatcatggtatgcagtcacctggtgttctgcttttacaggagggtttattaagtatgaggcattgggcattcatatcatggttggccctgaaacctggaggtgttcctctgccactgctgaagagcaggtggttactgaaagagaacaaggtgaaggcccatttaaaatcgggcctcaaataaatgtgaatacctttggaattgtttgtttgtccaggcttctgatttcaagtgagttgtatttgtcaggtaacactatggcaatgggagcattaaattaagaggtaaattggacattctatccataggtgcctccctcttgacttggaggagacaggcaggtctgattttggcacatttgggaatatgggagcaaacacatgccagctccttcaggctgctaatcatagcttggatgtcgtttgcctcaggcagcaacaaggatttattaagcccccatgtggggcatggcattggattaagaactcagattctgttgaggctctggctttggaattcaatcttatacttttgcttgaggtaagaaagcattcacagtaacctcattcttctgcaatgctcagatgatgactaaagaaaaaatcattccagtgagccaacattaggtatcccatcctctggcacaaagaatcagggaagaggtatttaaatagagcaaaaccacatcagtttgaaattcaacgacctgaaaccagacagtcagagatggaatcacagaatgtgagaatcagaaggtaatttagtgatcacctaggccactggtttccaaactttagcatgcattgtgatcacctggtgggcttgtcaaaatagagactgctggaccctaatgcccaggaactataatttggtaggtctgggacctatccgagaattaagaacttaattgggttggatccaagaatttgcattgctaaccagttcccatataatagcgatgtcactggtttggctaccacatcttgagagccactgatttagatgactcctgtactttacaagtaaggaaactggaatggaaagttgaactgttcaaggtaacagtgcagaaaatgaaagggccaaggctaaatctagttcttttgagttcaggttcattgttcttatttctgttccaccattcatgacataaatttactgtgtctacaataacatatattttcttaggaataataggaaactccccaaatctttgcattcccacttggtattaatcgactttgggaagtcatgtaaccactctactgtttcagtttctgtaaagtgggaaaaatagtaatacttgtaataataggataacaatcctctctgatatgatggttgtgaggattgacatataatattatagatatataggtatatacatcaaatatttataaagttcttagaatagtgctttgcaaactgcaattattgttactaaatattagctatttctaattattttgaaaatattttatattaccaagatttcactctatctggtcaaactggttgatataagaatagtaaaggtgactaagagaaaaaaagtcagaatatggctaatcccaaaacagattatttaaaataattggattttagagtgagtgtgatcttctaaattatctactccagccctctcttcctatgcaggaaacagagaagtcacagagaaattaagtgatgtgtttaagcttttgtagctaattagccgtactggagttctagaactcagtttaatcctatgctagtcaatatttttgaatgtagcattatattttcttagtccactttcttttgctcataaaagaatatctgagactggataatttataagaaacacaattaattttttatagttccgaagatggggaagtccaaggttgaggggttatatctggtgagagccttcttgctgagaccctgcagagttccaaggtggcacagggcatcacatggtgaaggcgctgagcatgctggctcacgtctctcttcctctttctataaaaccaccagtcctactcccataataacccattaatccattaacctgaaaatccattaatgcacgaatggctctaccctcatgctccaatcaccttttaaaggggtcacctctcaatactgccacattcgggattaagttttcaacatgaattttagaggggacctttaaaccataatgaatatcttcttacagtgttatctctatttcctagtgctatgaattcagctgaattgtagagttgacaacataccgttgcttcagtatcttgtcctgcttgttctgaatgctttttcctaaatgctttattgttgttgctgttgttgttgttcctgcatagggcaaaatgagatgcctttatttctattaagtttcaaaaatactcagaaggatatgtgaagctatttcctacctgcttgttattctactgtgtttcccctgaaactttccatgtcttgagatgactcaataccatggaaagcaaattattattcaatttaaaaatcaagactcatttaaggtatctaaattccaatttggacagcaaaaggttaatagcgcatagaaaaaattccagcagcccacaaatctaagcataattatgtatgaacatgaggcttttattgctgtcaaaattaatcacttttcaacttccagctgttaaaacccttctggcagttctccaagcaattcccctacagttacttttccttcaattaatttctggtgcagttcacaggctcctgttacataagcagcaactgaaaagttgacttcttgggctttctttctctttccttcctttcttcctttgcttaaaactagaaaacgacagaatatgaagcttactacttttactctttcagcttgactcttaaaatctagaaacgagcagtgtggaattaaagtattagtatttattataaagcactttatgtgtgtgaagtgatttgtaataatttttattagccatttctttccaccgtcctctgaggtacgtgaatgttgttatgtttgcactctacagccccacccacttttctcccccagaaactttgcaggaaatggaatttacaaatcttcagcactgggtttaaccccgatggtatgcaccatttatttctgggatggtggctaccttcgccactcctgtaggcatacaggtttgttgtggtgggaattatctcagaaggagaagccgtgaggtgcctgaagctgcccagttgcctcaaagctctcgtggtggactgcacccccaacccccattctagaagcagctgccaagagactggttgagttctgaagggcagaggcctgtggtaaactatgccattgtgttgactatgaatcctcaaggagattgataaatgatcacagtgtatgattgtatgaaagtctgcatctttgcatttgcttggcacagaccgagtgcttgcacatgggtactgggtcagatgtgttgtctttccagtcttccttcctgggattccagaagaatagtccttgcatcctttctcactgctgtagagatctgaatgaaggccgacgctgcgcttcctagggacggggagttctaattcctctcacctcacctgcattatcagggcatatgctcttccacatctgagtgagttaagccagtttcatttccctggtttgtctcttccagctccctccaaagttgcctgccctcttcacacctggggtggagggcgccttccctgggcaccctccttctcctcctcatccaccctgcttcatgctgttccataattgcacgttaaaatgctgtaatgaacagatgcttctagtgtgtagtctctttgtaatttctgctatcatcctccattttcatgcaaaattaatgtatttccagatgctgattcctgagtctttctacccgatagtggcagtgcatgagatttgaaactgggcaagggggtatgaagatgtgtttggggcagaggtaaaagagtaaagaggtcttgcctattaaaaaaaatgtaagaatgcagcaaacaccttgtagtgcctgtttgttttatcatgaatatgcagttctgtgctaccctgtatttatgtggttgggaggagagactgcagatgcaggggaaatcttcattccattcttatcattcagactctaaagtggcttgtcattgaaaatttgggctttgaaaattcaaggctgtcataatttaggctatggagcaagatttcttgtccaagcaggagtcttgctggtcagtgggctggggagtgatttgtgtgaatttatctcagcacgagtcccctgaggctggtttctaggctgccttggttaaaaatagcctgttgatgaaatcacatcctagctcaaacctagcccaaggaaatggctcaaggcccgagcaccttactggaatatgaagcagagacagattcaccaagaagtcatcagattgtccctttactacaatttgcactgcagtgaaaaatctgtgtcaacctctccctcctctttcaaaaattagctggttagattctcacaggactgcgttatttgactccagtcagggtaatttggacaaatcttactgagccctgaattgatggtctagagtgaattgagtcaggattaaagtcaggattctctgagtctgacgaccagaggccaagactcttcctttgggaagctgccaagacatctaagagacaggctggagatcatgttgagagcaccaaggccaggaaggactgctgatgaagttttgtccttctgttcagtatttaacgtacttcctatttgtaagacattccttaaaaattgctacaggcacagtttttgttaattggcttatataacatgcatgaatattatttttcactgaaaatacctttttgtacattatgtgcttgtttccttaattggatactctgtgggtggtttggctagatttggtgttccctagacctgtagattctatcattcgaactccaaacatctcaccaaactctaccaagtgtaaattaaaaacaaatacgtatgcagtcaacaagttggggagaagaagttctgtttggcattagagtcactttgcaattggcaaaatacagttacagtaatttatattgctcttattccatctgctttctggcttaaaatgtcctggattgcctcaaactctgaatatgcaatattttccatttacaaaattttcctgcataatccattttatttttcagagaacttttgaaaaacaacattggttagtttcatatttctagagtcaagttttatgtgatatgatttttaatcttataaatggatgataaagcctgaagagataatccagggaaacttctagagagaaaatgtttgtcccatggactcagtgcaaattctgccaacaaatgaatagttcacagcagctggactttgtagaggcagagcccacatagtctcaagtaaattccttctgaggcctgcagctttctaccaccaccccctggttatgtttaaatacgttctgcctccatgcctctttggaacttcaaatttctttttggagccatggaggcatgagtgtttataaattatcttcttcactactcaattatgaaaggaggagtagaaatgagtgcacatgttgaagattataggaaaacacgcaagtttcagagtctgtatgattctgggacaggggaatggaggtgaggggatagtagctggtcctgggatttggcactcctgtctattcatttgccaggagttacactcacccacttctgtgtaccgtattagggagggaaggtagggatggaaatcatagagtaaacagtctcatcaattccagccacatcgcctgagttttcaagtgataaataggattgtttggaaggcattggcaggctcttttcatggcattaggtactatttagaagacaaatgatttgaagttgtcttcttagttgagaaacatttgcaaggattttctgttttgcctctttcaacatataacactattatttagtttagttgtttgtttgtttcctaaacagggtctcactctgtcacccaggctggagtgcagtggcacaatcctggctcactgcagccttgacctccctgtctcagatgatcctcccacctcaccctctggagtagctgggaccacaggcatgtgccaccatgcttggccaattttttttgtgtgtatttttttttgagccggggtttcatcatgttgcccaggcgggtctcaatctcctggggccaagcgatccactggccttggcctcctaaagtgctaggattagaggtgtgagccactgcacctggtccactagtttagcttttatcctacaaaactgtcttcagttgaattataacaatgacttacatttgaattctac

SEQ ID NO: 115939 - DNA, 1579 bp, Homo sapiens
ttggttttcctgcacattacccaggaatttccagtaaatgattagaccttccttctattaaaagatattgctaaatggagattttatacccctccacaatttcaccctaaagaatggatcaattactaaagcctattttattaaaataattatatttcaaaatagatatggctttatctttttatgattatgaaagcaattcatacttcttgtaaaaacattcctatttttcagaaagatataaagaaaacggcaaaaatgcccttatcttgttgtccaaagataacttctatttttctttgtgtgtgtgcacacattaatgcacatacattcatgtgagcatgtgtttacttatatttttataaaaatgagatcatactttcttcccagttcaacaatatatcatatctttccacgtcagtaaatgtagatgtacctcatcattttaaatgaatgcttattatttttcaaaatgaatatgctgtaattcatttaaccagtctcctactgataaaattaaggttatttttttttcttaaccattattaagagctctgtaattgactctttaatgcatatttttggccatgtgtctggctacttcctaagaataagttcctaggacagaggtgattagtcagttgtcctaagggaaaaagagccagacaagatgatttgatgcaacggcaagctgtgatatttgaggaagagaagagatactgagttgatcacagtcactgtcacttgaatctgtgcccagcccagctctgtggccacatgtttgggtcctagggagagaggaggtgctagctgcactgttttcagacccttgtgacagtgggtacgtgaaggagagggagttgctcctccagctctgatccaagccattatgtagctctgggtcaagccagagcaggggcaaccccagtgggcttgggacagtttgtgtgtacttttgtggacttcatggggactcccagaaacacaaagcaggggctggcacagacatgtgccagggaagtttgagtcattacttttgcatgattctatctatacccagcagcaggtaaggcctggagaaatttagattatactgtgattacttgtgggtataaaccaactctgtatgcttaatgctatgagaatactgaatgtacactctatttttaagcacatacacaaggcttgtcctttctgtcattttacagtctgagtaccttggggcttgttttgtctcacctattgtgtactcaaagccaaggtaaggcctcttggattctgttgacagccatttgccaactcagccatatgtcacttaagttctttcacctctttgtttaaaattgggtatgcaattggttctctcaaatgaagcctttcagcaatttataaccatatagagattatggtttttgtctttattcccacttgttagcacagtgccttcccacagttcaagggaatcaggtattgaacaataaagagcaaccaaatatccaaagtaggggagtgcagcagacactgtctattgtcatccaacactcattccccttcctgcccactctcctttctcactaaa

SEQ ID NO: 115940 - DNA, 1035 bp, Homo sapiens
agatagcaggagtagaaccataacgttcaatgggaaggaaaaggcttgaggtttggctgctgtaccagcagcagaaatctttttgctgtattccaggaaatgtttaaatgagtacctgccaccagggctacctcctcaggtaggtgcacctccagccttgtgagctctcagcttgtggaaggttgtctggcttcctgtgtgcaccttaacaacagccctgtgactccaagctacatttccatcgccctgtcccagcccctgccagtgtcagtctaattaaaatgttaccagcttttcatctttattgcttttgtgcattttaatacccgtgtggcagcctctagcccctcagctgctgccaaggtggtccaaatgatctccccaggtagtagtgattgctttccttaatcacagttgcatgggatttgaatggtctgccttggcccaacttttcccataagtcctattattttttatgccaagttttgcagacagcaacattttctagaaagtgtaattttaggttacagcagaaatgcctgtatatgtaaattacctggcacatagtaagggctcagtcattattattattagttcatgtctaccataccttgtccttgaaatgctgacaaaaaaaaaaaaaaatgagccaagaaaaccctacagtgacaattccagtacaagagcaaaggaacacaacttcatatagcaggttttgataatgaaaggcagaagttcttattctcttttgccaatatttttaatgacagtcatttgaagcaattcctcctgtgttttttgttttttcccagtttgagtagcttttttttttgacatggggatattttatctactcctatgtacttaaatctttaatgacattccatctctttctttttgactttagaaaatcagacacttattcttagaaatagccaggtggagagtaattatcttggccataattctctgatgtttacagaatatggcactcagacttgaaatctctgatggcctttgctggaagggatttca

SEQ ID NO: 115941 - DNA, 1050 bp, Homo sapiens
catcccagggtctggatcaaagctgtcagtttctgccctgtctgttcctaagtgtcataactggagcaaaactccttcatcagccagtctggccacatcacagacacgtgggttggacagcagaggctgcctggctcttttcaggttcctatggatacagtgtctcccttgacccactgaattcatctgtgtgggcagctgccacttctggactacaaatacacagtaagcaggcgtgtaggagagcaagaatagggtagaaagagcacgtaggaggaggggaagaaagaactgagagagagcctatgggtagaagtgggcaggaaggaaggtttggtctttttgttcctacagaagatgtttttgaaaagcttcttgacaatcaaacagacttttgaaaaaagttacttttgctaaatataaagtgtgaaaatcaccagtggaagattgcctccctttctgcagccagggcagagctcttgggtgtattttgatcagtaacttctagacacatccttcacaaccacaactaggcagccaagcattctgacatgtgcttaactaagaagcaaattaggcagccaatttgtaaaaatgtaatatggcgtcctttctcccttctgcttatttcattgataaacacacattcatgcacattgatgtacatagtaataataatattagtttacatggctgactctacagtttctgtagagcttttgcttagagcttcacaataaatgaagcaggcaaactgcattgattagatagtccatggtttccgagttactcagtagaggtgcagtctagactcaaaccccggactccagcttccaagaataggcacactcattcccacacccaaaccccccacccccattccatgcctggctgctggctaagccacaggctgctccacagttggagtgtaagggataaagaaagaggaaatgaatggtttaagttgggaagggcatcttgacaaagttgttagagtctaccagttttttcaaaccccacattagagtacagcaaataaatgcatgtcta

SEQ ID NO: 115942 - DNA, 1137 bp, Homo sapiens
cagtttccaagaacctatcaacagtgttaagtgaggacttactgtattgctatcttaatagtccctggtatgagcaatttatcacatagatgaaactcctttataaagaggtacttttagcaatttgacagctgaaatccttcaggtggatccaaaaggtacccatctggtattgcattctgttctttctataatggtctagagtaagtttattttaatagtttaactataaaatatattcacattcattattaatacatggtttatgcctttaaaacaattagtctaaggcctttgaacaaaatttaaaacattttaaaagcatcttttaaggaacagtttgcattgtttattcagttcaaaaaatattcattgagcacctatcaagcattgtctagggcagtaagaaggcagaagtggtcaagacaaggaccctcctctaaagagcttaaaccagagagaggaagtcaaataagaaaaaataaataaatgcatgtattgctctaagaactaaattggaacaagggcagagggatccagaagcagagaaagggcacttgatccagtttcagagaaggctttccaggggaaataacatcaatgccaatagtttgggagaacagagtgttgtaacatgtttccagcctcatgtgtacctccagggccgctggggagctctgacgaatatttaaacgcacatgtcctttcccactgctttgctttacccactctactcctttagccagaaaacctcctcttgaattttattcctatatcatcttcatcatccttcacagctcagctttaatgtggtgtcttctcagaagctttccttgaccatatttgaagaaactgaactaaagctaatctgaaaagcttgtaaatgcaagactcaagttctattacattgcccttgatcattcagaaattctaagcccctcagctaaatttagtcattaaaagatcactgtccattctttaatgttttaagaataagttgtactatttcctagttgactgttagtggagcctacagggggaaatcatggccattcctaaatttctccaaggcttgtgttattgcggcatcttggtctccagctgaagcccttggggaaagagataaagttgcccctt

SEQ ID NO: 115943 - DNA, 1081 bp, Homo sapiens
tgtcttttgacttcctccttgggagtagtcttttatgcttccaaagcacttctgcatttcctatctgtatccagtgatttagtctttagtgccatgagttcagggataaaaattaatgtgctcacatagcaacgtttccattttgattatgttgcctgatcctaaacaggtaatcagatatattcagaaatgcacaaggatttatgggtattatatcatctttttaaactttttaatcgcagtttttccacagttgtgtaaagtacaacctttccctgcttctgcctccccaagtgacttttctgactttattatagaattagaacaaggagtaaagcatgagagaacaaccataagcataaggagattgggtcaggatccaagggtctcctgaggatgggatctacaaaaagctgagctatagattctatctatccaccgatccatcactccatctacttactgcctaactctttattacacatatagtgggcatcatgctattgacaactccctggggtctacccactctacaaatttgtctgtctgatggatgccacttaatgttcttaggcttcctccagttgtatcagattccttttcctcatgctgccattgcaacctctgcgtatcctaactgatcatatcactttgtatcataattgtaattgttactcagtagctatctgtccctgtaaatcttgaaattcttaaagtcagactcctgttcttccctctcacatacctcccccacccccaggccatctgctcctttgcagcctggaaggacacaatgaatagctgccaatacctcactgccacaggggagagcctgtctgagaatgcaggcaactgtgaggaagggaaacaagaggtagagaagaagaaagacttcaggagggcaagggcagcctgatgcacttttgaatcttttgttcaatataaagatgatttccagaaaaaaaaaatcttagcatctactttaaccatctagtatctatttaaatttttaagaaataatactggaaatagtcattgaaaaacatcctggttaacaaaatatgacacctaacaactttgt

SEQ ID NO: 115944 - DNA, 1070 bp, Homo sapiens
gaggtggtgtattggtcagggctctccagggtaacggaacctataagatgttgtgttagtcggctagggctgtcataacaaaacaccatagactgagtggcttcatcgatagaaatttattttctcacagttctagaggcaggaagtcagagaccagagtgcatggtcaggttctggggaggggcctctttctggcctgtagacagccaccttctcattggtggacacagagtgagctttttctcttcctcttcttataaagtcactaatcttatcatgaggaccatggcctcctgatctaatctaaccctaattgcctcccaaaggccacatctccaaacaccatcacattgggggttagggcttcaacatataaattgtagggggacataaacattcagtccagaacagatgtgtattatgcagagaaagagatttatttgaaggaattggtttacaagactgtggaggctgattggggaagacacaacctggaggctcggaaaagagtttggtttgaattcaaagaccatctgctggaaaaaaattcaaagaccatctcctgtacctttagtacaggaagagcctgtgctaaatatgcgggctgaaggctgtgctagaggactccgtcttgctcaggtgggggtcacccttttgttcaactcaagcctctaactggtttcatgaggcctattcaacattatggagggcaatctgctttactcaaagtccatcgatttaaatgtaaatctcatccaaaaacaccctcacagaaacatccagaataatgtttgaccaaatatctggacactgtggtccagtcaggttgacacataaaattagccatcttaggtgggtttcagtcctagtttatggatgaagaaactgaggctcagaggggttaggtaacctgctgaaggaggcgaaacagctgaagtggaaacgagaccaagttctgtctgaacccacagtcgtgtgtttccatgatgagttgttctgagtctagagaaatttatttgaataggacattttgaaacaggaagagggcttagaatagtgagtgcctgtgt

SEQ ID NO: 115945 - DNA, 1049 bp, Homo sapiens
ttacagctctgtagtttatgatgcaaatctgccaagagagatgtatgtgtcactgcatggcttctgaaagcaggatgaattttctgcagctgtttcaaagttggggtctgttcttgaatcctctattaattactgtgtgtgagccagagggagctgtggtaagggttgggcccccagcctgtagggaactttctggactcccactctttgaatcgatataggcatttggtctcactacttgaccattctcaccctgtgaaacgtcccacactttgaagcaaatacaattcacagcacagtacacacaaaaaccttggcataagacagagaaggttcttcttattttgtgggctggttgctgtagaaacacataacaaagggcagccctccacttctggtataattgtgtagccccttttctttgggcttgacacctgtcttgaataagagtgattagagctgcataatgtccctctcttggctattgaccatgtggttcacgtacaaaactctgtataagttgaaggaaaatgttcatgttcatatgtacttgtttgctatgactacattttgaggttttgtaaaactgttatttttttttttttcacaatgtgaaactgaaggtcaataaattattagagattttctcttcattatgtgtgtgggtcttcatttgaataagacacaatttgaggcattgtaaacgtgtgccttttctcgtttatccaaagaaggatcatttcagatattccgaacgtgttttatttcaccatttagtgatatttacaaaggtaattttgcatattaaataaaacttcctgaccattagagtatctctttaagcaagacaaaattcctcatttatgggttattcatagctgggaatataacaagtcacacaccatgcgatattaagacagcatactttatattggaatgaatttagttttttgaaatcctcacgtgggttatattttgacagaaagctgttagagaaggagctggagttcaatcctcttttcatctgctgacatctgctttagaaatca

SEQ ID NO: 115946 - DNA, 1688 bp, Homo sapiens
catctagacatataggtttggatttgaaagtgtgtatgcttaggaaagaagtgaaggtccttctttagacaccactgtttttgtcaggccagccatctgcatggatgtgtacgtgcacacgtgtgtgcatttaaggcaagtactttaaatatctttgcacagttcctactgaacatgtaagacctttggaagcaatattgtccagctccataccaagtttaatttaaaaaaaaattttgtggctaataagaaaaatttaaaaactatggcatcacacaaatccttcatgcttttttgttttgttttttttccttttccttctatttcagctcactccatcactcgatgagataatatgagatttctacttcggagaggccaagtctaatgaagagaaaaaaaggaaaagaagttgcaagactcgaataaaatctgctgcaccttgtaaatgctctaactggacatgaaggaaaggggcgagggaggggggtgggatttttggtgcaagtagcacatggtttaaatatgaatgaacaaacctgtgatctagtccttgtcttgtaattgtggattaatgtcaatgttaatcagcccctcaaagggagagaaaagctggaccttttcccttgctgtaccatattcagcatttgatttccatgggccccaccatttatgtgtagaatttgaaatggttgtcacctctctctgaggacagagcttgaagcctccacaccagctgctgctggagattcaaagcccaactgtgggtccgagagggaagctggctgggctggctgaagaatgaagaccactggactctccgttaatctctaaggggtctgctccccaggaacgtttctgaacaatggggactttgttggtagccatttggtagatgttcttttctatttataagtgactttaaactttcccttggctgttaagaagtttgttatagatttagctatttattgttcgatgcctgcatgctgaaacaatgcctacagctgtcttcacatgtatggacgtgtgtgaatggttgtacgttttgcacattttgtggctgttgagatgtgctttgctgcacaaacatgaaaatttttgagttacaatttggagcataactggagggtgggttggggaggggtggatttttaaaatgtcaagacagggaaggatgacaaaatggaaatttaaatgacatcctagaggtagagaaaccgtggagatcgcttttctcagactcaccaacttttaatgggatttcatggggtttggttgtgctgatagggtaaggggaggctgctttctgcccttctccccactcccatctgatttacttaattcagtctcagctgctgaaatttggaaaggaccaaattgctttacagtttttttctttgtgtagtatcttgaaatcctggaaaattctatggaatagttctgtatatagggcacaagtaaaggcattgtccaaagtttatttatttatttattaccctaagaatgctttgccataaccacatttaatgggaaaaacggcagtatcacagatgtaaattaactcaccagatttactgggcctgaactcattctcttcttgctatatgatttagcaagttctagaaggtctccaagacaataattacattggcacaatgtatacttcagtgctcacccgtaggcaa

SEQ ID NO: 115947 - DNA, 1993 bp, Homo sapiens
gcaatcaggttttccaagatgaacctgctttttatgcagtgattttttttttttttttaaacagtgcagagttcaaatagctcaacagtattagcagtgaatatccttccttccgggtagttgtctctggctttgtcctggaatggccatacactattctagaatagtaggtggcatggtcaacaacaaagtgttctgttttttgtgcaaaaccattgttgctttcgttctgctgttctgaacatcaggagcatcattttcaatttattattattattatttttaggagtggaaacaaaatgtcagtcagtgtgcatgagaaccgcaagtccagggccagcagcggctccattaacatctatctgtttcacaagtcctcctacgctgacagcgtcctcactcacctgaatcttttacgccagcagcgtctcttcactgacgtccttctccatgccggaaataggaccttcccttgccaccgggcagtgctggctgcatgcagtcgctactttgaggccatgttcagtggtggcctgaaagagagccaggacagtgaggtcaactttgacaattccatccacccagaagtcttggagctgctgcttgactatgcgtactcctcccgggtcatcatcaatgaagaaaatgcagaatcgctcctggaagctggtgacatgctggagtttcaagacatccgggatgcatgtgcagagttcctggaaaagaacctgcatcccaccaactgcctgggcatgctgctgctgtctgatgcacaccagtgcaccaagctgtacgaactatcttggagaatgtgtctcagcaacttccaaaccatcaggaagaatgaagatttcctccagctgccccaggacatggtagtgcaactcttgtccagtgaagagctggagacagaggatgaaaggcttgtgtacgagtctgcaattaactggatcagctatgacctgaagaagcgctattgctacctcccagaactgttgcagacagtaaggctggcacttctgccagccatctatctcatggagaatgtggccatggaggaactcatcaccaagcagagaaagagtaaggaaattgtggaagaggccatcaggtgcaaactgaaaatcctgcagaatgacggtgtggtaaccagcctctgtgcccgacctcggaaaactggccatgccctcttccttctgggaggacagactttcatgtgtgacaagttgtatctggtagaccagaaggccaaagaaatcattcccaaggctgacattcccagcccaagaaaagagtttagtgcatgtgcgattggctgcaaagtgtacattactggggggcgggggtctgaaaatggggtctcaaaagatgtctgggtttatgataccctgcacgaggagtggtccaaggctgcccccatgctggtggccaggtttggccatggctctgctgaactgaagcactgcctgtatgtggttggggggcacacggccgcaactggctgcctcccggcctccccctcagtctctctaaagcaggtagaacattatgaccccacaatcaacaaatggaccatggtggccccactccgagaaggcgttagcaacgccgcagtagtgagtgccaaacttaagttatttgctttcggaggtaccagtgtcagtcatgacaagctccccaaagttcagtgttacgatcagtgtgaaaacaggtggactgtaccggccacctgtccccagccctggcgttacacagcagcagctgtgctggggaaccagatttttattatggggggtgatacagaattctctgcctgctctgcttataaattcaacagtgagacttaccagtggaccaaggtgggagatgtgacagcaaagcgcatgagctgccatgctgtggcctctggaaacaaactctacgtggttggaggatactttggcattcagcgatgcaagactttggactgctacgatccaacattagacgtgtg

SEQ ID NO: 115948 - DNA, 1464 bp, Homo sapiens
ggtgaatgtcgcgctgcgtcgctccccgcagcctccagggccgagcgcgcgggatggttggcccacgttgcatcctccccggcttggaggaaagttggggccatgcacagacaccctgagtgcgggcatgttcactgcggcggaaatgtctatagagaatgaatgaaaactgctttctgaaaaactagtttcttgatctgtcgtgttaacattattagttacaaaggataggaattggtgggcctggagatgaaacactgaatttatccacatgcggtttggtgtcacacaggcatggccagcttgttaaatagcgttgcaagtgttaataaaaagactctggcaagaagctacttttgttaacaagatctttataatgttctattgttaccggtaatgtaaatgcccagaaaaaaatctgcttagtttctcttttgattggattgagatcaggttcaaaacctggagaagggtgcgggacgctaagcattggaggcagagagcctgagttaggagcatgaagtgaactgaagttactgtaactgaagcccttttgatgttcacagtaatagcagccctttctctgtcttctttgcagacgtaggttaagtacatgtgtgcattttcttggccacttacttggtatgcaaatgtgatttctctgggggcttaaaaatgctcgaaagatgattcattttatgttgaaggtgtgttcagtgacttgtatacatggtttctgctgatattttgaggtttgcacagttttaaaccagaaagcaagtatttcctcttgggtttccaagtttactttttattttaatcaaacattgttgcaagaatgttgattgtgattttgactgtgacgtgcttttccatctgggtggtatccaagatgacaggctaggctcttccttctggcttgttgggccaacctggaacatacaggagcataaacacaggatgcggagagatgtagatcctatatcctaaggtcttctaagcaaattgttttcttaggtgtaagtctggttgtgaatgttgttttgcaccatcctgaatttaatgttcaaggaaatgtgttctgggcctagcatgattccagctcaatgtgtaagcattttggtgcctgtgcacctagtttcagggagcctcattcttccttcactcagggcagcatttgctctgagagaggcggcagattcacaagagtaagtagacagtctattgaggtttaggtttaaagtcttcctccagatactccagattgaatgtactaattaaaatagcaactacagtggtggagcattgagaatgctaatgaatgttttaaccctttggaaacctgatgcattcccataggttcatatggtcattctccaaaacactgggcattggttagaatggagtagacagtagatgcttagcttgaggtgggagtgaagctggctcctcaccattttttat

SEQ ID NO: 115949 - DNA, 1019 bp, Homo sapiens
agcaagagtggctgctcaaacggatccacaagggtctacacacaatgttcattgttttctttttcggtagggttggttttgaatatcttcagacccttctataattggtttttcattgtagccagaagagggcactattgctttacccaaattctgtgctgtggtctgtggaaacccgcatttgtgttctgtgctacagtgttccattcctggttttgttgagggtggcagtttcattcttaggtgactagcacaagaaacacacaaacaagcaaaaaaagcaaaacaaacttttgtccataataacacacatgcaaaaaattgggatgtggaaagttgtttatattttattaagccatagaaaattatgtatggaattttaaaaatgaacatgtatgccgatgacattgatcaagattctgcctggaaaaccactgtttgaaaaattagaatgtacctaggtgttcctgttcactttcaacaagtgtcctagaagaggtgtagaagaaattggtgcagttttggaaaaccccgggatgtttcctcccactattaagacagtataagggcaatataactgtggggtaaagctgaagaacagaaaataggaatggttgcatggttctttctgcagattgtgctggagaaggggattggaggtgtcaggggactgcacctttcctcttgtccttcggtactatttgagtgtgcctccatgtgtgtttactactttgactaatattaagaatttaaaaagtcaactacaaaagtaaatatgttttttaatacaatagtcagaagaaatggtttcatctcttacaataatctaatgcttggaccatttgggataattttcttaaggcaatgcaagtttctcaggcattaaataaaagaccattcacagagatcttcagtttcagagtgcttttatgctctataatcctcaagtatccctgcaaactggatattataattattaggccccattttactgatgagaaactgagtctgagagaata

SEQ ID NO: 115950 - DNA, 1059 bp, Homo sapiens
tagctggtaacccacctgtgtagtctctatttttatagtcctttgtaggtttccaagaagatgtttttaacatgtgtgtgtaggaaagcaggggcatgggagatgcctagaacactgtccacggggctgctattgcacaactctcctcctcctacacacacacacacacacacacagagaaaagtgtgcgtgggcatgaggacatgtatagatatccatatgtatttttagaaagttaggaaaagaagtacaaaaaagaaaattttaaaaatcctatggaattctattcagttataaccactgtttacttatgtacttttcattttacagaattttagccatgcttcctatattgctttgtcacttgcttttatcactgcaaataccagaaaactttttccttttataaaatattctcttaagttatgagtctggatggattaatttttattgaaccactttcttatttggggacattttaaattttcagacattttcactaccatagcctgtgataaatatctttatgtgaaaatctttttgtagacctctgattcgttcttaaaagtagaattactggatcaaagggcatgagctcttatttttgagtctgttttagtatgcactgtcccaaatgcgcttctccaagggcgtaatgggatatgtcgtgccctcccacaacgagagtgtgagcatcctgttttcctgcaggtgctaggtcctctcattaggaacagttccatagtaaagatattcatcctcttcctgccctattaattgccattgtctccttagcttgatacttgcctcttaacttggacgatgagctggaaaattttatttgttttgccagatttttttccctctctccctccttctgacactcttcagaagtcttaaacttctctctgtaaccctttcctttatggagtccttttcagtttttaagctttcccagcttgaaatcagattatcgatttccacttttcttaaatttgtttttttatagttcatttttatatttaacataaatctatccagaactgattttggcatact

SEQ ID NO: 115951 - DNA, 1003 bp, Homo sapiens
aaacatggcctatagccaattaaattgctataagaatgtgccagactcacatgaataataatgttgtaattctgctaaaaattcctctgttcccacctatacaaatgaaatatttacttccctgcttctgaatgccaactccattcctttggagttggtgtttctgggtggttcatcctcacactttgagtataactaaattctgacccttttgattattgtagattgacagaacagaatccactccagctagctttaggaggaattaactaattacagagtatcgagtggctcacagaatccttgtgagagctgaagaacttggctcttggctgaaatttcttgagtaactgctcttgtcatgaccaggaagctgcatgccggatggagaagcctctgctataggtgctaactctagaattacaccatttcagctccagtctacacagcaaagggatacgtcatgccctgtctcagtctccacctaactcacttctgaattcaaggctcatgcaatcacatctaatgagcagaaactaaagaacatggaaccccagcagcaagggagtctgggaagtgtagttgccagcctctgttctaccggaggacacactgggaggaggggagatggatggatgcctagtgagccacttcagcatccccatggacagtgatacaatttgttgaggtgggtggacagcctaggacctgggcagacaagcaagcaaagctgcctaactcctgcagaagtgggaacattctgtggcagggacggagctcctgaaattagatgatcacatttttctactctcatgacatatccataagcaacccgaaatatttgtgaattctgtcactgcaattatgaaaactgagattgagtgccatctggcaagggggagctaaactggcctgtccagaagggcaagaagacggcttggagttaaatctgctctggcaactggcaagcatttctccctgctttgctaaaattagccacaaa

SEQ ID NO: 115952 - DNA, 2145 bp, Homo sapiens
ttacccaggctggagtgcagtggtgcgatctcggctcactgcaacctccgcctcccgggttcaagagattctcctgcctcagcctcccgagtagctgggactacaggcacccgccatcatgctcggctaatttttgtatttttgtagagtcggggtttcaccaatttggccaggctggtcttgaactcctgacctcaggtgatccgcccgcctcggcctcccaaagtgctggggctacaggcgtgagccaccacgtacggccagcaccgggcatttttcttactttagccatcccgtgtttgaggttgctgtctgggctctgctcctacccgagggcacccctggaggaaattctcgaggtgacctggacagggcgggctgggcgaggacgctcccggggcctggaggcggagtcgggggcgggcgcgcgcagtcatctgactcggtgactcacccgcggccgcgcttcctctgatccgggccgggcgggaagtcgggtcccgaggctccggctcggcagaccgggcggaaagcagccgagcggccatggagctgtgcgggctggggctgccccggccgcccatgctgctggcgctgctgttggcgacactgctggcggcgatgttggcgctgctgactcaggtggcgctggtggtgcaggtggcggaggcggctcgggccccgagcgtctcggccaagccggggccggcgctgtggcccctgccgctcttggtgaagatgaccccgaacctgctgcatctcgccccggagaacttctacatcagccacagccccaattccacggcgggcccctcctgcaccctgctggaggaagcgtttcgacggtgagcgctcccggcccggccgggagttgtcctgggggaggggagaggcggaccaccccggagcgctgtgcagaccctcaccaccccactgcgcagacgagaaaccgcctgggagctggcaggcgatctgcccagcgccacatggactgaacccacgctcttgcccccaccctcctactgcttcttaagggacaccttgggtgctcaggaaccctggtttgagagccggatagtaagtggaagagggagtttgctctgaggccttgttgggcaaatggcatggacggaggggacaccggagctggggaggaaagtgacagctccttatttgaaggacgtgcaaagggataagttacccgaagggcttagacaagctctcttgagggaccaggaatcccccaaagctgactgtcatttataggccagtttcgccccctcacctctcctcacatctcctggtaacagctcaaatggcagaagtcctcagtttcgagcactgcctaaaactgccctctctcctaaaatctcttccatataaaatgtgacatgtttgcatctgactacgtttctgcggtcagtggttaggcagtatccaactttgtttctcaacaccgatcatgttgcctgctctccctgcttcctcttttacagacccctagatagcgcctctgtctctctcaccctttggctgcagacagggtgagttttgtcatgggagtcagccaatcacaccatagacaaggcaggttcccctggggagatgtttgaagacgccacacactgtcccctcagtgtgagacctgtgtaggtgggactgtcctgaaggcgtatcgtgccctgcagaattgtaatttggtgctaactgtactgcctcctggcattccccaagcctgtcgctgtacccagtggatactatagagcttaagtgtgcttgcaggaccctgaacaggtggggagggaatgtcaaactaactgaataatgtgttctgaccccagataggacaggtgcctaggctcaagctgcagaggcccaagatgctgatggcagaaatggttcattctctacaatcagaaggctcatggtttccttctgttttgtacaactaaatgggtattatcagtctctattttagacacacacactaatgagcctttggtatccaatctgctaaggccagagtggggttaagatgtagaaccaaagtgtttggttgcattgggatattcagaaagattgcatggaaagtacatgaaggttgtctcagaagatcatgactagggttggaaatctttttaaaaa

SEQ ID NO: 115953 - DNA, 1119 bp, Homo sapiens
tggctcaacagtgttaccagggatccatattctttccatctctgctctgtccactttagtgtagtggcaactagtccagctctcacatacagagaaacgaagttttcttgtgatttgctcagaactccccctaacccccacatcctatcactggtcagaattggtttttcattcccaagagtgatggattaccatgatggtttcattattggttcttaacggggcttcatatgtcacttcagagtgtggggaagcatttaaaattcccatgcctgaatcccattctaatagattctgattctgaaggcatggacgttgggattttcaaaaaacttcccaagtgattctaatgtacagcttggggtgagaatctctagttggacttacaatgggcagcatggatttgaggagttaactacaatgttactagcacatctgttttaaaaatttggctaaaatccttctaaaatgtgtttacatttatttctcaaacagatatcatggctatatttttggtttctacaagtggcatcatgaacctgctgaattccaggctaaaacccaggttcagcaacttcttgtctcaatcacccttcagtcagagtgtgatgctttccccaacatatcttcagatgagtcttgtaagtacctatgcaatgtgagtgtattatatcccaggtgctcgctgacggacttaagtgccaaaaactgactccatgctaggaaccactgagttctcaaccagtgagtttatgattcctattttaaaaataacctttaaagtctgattataaaagtagtacatagtctttgtggaaaatttattaagtacagtaagtgcagaagaagaaataaatcactcataatcccagcagatagaattaatcactgtcattttaggtgtatttttttgcagagtaaaacatgtaaacattttacatagacataaatacaaacatgataagcattgacatgaaaatggcagtaattctgtacatgtgcttcttgtatttttgttgtatttttatatcatgcttttttgcaaaatacattataaattaaacatgaatttcactagttttctgtgatatcattttcaatggctgaataatgttctgt

SEQ ID NO: 115954 - DNA, 1051 bp, Homo sapiens
accaaggattagtaggaactgaggaatgtttgcactttcaactaaactcttagcttaactaggaccctactctgttgaggagaagttggagagactaactcttttaggaaaatgaggaaacatggagttgacacccaaattcccgttctgagtgactcaagtgactggatggtggtgctgtgactcactgaaatgaggaacacagaagaccagcaggttgaagtgtgcggaggagggagggaagagttctgttggggcatgtggagtcgaaggaacctgcaggacatccaaatggagatgtacaggaggcagttagagaaataggtcatgtgcttgggagaaaataatagtccagaaatatcaatgacatgtttaggaaacttattgtgtgtcattgagggattaacaaaagtgtgtgtgtgattttaaatcctcaatacagatactttacttgtgaaagaaccagtggctgtccttaaggccaacagagtttggggagcattacgaggtaagttccatgcagtttcattgttactttccagtaaaggaaaattttcagttggtgctttgtgaaattaagcacagcaaaactttgccgccttagatcctttacagaatgctttgttatgtagttccaaaatgatttccattgaacatgtactacataaagcatgggagaggtcagcacagtggctcacgcctgtaatcccagcacttcgagaggctgaggtaggtgatgattgcctgagctcagaagtctgagaccagcctgggcaacatggtgcaactccatctctacaaaaagtacacaaattagccaggcatagtggtgtggacctatagtcccagctactctggaggctgaggtgggaggattgcttgagtccaggacgttgaggctgcagcgagcctagatcacaccactgcattccaggctgggcaacagagcaagacccctgtctcaaaaaaatacaaataaataaatacagcatgggagaaaactcatttgacctctcaaaaaatgtttgaaggttattacattcctgcagtg

SEQ ID NO: 115955 - DNA, 1704 bp, Homo sapiens
caagaagtccatattttctgtttaccatcagactttcagagtaatgtactctaaactgatcattattgaacgtaatgtcacttaacagaaactttcagagttattcttcccagcatgaacctgtacttgacgaggttggagagacaggaaggcgtagcaaagatgactgaactgttcttaggttaaaaattccctggctatatagctgtcagctagaatgaggaatctgaataaagtcaaggccagttagaagaattagcctgtcaactagtatattaagggaataatccacttgagtaaaaaatgttcagaaggtagtctttgcagctataagtaaaatgctgtatattgtaaattggcctttatttatagtttcatggtttttccagccatttttccctgttgcatttagataccttctaaaagtgactatatttgattataaaaattctttctcatgatgccataaatttattaaggaaccagtattttattaaattactattcttcttttgtctatattgaaacaacccccagggtatgggtacaatgaagtaaagcacttttattagatgagtagagaagtgcaatggatttttttttaatttggctttgattttagaaattatggtagagggtgtaggtataacaatatattttagaggatagaggtataacactatattcaattatatttgccttacctggttatgagtctgtttgaataatataacttttatcatctcaatttgttgatttataaattaatgcaataaattttactttcctcaggtttagagacctttagccagttagtttatcaagattcttatggaactgtaagtatgattattatatgttactaaaaattgttagacaaattgctaatagaaaaaaatgtaacctgtttagctattgcttcctgaagatttcatttccccagatatttgtcttagccggtaaatgtaaatttcatacatttttgttgttctaaattaatattttatgaaatgcttgtataaatagatttagtcttcattgagttcaagacaacagaaaattctaaaactaaatcaaaattttattttgtcatagttcaccatcaatgaatccaccattattgattctccaaggttttctcacagaggaattttgattgatacatccagacattatctgccagttaagattattcttaaaactctggtaagtaattacttcattctaatctgttgtctattctgaagatgtctcctttatgttgtaactttatgttggttactattgtgtagtttggaacaggggaatttgtataagcactgggcattctttcctcagttcctagggaagtgtatttcctcagctgtgacgtggaggtccccttgagaatcaccctcctgttttcagtgcgagagccacgtataacatgtatttagccaagactgttaagagaaggacagtttaaacactgcccattggccctttacatatactcccatttgtcaaatcatgtgtctagacttttgattaggaatacatggccacccaggtgcggtggcttacacttgtaatcccaacactttgggaggctgaggcaggtggatcacctgaggtcaggagttcgagaccagcctggccaacatggccaaaccccatctctactaaaaatacaaaaattagccaggcgtggtagcgtgcgcctgt

SEQ ID NO: 115956 - DNA, 1342 bp, Homo sapiens
gaagtcataatctttactactttatcttcttgggccagtacatgtggttttaatttctatagctttagcagtttttatttttgtttttgtttgtattttgaagtcttaaacttagggaaaagttgtaaatagtgtgcaaagaactcctatatactctttacccagatactccactttaaaatttttattgtatttattaaatattaaatttatttaagctatatatttgctttattctccctctctaaaaatacgttttctaaaccacatgggcacatatgatgcatcaatacccccttaatatttcaggatgaatttcttaaaaaaaggacatttaataacttcagtacaaccatcaaaatcaggaaattgacacaatactgcatctaatacgcagaccccattcaaatttcgattgttccaacaatgtcttttataggttccacatcccatccaaaatcaggtgttccgtttacttgtatgtctctttggccaccattaatctgcaactgactatctttccttgtctttttttttttttttttttttttttttttgagacggagtctcgctctgtcgcccaggctggagtgcagtggcgggatctcggctcactgcaagctccgcctcccgggttcacgccattctcctgcctcagcctcccaagtagctgggactacaggcgcccgccactacgcctggctaattttttgtatttttagtagagacggggtttcaccgttttagccgggatggtctcgatctcctgacctcgtgatccgcccgcctcggcctcccaaagtgctgggattacaggcgtgagccaccgcgcccggcctccttgtcttttaagaccatgacatttttgaagagtataggccagttgctttgtagagtatgccttagcttgtccattttccagaagataatattcagttatgcatttttggcaggaataaagcagaaatgatgctgtgttcttctcagtgcttatcaggtgacacaatgtcttatttatttcatttctggtattgttcacttataacttgcctaagatgtcatctgccaggtttctccactgtgatgttaattaaaaagcattttgtacttaacaagtaattaagtatcttgtgggaagaaatcttgagaccgtgtaaaatcccattcttcatccagcgttcactcactagttttagcatccacagatgattcttgcctaaatcagttattactaaggtggctaccgagtggtgatgcttctaattccatcactccttctatcatttattacttggcatttcagtgtaaggtagagcaatcccttctcttttatttaagtatt

SEQ ID NO: 115957 - DNA, 1148 bp, Homo sapiens
cgtaactaacctgcacattgtgcacatgtaccctaaaacttaaagtatgataataataaaaaaaagaaatgctttaaattttaaaaaaaaattcacatttctccaactgtctttttctcttatttaaaaaattattttaaaacatttgcagtgggatacaaataagctccataattgtggtgagttaatatgtctagtaattcttttttgatctacaggtctgctcttcccacctttttctcctgtaattgttgttgaagaaactgagtcatgtgtcctacagtttcccacagtctgggttttgctgattgcaccccacagtgtcaattaatatgtccctgtatttactataaactggtagttgaatctagtcttgatagaaatttgatttgcagtgctgggagacaagactgcttttccgcaactgagcacttataggccatagtttgagaaatgtgctaaggaacagctcacaactttagttacaaacaatattgagttctaatttttcaagtgacctataaagggactgaggtaatcattaaaaaaaaacaagtcacttattctggagtctatatgggaatttttcaagcttatagtaattcaagctgatagtcctttgaaggacaacagctatgctttgtaataaggtgtgcattttgactctaaaattgacaagagcagtgttttcggaagtttcactttggagacatttgttttgttgtattcttacatggaagttgaaacagcatgatagtagaaactcttgaaacaggaggcactgatggagacagatatttctaccagtaaatctgcggttagcccaaagtatactgagaatttattgctaaaatatggtaaacaaatgatttgacaaaagccccaaaatggctatcatcctttgagtatgtacgacttagtagaaattttctttctgaaattttctactcctgaaactatggcactatattatttttaaatgagtcatctaatatcacatgaaactaatacattgtcatagtgaaaaaattagctgtcaaatatcaaatgcaagcacaattgttaacaatttccaggatcaaatctacgttgtacattttaacttgaataaatatggcttttacagggaagctattctttgtctcatg

SEQ ID NO: 115958 - DNA, 3199 bp, Homo sapiens
ctcctcatgatcggcccgcctcggcctcccaaagtgttgggattataggcgtgagccactgcgcctggccaggagttgtattttataagttgcaaaagtgaatatttgaggtattgcatttcttattttatgacctagtgtttgctcattttgttcttaattgtgattggcctatcagtaatactattgacagatacaattcaatagctactctgtgtctattgtgagcaagtcattgtgattaggtactgcctaaagtataaaaaagggaatgaaagaaaacaaaaagtgattacaaaaagtagaacatgataagtgaattcaagaaatggtttcatagatgaggtaacacttaaaatgcttttgagtgatcacagaatatattcatgtttctggtagaggaaatggcataaggaaatgtgtgcaaaaagtgtaagatatgcttgacaagtatgtagctggagtagagtgtagcagagtaggaggcattatagggtggtgattaagaactttggctttggagccagacagcttgggtttgaatcttgcttctgccattataaactaggtgaccttgggcaagttacaatatctcatcttcagtttctccatctctaaaatgagaattagtagtagctatcatgtaatttttttgagaattaaataatgtaaagcacatagcacagtaccaagcatttataattgctcaatattattagagtagacatggggaatagtgagaggtaaatctggaaaagcacattagcgggcctttggtgaggaatgtgaacttcatcaggacacactggaaaccagtgaaaatttctgagcagaggagtaacatgatgggaaccacactttgggaaaacctttgggaaagtgacagattggagttctggaccaggagggtgatagtgggaatgtaaaataatggacagaactgagagacattctggaaatatccatagaatttggcaactgatggactccaggagagaggaggtatatactctaggatgacgatggtacccttattagaatacgaaaatcaggagaagctagagaagggagcttaaggactgcagatgttgttttttgttagcttgtatttgaagtacagctaggatattcagttgtatccagcagggaatttgaaatatgaattgaagctcaagaaaaagcgttgaggcaaactgaagatttgggagttactaacatttgacatagataaaatctcagatataatgggaaacaaagaggcaaagagacaggattcaggaaacccttcttatctggaagaaattactagctcttagtaaacatgttcatcttttgtgtataaaatcttgtagcttcaataaaatgacgtagtaaaatcatgtggaaaaccagatctttataatgagtacacttcttttaaaaagaatcttaatattttcttctaggtcagaaagacctcctgactccatgttacagtagacaaaacaagttggactcttttggacctataaaccctactctgaatacaacatacagcttccttactacatttttcaaagaaattagtgaggtgtttccagatcaattcattcatttgggaggagatgaagtggaatttaaatgttggtaagatgattccttaaaacccctttaaaaaaaaaaaaaagagaggctgggtgcggtggctcacgcctataatcccagcactttgggaggcagaggcaggcagatcacctgaggtcaggagttcaagaccagcctggccaacatggtgaaaccccatctctactaaaaatacaaaaattagctgggcgtggtggtgggtacctgtaatcccagctccttgggaggctgaggcaggagaatctcttgaacctgggaggaagagattgcagtgagctgagatcatgccactgtactccagactgagtgacagagtgagactccatctcaaaaaaaaaaaaaaaaaaaaaaaaatggaataaaaaacctgttgcattgaagtagctgtagagggctccacaccataaggaagacttaagagtaacatgcctgcttgtaagggtttaaactgggcaacatgactcctgagatggtagatttgtggagaatgtacattttggtatggcaaagtaaagcttgaggaaaaacaagatgcagaagaaaatggagattcaaaaaaagactactgtgaaatgagaacacctttagtgaaagagggcaatcaatgattaaataggaaagatttttcaaataaaaattctctctgcaaatagctttagatggaggagaaaggtggtaaggtaaagaaagccatttttaaaggaaatcagcttcttgaaaaaattgtttgcaatggataattaagataacttgtaattaagtttttaggcttctttttactacctacaaactttaatagttttaagtctgcacaactgatgttaggcatgtatactgctctaaataataaactgagcatatcaaacttctaatgaaattttaatcactttttgcttcagggaatcaaatccaaaaattcaagatttcatgaggcaaaaaggctttggcacagattttaagaaactagaatctttctacattcaaaagtaagttgtttgaaagcctatttctgtattaatgctttttgtaaaagtttatttagtaatgtgctttattttttacattttctctacatcctttgcctaagtgtagatgtgaaaaatcactaaaggaggcaatacccactgcttgctttaaatcagtaacatggtgactccaagtattttccaatagctgttgaaatataggaaggcagtcatctgttctaaaaactcagattgggctgggcatggtggctcacacctgtaatcccggcactttgggaggccgaggcaggtggatcaccggaggccaggagttcgagaccagcctggccaacatggtgaaatcccatctctactaaaaatgaaaaaattagccaggcatggtggcaggtgcctgtagtcccagctactcgggcggctgagggagaatctcctgggagatggaggttacagtgagctaagatcgcaccactgcactccagcctgggcaacagagtgagactgtctcaatcaatcaatcaatcaatccatcaataaatataaaactcagcttgaagccctggctaccctgtgaagtcttcactaccatccag

SEQ ID NO: 115959 - DNA, 1682 bp, Homo sapiens
cctttgcctgttcagctttttgtgtgatgcatttaagtgttatttatctgcagagcacctggcattatgtaaatatctgtaaatatttgtggattgtcagtaactgttacatgtaatttatgtgatatgacaggctagatcgtggtccctaccattttaagacagccataaaattgtaagagattgctgtttgtacaatttcctgagttgcctaccaactcaatttgaggccacttcttcctatcttaggggcatgtttaactcattcattcagcaaatgattattaaacccccatactatgttaggttctgtatcaagtgctaaaaaggaggaactacttgtgacacttcccaacttgagctgcttctgctataaagctgaactatactaaaaggcacctctcaaaatgcaagaaatccttggtagaaaatgtacatgttttaaatatattgttaagcttatgatctaaaataactataatttttttgtaatactagggttttggatattattgcaaccataaacaagggatccattgtctggcaggaggtttttgatgataaagcaaaggtgagcattgtgaagactgcatctgatcaatataagagacttaattatttttcttggggcaactgggaatttgcaagtctaactactagtattacctttctagtgtagttagtgaccactttggacctcatagttccaagctaggtttggtagaaataagactaaaatgcaagtctcagctttagttaactgaacctatgtggtatccatatataagcaaaagttaaatattcaaacctaaggttgatgaaacttttaagtccctaaaatgagtatcacatggcactaactctgaagaaaagaggaaaaagaaaatgcagattttttttaaggatcttagaaaattatgttcctagtaataatgccttaaactttcaatttcatctactgttctaggcctaataatatgtattgcaatttgtaacgttaatagcttgcgccgggcacaatagttgaagtatggaaagacagcgcatatcctgaggaactcagtagagtcacagcatctggcttccctgtaatcctttctgctccttggtacttagatttgattagctatggacaagattggaggaaatactataaagtggaacctcttgattttggcggtaagtgaagcagttggtccaagtgttgtgggttactgtgaagctgatggtaagtgaagcaaccattgttacctttgttttatgagttttcttccctaacctcccaccccagaagtctttacctagatattacctaccaactatcttttatgtttgatccttgattttatgtgtttttttaagttcagtatcattttaaactctcaagaaaccatacagttgcctaaattcaagaacttcaaaagtattatagatccccttagattttatctccattttcagtgatggctcctcactctctacattctaaaggtatttgattgcattaaccttacatgccctcttctgaactgcttctccaatgtaagacacctaagcaaagctatagttttagttcagtggatttcaggctgtgttgtcttaggattctgaggagtagaatccttggtggatgggacaggagggaacatctgaagggtggagcttcaggctctcagatcccc

SEQ ID NO: 115960 - DNA, 1050 bp, Homo sapiens
taggtgtcttacattggagaagcagttcagaagagggcatgtaaggttaatgcaatcaaatacctttagaatgtagagagtgaggagccatcactgaaaatggagataaaatctaaggggatctataatacttttgaagttcttgaatttaggcaactgtatggtttcttgagagtttaaaatgatactgaacttaaaaaaacacataaaatcaaggatcaaacataaaagatagttggtaggtaatatctaggtaaagacttctggggtgggaggttagggaagaaaactcataaaacaaaggtaacaatggttgcttcacttaccatcagcttcacagtaacccacaacacttggaccaactgcttcacttaccgccaaaatcaagaggttccactttatagtatttcctccaatcttgtccatagctaatcaaatctaagtaccaaggagcagaaaggattacagggaagccagatgctgtgactctactgagttcctcaggatatgcgctgtctttccatacttcaactattgtgcccggcgcaagctattaacgttacaaattgcaatacatattattaggcctagaacagtagatgaaattgaaagtttaaggcattattactaggaacataattttctaagatccttaaaaaaaatctgcattttctttttcctcttttcttcagagttagtgccatgtgatactcattttagggacttaaaagtttcatcaaccttaggtttgaatatttaacttttgcttatatatggataccacataggttcagttaactaaagctgagacttgcattttagtcttatttctaccaaacctagcttggaactatgaggtccaaagtggtcactaactacactagaaaggtaatactagtagttagacttgcaaattcccagttgccccaagaaaaataattaagtctcttatattgatcagatgcagtcttcacaatgctcacctttgctttatcatcaaaaacctcctgccagacaatggatcccttgtttatggttgcaataatatcc

SEQ ID NO: 115961 - DNA, 1265 bp, Homo sapiens
tttaaatgccaagaggtagaaattaaaggtaggcatggtggtcacagtccactaaaaaactagtattccaacttctattccctggcacactactaaataggcaaccagggatttaaaaaatggtttctggtgtccaggtaagtttgcataaaaccaaaataaaactgtttaatactggcccactacattaatctatggtgctaacacgtgctgtgaaccgtgggtcagggctggggataaagtttgcaaccatttttttggggggtgggggaagaggaggggccatcttttttgtgccacaaccattagcatctcccaaggtcctgctaaccacgggcaagaaatgttgccctaggataaagatggaggaaacaaatcttgatgaaatattgcctctgtgtataagctttgaacttctgaacttaattcaatgattttaatttaggtactcagaaacagaaacaacttttcattggtggagaagcttgtctatggggagaatatgtggatgcaactaacctcactccaagattatggtatgggatttacctgataacatttaagaattaaggtgccttagctttccttctctgtctaaacacaaaagtgctaaacataaatttaaactgcttgcggggggatgtgtgatttaaattttaggcctcgggcaagtgctgttggtgagagactctggagttccaaagatgtcagagatatggatgacgcctatgacagactgacaaggcaccgctgcaggatggtcgagtaagaaatctattaagtccagtgtgatttttaaccttcttattcagtgttagtttcttttgctataaatagaaatgtatgttacctaacaaatagtaattagaagaaaccaggaattatttttttgtaagtaataatacctgtaaagatatattcagacttgtgactgttttatagatacaaaaaatgttggtgtaacttagaactccatcttgagttgctttaattttcttcccttattttcagtaatgctgtgatttagtgattctaatttaagtttctaagatgacatgaatatcaatctaaaatatctttatgaatgatatcaatctaaatcaatctaaaatatctttattcatgttatctacagacgtggaatagctgcacaacctctttatgctggatattgtaaccatgagaacatgtaaaaaatggaggggaaaaaggccacagcaatctgtactacaatcaactttattttgaaatcatgtaaaataaga

SEQ ID NO: 115962 - DNA, 1048 bp, Homo sapiens
tcaagccatgaatcctcaagatcaaaatacactgctcaaccggagaagtggtttgacctaaatgttttagtttttggagagaaattcaggagcacctagctacttcattttcagtaagaacaatttttattgctttatttattggacgaataaagtactgtttcagtacattcagagaactagataaaagatataacttaagctttgatagtggcactggagccacccgttttaatttatataatgagaaatgtgctttgatgtttaaagccactgtacctgaatcatgctgttcatctatgaagttattactataagtagccttcagaagagtggtatcacaaagttgtgtttcttttgtgtccttaagcttgtctcacaagaaagatgccaggcctctaaatgtaataagatagagggtcaaaggttcaatcaataaaaatattttattcaaaaaacagtctaatatcttattttacatgatttcaaaataaagttgattgtagtacagattgctgtggcctttttcccctccattttttacatgttctcatggttacaatatccagcataaagaggttgtgcagctattccacgtctgtagataacatgaataaagatattttagattgatttagattgatatcattcataaagatattttagattgatattcatgtcatcttagaaacttaaattagaatcactaaatcacagcattactgaaaataagggaagaaaattaaagcaactcaagatggagttctaagttacaccaacattttttgtatctataaaacagtcacaagtctgaatatatctttacaggtattattacttacaaaaaaataattcctggtttcttctaattactatttgttaggtaacatacatttctatttatagcaaaagaaactaacactgaataagaaggttaaaaatcacactggacttaatagatttcttactcgaccatcctgcagcggtgccttgtcagtctgtcataggcgtcatccatatctctgacatctttggaactccagagtct

SEQ ID NO: 115963 - DNA, 1068 bp, Homo sapiens
gctactgtaacctcaagattcatcagaggctccaaaacttgcttatcagctttcttcagagcctaaagaaattaaagaatgttaacttatctttcataaataaaaacttaaaataaatacagcctagagctcatacaaaaagacataagcttgctttaactctctctttaaagataacgttttataagatggcaacaactataatatttgcttgtataataagcatgataacagaatttatagatcttttgtatggtatgatgcaaggggatgtttataaaaaatgcctgtgaacatgtggtcagagtcacagaaagtcctcccctttcaaagattcatttgttcatatttaaacctcatgtttctgttcctgatgtctataattacagtccatgccatgccacatgccagagacagcaataaaggggagagcttaaaaaaaaggaaaaatttagtgcaataaggtagtagaaacattatgtaaaatcttttcttatttagaatcttagatttcaaaggccaagaagaacatgcataaagaatgtggaaactgaaaatgtctttcagaataaaataatggaattgaaaaggatgtaaaaattaagagaaaaaaatcctaaaaaagattgaattctgcatatctaactagggcataccatgctcacagaactgttcttagtcctcttttcacaatcttttcctgtcaatattacctatctggagagcttcaaaaacgacttcaacatggcttcctcaaaaacgttaaatcctatgcagcccatagtttgagtgctccagtcctgtactccattggcctgctttgggatagtgtctgaatatccggcagctctccaacatgtcccacactgagctcatcattttcttctccaaacacttctatgcacatccctttttctgatgatgacatcagtagtcttcagttcacctttgacttccttttccccaagtaagctgtaagattttttttgtttttcccattcctattgctggcatcctaggtcaaacttagtccatttcctgtcctctactatctcttccctattcaaa

SEQ ID NO: 115964 - DNA, 1046 bp, Homo sapiens
tcattaaaagaattaaaaacacaagagctgaaacatgttattgagccactcataagttagaatgaaaaaaagtattttttcttttgaatgaaatgtgaattttgaaactgtttatttttgagtgtttaaatgtgatatttattgtaccctatcttcacataacatgatttatgttttcagagagctcacaatctaaagtagaattgacccaccaataatagcttgcaaacacactcaagcttttcttgttttttgaaatctttctaaaaattttcctacttggatttctcatttttcccttaggattttgtttaatatggatttaatttatttgaagaaatggtaactcagatttacatattttatttatgatcagttcctctgttagactatcaaggttaaatcacaagtatattcatttattcaagaaatatttttaagcacctgttttaaccacttttcttgttgctggggatttagcagtatttccaggggtaatgcttatatggattttacattctagcgaataggagacagataaactaataaatatctaacatccagatagtgatgagtgttaaaaactaagccaacaaaatgatgaaggtgtgatgaggagtgctggttacatggctggttagagaaaacctctaattttgagcttctcgccaagaccagtacacaaaataaatgctcatttgtatctctgctctgtagctacagactgcaatacatagagtgacactagctcagacagcagtgcctgtgctttgtggaagtgccctgaaaaacaaagggatacagcccttgttagatgctgttactatgtacttaccttcacctgaagagcgtaactatgaatttctgtaagtatgcaatcacatatattaaaattctatagctttgaagaaacaagtaggcaaatacttttatgaaaagtagttaaatcaccatttttgaataatagtggtgagtgttattgcaaatgatgtaataaggaatcatagtaatttttgcttgaaaggaacatttttcatctcttgtaa

SEQ ID NO: 115965 - DNA, 1048 bp, Homo sapiens
tacagcaacattaattctcttagtttgactgtcttgggagatctggtgaacattcagaatattagaggaaaaccagatgaaacttttttataaactaaaacctccagatttatctaagaaaggccaatccattgtatgtgctatcattgtaagttgcacattttctttgatttcttttgagcacactgatagcatttaattaagatgctttatcaggatctggctttctgtgaatttaggaaactcctaatagtatctttagttttccatttcttttcctttcaaagaaaaacatttttctttatctctttagaagaagtgaagagttgcttggcctaggtaaggtagctgtcttgaaatatttgaatattgtctgtttatggtgtttggacaaattaatagttaatgaaagtaaatgcaagttatagaactctaaaacctttctttataggttgcagatttggatgatgaatttgctgacttggttttagaagaatttagtgagaattttgatttgttaccagctgaaaaggtaaattttattattcaatggctttcacaaaattttactaattggatgtagtttgatttctctgcctttgatgtgtgtgcattttttttttaaactttgcatattattagaaagtggtaagtttaaagttaggagaacattaagttaaagtcactactaatacaatacttattggcagtgatttattactttcatatatactttacaaaattaaaaattgaatctgtttaacttctattgagtctgcatcagttaactactcattctctgtagtcttttcattctgataattcctctaaggatgtttagggaaatcacagaaagtttatattaaaatttactgttgtttcaggctactacaattaccatttttctgagaacattattttctgaatctttttaaatttttcatggaaactcattacagttctttgtttttgtcttttgacatacagtaagccagagaagaggcaattaaaatattgatagtaactgaattatgacagatttcttgaa

SEQ ID NO: 115966 - DNA, 1593 bp, Homo sapiens
tgaaaaattccttttatggcaaagttactaatctagctgaaaaactttttctaccatgaggatttacttagtgaaagagtaaaggctctattaaaccaaatattttaggaaagatttttcttaaggcaggttaaactgtgtcaggtagatattgagcacgaataaaatacacttgctattaagactaaactgtatcatctttttcctggctagatgttgatgatggagacacagtgacagatttcatggcccaagagcgagaaagaggcattactattcaatcagctgctgttacatttgattggaaaggttatagagtcaatctaattgatacaccaggtatggtacgattccagtaacacagagatgctgcgtcatttggagtttttttgtttttctggggtttttgttttgctttttattgtggtaaaaaaacatgtgttgcaaaatttaccatctcaaccatttttaagtgtacagtttagtagtgttaagtataatcacattgctgtgaaacagatgtccagaacttttttatcttgcagaaatgaaactatattcattggacaacaattcccttttgccccctcccttcacccctgctaaccactgtgtactttgtatacctatgtatttgactagcttagatgccttatgtaagtggaatcataccgtatttgtcctcttgtgattggcttatctcattagcataaagccctcaaattttctcatattgtagcatgtgacaatgtgctacaatattttcttttttattctgtgtagtattccattgtatgtgtatatcacattttgtttatccattcatacatcagtggacatttgggttttttccaccttttgtctaccagtgctgctatggagggtgtgcaaatagctctgagactctgctttcaatacctttatatatatacacatatatatacacacacacccctccccaggagtgagatgtgagattgctggatcatatgatggttttgttaaaaagaaggcattatacgtcttatctttttcttaggtcatgtggactttaccttggaggttgagcggtgcctaagagtgttggatggtgcagtggctgtatttgatgcctctgctggtgtagaggtaaataatattgccaaagtaaagggaattagaacagcatgattttttaaaaagtagaatatgtcaaatttagttaactgtaaccatctatttggtaagttcacataaatcaaataatggtaaaaggaaatcagaatttatattgagatgtaatctacatgtaatctcagatatttcatagtaaaaggagaaataggaaagctggtgtcaagaactttgagagatcagagattctaccttacttttgagctaacaagttagcctgccatagtttaatggattctggcagaagacactgtggtgtgagattgattatacactgttatttctgtttctttctgggtcactttatttcctaatagttccatttttctgttgttgtaactttagataaatttgacgtttaatcattcaaacagattgcattacttacaagattgaaatgtgcttgaataggaagttgct

SEQ ID NO: 115967 - DNA, 1054 bp, Homo sapiens
cttttatatattttttacatgatttagtttttacatggtatggtaggaaaatcagagtatacaaatgaatcaataaattttactgccaattagaaattaccaagttaatatgtggatgcttagctttttatgcttaattctatacatttacataacaatgcattttggttgatacaatgttttgtaatttcaataagttgatttctactgtatcgccatatctttctttaaacattacattgacaaataagggacattttaaacctaaaaaccatatttctcatatttaatcagaattttccattttctgaatgatgcattgaatttttggtagctaaaaatattgttccaactttttaaaagtaatacattttaccatacatattacatatgtctaacttacatatgccttgctgacatgtaatacataagtttagttttttgattttgtatatttattttttcagacagtaacagtttggaggatcaagatgttgaccaacttgaggatatttgcaatgagtcatcagacaatacccagtgtgtatattaatgtaagcatttcttataaaattaagtgtcctttaacaacctcagctcctttactgcctaaaatgcccagtatatctcatcagctgttgattccaaatttagttgagtcataacctttggaaatcttcaagctaaactaatttgaaagtaattaccttaatttattaagaaatataagaggaaattaccttaatttaaaagtaaaagaacagctgtagctaaatactggtctcatggagtactaaaatgccagttgtttttgaaggaggggtagggttttatatctaagaatgtcatcacttaatgcacatctttaaactactaacaaataatgtgctttgtaatattaagtatccatggattgagactcttatgaaataaagtttctgttaatatcaaagtacaacataattatacaatggttgatacaactacttttggctgtcttctgcagagctgttggaagccagcttcttcggcagtctgatatttgtctcaggaa

SEQ ID NO: 115968 - DNA, 1261 bp, Homo sapiens
agggaattttagggggaaatggaaattctttgtattttgattgtggtggttacagaactgtgtagttaggaaaaacttagaactgtatacctaaaaaggacaggttttactgtgtgtaaattatgcttcaataaaactgacttaaattttttaaatgtgaaatgaaggtgttattaaaaaagcaaattatgtcaaggaaaaaagatactgtaatcagttcatcccttttgtggtccagtagattttggaccattccctaatgagattattagagatgtaagccctgatgcctcatatcattcaagaccaaaatttaacttacatcatgtgaataaacttaatggtgcaagaatcatttaagtaagtgaacatttggatgaaacagggtctttgtgctgtgtaaaagaaagcattttagaataattgtcagtactttaaaaaattaaaataatatttcttccatcattatagccacagaatgaatatattgaattacaccgtaaacgctatggataccgtttggattaccatgagaaaaagagaaagaaggaaagtcgagaggctcatgaacgttcaaagaaggcaaagaaaatgattggtctgaaggctaagctttaccataaacagcgtcatgctgagaaaatacaaatgaaaaagacgtaagtggtctcatttatttgtcataacaagttaacatcttttgagtaatcattattaaaacagataatcttgaatcttttttccttcttggtagtatcaagatgcatgaaaagagaaacaccaaacaaaagaatgatgaaaagacaccacagggagcagtacctgcctatctgctggacagagagggacaatctcgagctaaagtactttccaatatgattaaacagaaaagaaaagagaaggcggtaagcaataacaattgaagtctttgttttgtttaggagaattacttaaattcaaatttgaggttcttgtttctcggtttaatttcaaacatgaagtacagctattattcccattatttagatgttgaagtctttgtaaatttaataaaaaacttgctttctcatcataaggttttaaaatttaagttataaaaaaaatttattagaatgccatatgaaattaaaaagctggtaaggagtgaatttcaaattcaatatttgtcttcctgtttgaaaacccacagtgctatgcagtcataaagaaaaatacaaatgcttcttatttgtgctgccctgtagtgccaaacttggttaaa

SEQ ID NO: 115969 - DNA, 1037 bp, Homo sapiens
gtagctgggattacaggcgcccgccaccacgcccagcttattttttgtattttttagtacagatagggtttcactacattggccaggctggtcttgaactcctaacttcaggtgatccacccacctcaacctcccaaagtgctgggattacaggtgtgagccaccgcactgggctaaagatttttgactagtggaaaaagtactaaataacttctgtcaataaaataacaaaaattgcataaaaatatctttcaacctgttccacatcaatttaaagaatttcaggaaatgataatgttctttatccgatttaataaagtcaactaacatttcggtcattacactcttccaaggacttaccattggcctgatgaatctttcatatttaggtggttttcttgtaaagccatctccaacaaagcacactttagtaaccattctcttccatgccttcttctttctctttcctgttcgaataacttttaatacttctgtttctccctgggcacgtactttaggcagagggacttcccattttccctaaaaatatgccacagttaaaagtttatattgttattaaaggacaatgagaataagtcaaatatgttttagttgtacaaagtaatagatctattttttttgcttgaccatcaacacatttttggctcaaccgtcttctagaggtctgtattgtctcataagctgcaaattaaacagaacaagtttatatatcatgggtatgttaaataaatggttggcttaagctaaaaatcttaatgctgtgttatgggtgagaaaataccacctgtaatgtggtggttttttttttttttttttttagatggagtctcgctctgttgctcaggctggagtgcagtggtacaatcttggctcactgtgcagcctccgcctcctgggtacaagcaattctcctgtcttagcctcccgagtagctgggactacagacacacaccaccacacccagctaatttttgtatttttagtagaggtggggtttcaccacattggtcaggctg

SEQ ID NO: 115970 - DNA, 1079 bp, Homo sapiens
caaaaattagctgggtgtggtggtgtgtgtctgtagtcccagctactcgggaggctaagacaggagaattgcttgtacccaggaggcggaggctgcacagtgagccaagattgtaccactgcactccagcctgagcaacagagcgagactccatctaaaaaaaaaaaaaaaaaaaaccaccacattacaggtggtattttctcacccataacacagcattaagatttttagcttaagccaaccatttatttaacatacccatgatatataaacttgttctgtttaatttgcagcttatgagacaatacagacctctagaagacggttgagccaaaaatgtgttgatggtcaagcaaaaaaaatagatctattactttgtacaactaaaacatatttgacttattctcattgtcctttaataacaatataaacttttaactgtggcatatttttagggaaaatgggaagtccctctgcctaaagtacgtgcccagggagaaacagaagtattaaaagttattcgaacaggaaagagaaagaagaaggcatggaagagaatggttactaaagtgtgctttgttggagatggctttacaagaaaaccacctaaatatgaaagattcatcaggccaatggtaagtccttggaagagtgtaatgaccgaaatgttagttgactttattaaatcggataaagaacattatcatttcctgaaattctttaaattgatgtggaacaggttgaaagatatttttatgcaatttttgttattttattgacagaagttatttagtactttttccactagtcaaaaatctttagcccagtgcggtggctcacacctgtaatcccagcactttgggaggttgaggtgggtggatcacctgaagttaggagttcaagaccagcctggccaatgtagtgaaaccctatctgtactaaaaaatacaaaaaataagctgggcgtggtggcgggcgcctgtaatcccagctactagggaggctgaggcaggagaatcgcttgaacctgggaggcggaggttgcagtgagctgagatcacgccattgcactccagcct

SEQ ID NO: 115971 - DNA, 1027 bp, Homo sapiens
ttattgtgtttaagtgagccagttgtgagctagcatagtggcctggtatatataaagtccttagtaagtctaagtgtagatgactagacagtaaaaatctgggtatgttgctaggtagctattacagggtgaaaaaaaaaaaaacttttcagaggctagctgtggtggcctgtaatcccagcactttgggaggctgaggtgggtggatacgttgagagcccaggagtccaagaccagcaggcaacatggcgaaaccccatctctaccaaaaaaaaaaaaaaaaaaaataagctaggcatggtggtgcgtgcctgtagtcccagctactcaggagcctgaggtgggaggatgtcttgagcccaagaagtccaagctgcagtgagccaagatcacgccactgcactctggcgtgggcaactgggcaagaccctgtctcaaaagaaaaagaaattcttaagtatttgtgtgggtgttttccccacatatttatactgtaaccatcagctttttactctgtaaaacatattttgttagcttctttaagatgacattattcaaccatagttttttggagatggttgaaaaagataagcgaaaacgaccactactcatcactgttaacattttggacgtaaacattcttatgttgtgtttgacttactagggcttgcgtttcaagaaagcccatgtaacacatcctgaactgaaagccaccttttgcctaccaatacttggtgtaaagaagaatccctcatccccactgtatacaactttgggtgttattaccaaaggtactgtcattgaagtaaatgtgagcgaattgggccttgtgacacaaggaggcaaagttatttggggtaagtgaatttttgaatacagggctgctgtgttctgcagtactaatagaaatactattcaagttgatgtattaataaaatatacagcaaatttttttaatgcagtagagctaaaacactgtaaatcagatgtaaatatttagtaaaaaatactttatagaaaaagttgt

SEQ ID NO: 115972 - DNA, 1183 bp, Homo sapiens
gccgaagtgagcactaaaagactttctttagacaagtgtagttttttaaagattgagctcactggctcaactcttgatgtgtgaatatagttgagtttacaaaaaatgtttattaatcatatatgaccattgggggctaacagtataaacttattcttgttaaacttgtttgggttaaatagtaagtgaattgtaaacaatttagaagttttttgttcagcacacaagaacacttctgttacagattctctctgacagaaattgttattttggggtttatagattatagagggaaaagttagatcacttggaaaaacctaactctcatgttcagtaacttgagtatagaatttataccacaatttatcttcaataaggaacctacatgaacttaatcagttatctgtagtttttgcaaggcattagaaaaaatttcacaattacagaggactgaaaatgtgatttcaaccggctagtctagttgttgaatgtccagtcacattacacatagtcctttgtgaacttatttgtgaagggagttcactttttatgtacatacgtgtatatttccttgtgtaatataaagcagatggttattagtattttagttctttcaagtttaaattattcaattgctagacatcacagaaattagtatatttaagaatttattataaagctcctctacaacttttaaaggtgagagggtctattatgatttttttataaaatcaaacagcatgatttagaacgtcagtcttctacttaaaatgtgtctatattcatggtatttccattcagtgtagatggtaaggaaaacatctagtcattaaagatttacttatagcagactccagaacactacctacaatggggtttcagtgactagaaatcttgaaggtttatgattgcatcaaattgagcctgtactaatatctaaatatctgctcttatgttctgctttatcccttgggattaccttctaaggtttggtcacaccagcaaactgaaacagatcttaatgtacataaaaaatttatactaatattactcatctgtgttacagtattttgaaaaatgtttcaggtgtcatctagtcgtctttcatgggtgtgattagttacaaatgttatgcttatgttttcatacttaatatcaagctttctttgtaccttacaagata

SEQ ID NO: 115973 - DNA, 1629 bp, Homo sapiens
ttataaggatcacagaaatcttttatactaagggttttaatagtaaaacttggtgagggttctagaagttttaaatttcaaaactaatcaccaattttttaaaatgtaggcatgcctaaacaaaaataagtgtcaataaattagaaaaaatataacttcaagtaaatgagagcacaaaaacagaaacttacggtcaaaggttcatgaagatattttggttttggcctcttaatcctagatatagatgcagttttttcctttgacttcactatctatggaaaggtacacataaaatctgtttctgattcattctatcatctgatgttaacagtactgtcagggatttaactgtggcatgtggggactaattatttaaaatttcatttgaagtattagtttgctgtaattttttttgtctgcatatgtgcagacgcctagaagtttagactttcacctttaatcaggtaaaaatcacaactatactttggagacatggtttaatttggacttctggtcctgatcagatagataaattaagctggagattttacttttatcccaacccagttaacatctatatttcagaagtatgaggctccttcctaaggcatctccttaaatcttgccacctccctaattctacagtcttatttatattcccccacagctttcatctacttctgtaactcatggagtgattctccaatcaacagatcttcctgcctgccggcttatgcccttgatgtccatttttgggtaggtttggaggtgcaccccacaatgttagacctatatggcaggagtaaaactgcccccagtgttagacctatatggcaggggtaaactgcctttgggggagctgtggttacaagggcttcaatcatattggaggcttcaatcatcctttgatttgtactgagtactggttgcaagctggcctgttaagtatatattgtgttgccataacaaaggcctaggaaaatttgaagaaaaaaaacactgaactgttattttttgtaatttatttaaaaatggacaaaatggttattagaatccaaagataatctaaaaacagttctactctttggaaatattatgtgtactcaaatttgcacttaagttggagaatgttttgagaccatttaaattgttttaaaaatagcttgatcttgatccttatgcaaaagaaactaagactttgtgtcattatttgaggtagctaaggactgatgttgaaagtgtattcagtctatagtaagctgatgtcaggtcagtaaattttgtttggggatgttggtattttcgatcaagttaaaatcttaaagcagacaaaaatagtaaacgctcctatttgtgttagattttgaacaattgtattaccctatattttctttaattagtcaaaggtaagccagattatttcattctaaatgaaaattaaagcactttggccatttattttttcaacaaatgctaatactaagtaaaaaaaaaaaagtatgactactattagtgaatctaccaaacatttatgctgttttatacattttatgagaaacttctgtcaatatcacaaagggaaatactctgttaagattcagtaaattcttaatctttacatgtttcatt

SEQ ID NO: 115974 - DNA, 2807 bp, Homo sapiens
tcttttttgaaaatacatccgatctcatgacttcaactgttttatctatgggaatgaccagtaactctagattatatgtctctcgactctggtcatttttatgagctttatattaccttctgtgtgaactctattctgtgtatcatatgatataataaaatagatattttatagacaatttttattttagaacaatttaataaattttttactatagaaaaattaaaaaccgtgatttctcttttggaaaaatttccttgatatgcttttaggggtcctacacagtcaaatctatttgtgaacacttgaatgcatcagttttataattttaataatggtaataaaattccccttaattattagaatgtcaggattagaaatacttgatattaaatagaagtaaatggataaacattgggagaattttagaaattggagagttcatgttatcaaatagcatttccatactttaatgatatgcaaggagcaggactgttcagaaatgaccctggtgttgactgagactagggctctctcctcccagcaagatgcagcacccaaactgaacttcccataagactggtagtgcttcctacctctggcacagaaaactgtaatttcccatagattccagatgctgaacagctggtgttatgtaaagagctagcatcaagtctatactctgtctggtgcctttttcctgaaaaagttctttccctgattgccctctaagaaggaggaacaacaagtgggtagggtcttttcattgaatctccgacccatactgtgtgtccacagagcatcctggtcctgccccatctttccttaagagcagtgggagtacggggtactcaggattattttattttgctgatattgccttatgagtttcctccttcccccagtaagactgttctttaacccatgtcctataatgtaaatttgagtcttggtgtaggataggtaggcactgagaagggacccgtcatgcatgacaaataagttagtttgtaatcatgtccttactttttccctctctcctcatggtgtaggaatctgaattagagcctatgaatggtgagataatggacgattctcttaagacctcacttataacagaagaggaagactccactagtgaagttttagatgaagaattaaaattgcagccttttaattccagtgaagactctacaaatcttgttccactggtggtagaatcttcaaaaccccctgaggtagatgcaccagataaggtaagggggcaatgagctattttttaataaagtttaccaatgttggtgacattagcgaggagggtgcatggtatatatatttgcttccacctttacatgtacagtgctttaggaagattaacttttatactagatttgatattataagaaaatcagtaatattctataaattcaaataataaccttattcatatctgatatgtggtaacaaaatgagttttattacttttaatactttgtagttaggaaatgcttagaaaattggataaagcattatttaccaaatatttgagtacctatatttgttacatagactatgaccaaaacagtaatttatatttgttttaattaggcagacagattaggttagtgggggaaaaaacttgttggagtattttaaaagaaatttaattttgttacttttgaatattacaacttatggctaaaaaactgttgtatggcattattagtgtctcacctaagcaaaagaataaaacttccattgccctaacttatctaatgaaatcgtagtcaaacgtagtgtggtagcgcagtgaagtcccaaggtatttttggttctggctccagtaacaccaggaaactaaaaaaactgagttgattcatggttttaaagaatcttgatatgaagcttaatgtgtcttaattatgaaataattatttcattatatcctcaaagtaataacttagtattaaaattaccatgtgaaacaattttgaagaaattgagttgtattcagaatatatacacatatagcagaacagaaattcaaaaaaatactcgattttgagtaatgaataccgaattaaattctagttcagtgtcactgcatattagagcctgagaatttatttttagaactgtagtacaagtttatttgttgaccaggtttttaattttcagaccccacgtatacctgactcagaaatgttgatggatgaaggcacatctgatgaaaaggggcacatggaagagaaattgtccctacttccaagaaagaaagcacatcttgggagttcagacaatgttgctactatgtcaaatgaagaacgatctgatggtggttttccaaactctgtgatagctgaattttccgaagaaccggtctctgagaatttgtctcctaatactacttcctcattggaagaccagggtgaggagggggtatctgagccccaggaaacatctactgctcttcctcagagttctttgatagaggttgaacttgaagacgtgccattttcacagaatgcaggacagaagaatcagtcagaggagcagtctgaagcatcttccgagcaactggatcagtttacacaatcggcagaaaaagctgtggatagcagctcagaggaaatagaagtggaagtgcctgtggtagacaggcggaatttaagaagaaaggccaaagggcataaaggacctgctaagaagaaagctaagctgacctgaaggaagaagaaagtggatgataaatcctcttctttgtaacatagttgttgtttttaaaatatggtaattaataaacagca

SEQ ID NO: 115975 - DNA, 1037 bp, Homo sapiens
gcaaggtcaggtactagagttggggagaggataaaattacaaatatgattgtgtttataaaagtttgagcttataaaagtttgaattatatcgaagataaaatagagatgtttagtaagatcttttggtgcatttaaagtataagttaatttgtggaattaaacacacttacatacacaaatgatataagatctaccttatagaaccagttaaaatgctttcaggtgcaataaaccttcaggggcacccccattttagttagaggggtaggaattactaatccagaaaaaaaatttgatgactgttgatctcacaaagttctggaaaaataactaaattcatgttttttaaacactagaaaaaaatatataaacccttggtaactaagtaaactcttcatctgggttgatttctgcagctttaaagtatttatccccagcttcttttttctttcctctatccatttccatttttctctttagtatcttcaatcttttcctttccacagattctctatttcttctttcatatgttcataaatttcttgaaaaaatctttcagctgtttgccaagtctagcaggcaggtgaataagtgaaattatattaccaattttgttttctttttctttttgagacggagttttgctctttgcacccaggctggagtgcagtggcgtgatcttggctcactgcaacctctgcttcctgggttcaagtgattctcctgcctcagtcttccaagtagctgggattacaggttccccccaccatacccagctaatttttgtatttttagtagagacggggtttcaccactttggccaggctggtctcaaactccttacctcaggtgatgtgcccgcctcagcctcccaaagtgctgggattacaggcgtgagccaccgtgcccagctaattttgttttcttaagttactctgatttagctcctgcttcctctatttcatgaaatgacatatgttatgtcagctcactgcagcctccatctcctgggtttaagcaattctcctgcctctg

SEQ ID NO: 115976 - DNA, 1939 bp, Homo sapiens
ttttctggctagaatgactgactgaatcgtcattaagcaagatagggaataatattggggaaagataaagttcattttgggaatgattgagtgtgaaattggatgggacatccactgggagatatttcattggaaataaagctttggaaatcaggaagaaagtttggaggcttaagtctcatatttgaattcatcaataagcagatactgaagtaagcatagtgaagggagagcatgtggactgagcagagaaggtggctgaggacagaactaggagacactagtggacacactatgacatattagatgacttgcatatgttctcagtcttttaaactgaagctgaactataacctttttatttttaaagtaaatgttgttaacaaaaagtgctatttggaaaacattttacaagtttttctttgaaactataagtgaaatagatccatagggagaaaaaatagtctaaaactttgggtttgaatctctctcttttttagattgattctctaaaagatgcctttgcaagcacttccgaaggtaagaaattcaactgatatatcagtaagtatttgagacacttcaaattagggctgtgtgtgtgtgtgtgcatgcatgtgtgtgtggtgtgtcaccctgagaaagtgaagacttaaccagctctaaaatctagatctgggttctcatgccaccactgccactgattttgctatgtgaacactgagtaagctattgtacctctctcttccttgtttccttagctataaaatagggatggtaatgtctacgttgtttattttccaagattattgggagggaatgcaagtgaaatacaaaaacactttgcaaagcccaagataacatggaacgtgaggaatgacttacacagttcatataacttgacaaagttacataatttagaaaaagatgtaaattataaaataattttcttagcctgacataagtgaggggagggtgaacctgtgtaatgtggaggatatgtgtaaactagtgtagttcttgcatttctgtgtattttaataggtagtccttttaatatataatcaattaagtgcagttttgctgtttttctcctcaggtcatgataaaacatctgtttccactcatactcgaagtggtaatctaaagcggccaaagattggaaagcggtttcaggattctgaatttagcagttctcaaggtgaagatgaaaagacctcccagacttcacttacagcttcaataaacaagtaaataattgttgattttactctcattttttatttgtacttttattttttgtttatacttttatattatcaatatttaatattttatatataatatatactattttatattgtttattatacttttggtatacttttaatatacttttaatatactttttggtatttagcatttaaggtagaggcgattacattgtttgtgtagcagatgactttggtgtaggagtttgtatttgaattatttatatttgaattattgtacaagattattagttgtttatcagtgctaagtgttgccttgacaatgctattgggagaagctgctaataagagactggcataaactcacttcatgtgtgacaatccaggagactattctagtgattatattatcccaaattagtcattatcaccacgctgaatttgatggtatggttttaagtaatgctgagatatagtcagtttttttccccccgcattcaattcttttatttaattttctagtggacagtttacatatctccctgtcttttaagttagtgtgacaattttccataataaactacttaaaagaaaagctttggtcaagaatggaatgaaattgcaaaaaaaaaacaaacaaaaacattgcttttaaaaaaccaacattttcaccaattttatattcaaacaaaaccacatgatattgg

SEQ ID NO: 115977 - DNA, 1254 bp, Homo sapiens
ctgtctcaattagcatgagagttgactattcgagtggcaaatttgtaaacatttttaagaataacaatatatgtaaggagttagattcttgggatttttttttcctacttttggaaattcagacttgagaataagctcctgttctactgcagtccaaattcctgagagatacacagattcatttagtattggccagttataaaatcaaggaaagtagaaaatctactcttcctataaatgtaacgagagcaatgatttactttaatactaagccaaataattttagatgtgtcatttgagtgagaatatatgacagtggtactatatcatacagttgacagcataaattagattttagaatctaacctatttaagattttagaaattcatattcttcatattactttaatgttttaaatagttgaaggaaatgtttatcatattaaactatttatatctctttttgttagtagccacaaatagtttagtttatttcaactacatgatttattctttaggtgatgatggtattgttacctgctttttcctattatttatcttacactttttgcaccttttatttattcatctttatctacattttaaccttttcttgttggactacaagttggttgaagcaagatatttgtcatatgatttatcacaattgctcccttgcttttgttctataaattgaaggctgtgtgcccactatattgtggagttttagtaagcatgtaatggatgaataaagtagttactatggcaagcattggacatataaagatatggttcttagacatgggagaactagatggtccattgttggaaatatataatatactatagcataataattgctttattatagcaagtaattggaggtacataggagaggatgacttttaaagggtgggtgggaattttcttagggcattccagacgatagcatgtaaaaaagttacagaggtgtaaaggaaatggcatgtttgatatgaaagaggtatttggtattgaataggttgagaatttgtattctaagcagtggttggccattaaaagttttttcctctttttttttttatcaaaaaaatggtacaatttgtgattcgaaagtatcactttgtcatcagggtggaggggtgtagatgggatgtgattagaatgagggatatgagtgaggaggctgttggaatagttggttcaagagactaaagatataaactaaagcaatggtagtacaaaggacaggac

SEQ ID NO: 115978 - DNA, 1041 bp, Homo sapiens
tccagagtggtagtgtattataatgtgattgttctagtaacagactctcttgtctaaggtttgaattttggtaatgtattaacttttgagtccttagtaacaaggagacctagaacagcccagtaggaattggtgggtaagaaataaacgtagattactcaaacggcatagaataggcaccagggggtccaaagtaccccttaatctcatgcacttctccccaaagctactaaatacttaaaataactatttaacattgtatataatggcaatgttgcattataggatattggtgaagagaacatctcacacctagattttcgtgacccttctgtccaggctgctcttcagagcttttaggaaaatcagtacaatgttagagttaaaaccaaatactgattcggttacagtttttaaaattcttctatacgcagcactttctcaaaatgaacctaaaagacctatgtctggagaatatggtcctgcatctgttccagaatacgaagcaagaactgaagacaatcagtctagtgagatgcagctaactgtaggtacactgtctatatgtttattgttgtatataaaatttttgtgtttttaaaaaatagatacaggttatatttgagttttaaatgtcatagttcattcaacaaagctatgtaatttctactgtgttagttttcctggcatcttctgttaatattactaaggactttaattttctttgaaaaataattttaatgatgttaaaagtatgagctaatttaagggtaatttagaataaacataaaataatatagaagaaaataaaaatctataatcccactattcagatatagccactgttaaaatttttgcatatatatttaatatcgcatattataaagcatgtatctgtatatattgtatttttatttttattctcttggattgcttctaactgctgttctccattaatgtaatattggaagcattttctatggcattaaatcattaaaatgtgattgttacatagcagcacactattctattatctatttt

SEQ ID NO: 115979 - DNA, 1044 bp, Homo sapiens
gcccaggctggagtgcggtggtgcagtcacagctcactgcaacctcaacctcttgcgctcaagtgatcttccccctttagcgtcctgaatagctgggactacaggtgtgctcagccatacctggctaatgtttgtattttttgtagagacgggtgggttttgccatgttgcccaggctggtctcaaactgagctcaagcgatccacccacctcagcttcccaaagtgctgggattacaggcatgagtccccgtactggcctgtgtatcaggaacacctcactatttgatatcagaaagttctgagtgttggtgcggtccctgtgaccatgtagccctgtgtgtaggaagtgagactctgtttctgttctattactgccctaagtatgtttttattagacttctttggtatccccgtctttgttgacagcaaagatagggctattaaatgaacattttaccaggaaaagatgagacacatttctttcccaagagtgtaattatggcttccctcaccaaatgatgtaattgttcttaaagtgttcaggggataacactaagctgcctttttttttttttttttaaatgtggagactgaaaagcagttgaagtagtttactatagtgagggctgtgattagggttggtaagaccctggatctgggcagctggaagcagaaagaagatggtgagtgctgaaagacatgctcgggattggtacattggggacctgttttttgcccgatttagaattttgttgaaaggcagtattctatgcataatatgtgtgtgtggaaatggattgtaatctatgtgaatgattagtctcatctctgtggtaataaaatgttttgcaaatttttttgaatgcatttgaagtgctttgaattccagtatgaggtatgggagcagggagcaaagtaaatagcatcttgtgattgatgcatattataactgctgtgcctggtgtttgactctctttgtaggtgagcactcttggggagagagtggttctgtatgttctgaatcgaattatttatagaaaac

SEQ ID NO: 115980 - DNA, 1022 bp, Homo sapiens
aggataagagaataatgcacttagtattattaagtattagtaacttttggatattgcattaattcttcagtgtgccttaagattcccaaagtggtaggcccatctgctgaaggctcggagaatgtgtgtacctggttatctgccagtctgatatgaaactttgaacagaaactgaaggggaggagggaattatatccctgcataaagctgtaaaattggaggagtagatagcaataaaggagtataatatgttctcaggaacagttctgatagtgaaaagaagtatgtatgtcaagaaaataagcattctgatgtgttttaacatgactgaggtttggcatattatagatatgaaggctaaaggatggagaaggagaagggaaaatcttaatatgatggtatattgtagcttttgctgttcaagtggagaaactatgaaacctccagatatggattgggaaaagaggaggagtcaaaaccaaaaataagactacaactatgtggactctttcagccttagttaccttagggacaacattccctctctttttttttttttttgacacaggcttactgacgcccaggctggagtgcagtggcatgatctcggctcactgcaacctctgcctcccgggttcaagcaattctcctgccttagcctcccgagtagctgggactacaggtgtgtgccaccttgcccagctaatttttgtatttttagtagagatgcggtttcgccatgttggccaggctggtttcgaactcttgaccacaagtgatccacctgccttggcctcccacagtgctgggattacaggtgtgagccaccactcctggcctacgttccctcttaaatagagaaatcagtgaagggggactgctattccagtcaaatcctggccagtaaggaaaaattggttggtaaagttacagaagggtgtaaccctttttgtacttaacaaacacttaacttggagcaagttgactttatttttataaacctctctgtacctggaaactga

SEQ ID NO: 115981 - DNA, 1044 bp, Homo sapiens
ataatttataatataccataatattcatctattgcaaaccgtacaattcagtgattttttttttttttttttttttttttttttttttttgtgatagagtctcactctttcacccagactggagtgcagtggtgcagtcttggctcactgcaacctctgcctcccgggttcaagcaattctcctgcctcagcctccccagtagctgggattacaggcatctgccaccatgcctggctaatttttgtatttttagtagagatggggtttcaccatcttggccaggctggtcttgaactcctgacctcatgatccacccttccttggccccccaaagtgctggaattacaggcgtgagccactgtgcccgcagtgattttttttagatttttttttttttgaaatttatagggttgtgcagctatcatcacaatccaattgtagaacattttcattattccaacaagttctcgtgtccttttacagtgacttttatgttgagtggtttatgagagtatatttatatgtgtatttttgtgtgtatgtacatataaatatgtcttatgcctatgtgaccatatttattatgtaaggacgtatctgttaatttatttcattgcctgtttttaatacaaatgaataatgtttgaaagttttctttttgacatgcatggttaaatcagcaggttcaagttgtattctgcgggcaaagtgaaacagaaaaatcttgttataacaaaatatggcaacattgtagtaaaatttattttctgtgagtaaaggaagatggcgtttcatattctgaattgtttgttccatgttgtttgttaaagaggatggcattccctgtggatatgctggaaaattgcagccatgaggaattggaaaattctgctgaagattacatgtcagatttaaggtgtggggaccctgaaaatccagagtgtttttctcttctcaatattacggtaaggtgttctgcagtgattgtcatcaatcttttcagttcagtttatacatgaaataaatatccttttttaaaaaaa

SEQ ID NO: 115982 - DNA, 2697 bp, Homo sapiens
ttagattgtataagtcatactggttataatttgcctctgagttttttctttttagatgcaaaagttttgattgatttctagttattagttgcagcagtttattcctttctcaaccagaaggaattttcctctatgtgttctgtatgttcaggtaatttgcccatggttacatagctagtaatcctgttagtttggctcaagaatacactcccttaaccagtattttataccagctttcacacactctcaaaatcctttgcaatatagctggattttgcttttgaaggcctaaaacataccaaatacgcagtatcttcatgcttaaatgatttcttatctaggagtattttcctgtacatgaagagagaattaaaccttgagttggaaagaatacttggaacacttcccctgacatatattaagcaatctttaaccgtattagggctgcctgagatgctgtgctttcagacataccaatgtgatggaaaaaaacagacatcggagtccgactgccgggttcaaatactagctctgctgcttactagtagtgtggccttgaacaagttactcagccactttgtgtctttgtttccttttcggccaagtgaagagaattaaaacacccacctcatgggttttagataaaagttacatcaggtgatacacgtgaagtgttcggaatagaacctggcacatagtccactatcggattagtggttataacttcaaaagatggttttgcttcctgcttgaaataaggagagccaacagatatgaatcccattcaacttcctgctctattacctaatttataggccgtcctaacccatacataattaaatgtttttactttcccagaaaacagaaaaggattgctgaacagtgttgaggcccatctgagattttgatagttgtagcagttattttgtcatattcaaaaactcggctctcatagtagaaaaagatgagtggttagaggaatctagcgtttaggaccttgtgtagggcaggagtgatggaagaaaaagtaaggtaaagggattagttgagctgatgtagtacagggcccaggttaattagggaaggaaatgatgttagaaaacagaaaagggagggatcaagagaggaatcataataaggttcagaaataaggttgagagcattgctgattatgttgcctggatacctaacctattctcggtgttggagagaccattgtgagagttaggatcatgaattggattggttgagataattatttttttccctgagaattctttcagctctatagtgtacatacttctttttgggtctgcctctctccacaaagcccccaaataatagcagtaacctgtaagaatcatgaaataacttacgagctgaacatgtagaatatgttcccatcttttcagaatatagttggcatccagtaatcaacaataaatagggaaaaaatcacaataatataaatttgttttctaactcttttcatgcttttcttaaggttatccattctgtcaaatacataatttttttgggaaaaaggaattattaaaaggtagatacaatatagcagatgctcatgatcttagatctcttatataagaggtcttggtattatgtttttatacagcttaccctggattaatgagcataccattcgcttaatttgtaaattagtttggacactttttacacttcgctgtccattctgtgtcagttttttgatgagttcacttaaggctacattaagctttctcattcatgtagaatctagttaggccttttggtttatctcatggacagagcataaagtacttgacagaatttgatctgacagctttacagttacataacatagaacagaagcttaaaaacaacaaaaaagagagagaagcaagggatttatcatagcaacctatatttctctctggaactttaccacccttccgctgcctctctaaactatagtagcagaaccactgttaggcttgcaatttacatagtcttaaattaaccaagactcaaaaacaaacaaaaaaaacaattccaagcatttagaggtgaaaaggtctttaggattatcctgtccagttgcatcacgttaccaatgagagtacagaagcctaaagagggtaagtaacttgcctatggtcataaagctagttagcggcagagctgaccccagagccaaggtcacagaattccatttctagtgctctttctcgtgtaatatgtgaatagaatatttaataatataatcgttatattttacaaaagaaaatgttatgtaaccatgacaaatactatatttgattttgcatatttaataaaaataattatatttaaaagtatatctgattgcctaggttcatatttctctagtcttactagtggtatgatgttagtcaagtctcttgaactccaaaactgtttcttcatctatcaaatggggcagataggagttccttgttatatagtaaatgtgacagtctctctaaagcctgataaagggatatttctcaataaatgttacctgctgctgttactgatttataataataatttctaattctttcatcttcctttaaattcgaataaaatttagcactgagaatgactggaaacaaaagtaatggatttcagaacagatttgcaaacataaaaatattttagaagagaggtataggtgtgtgt

SEQ ID NO: 115983 - DNA, 1072 bp, Homo sapiens
ccttaactctcttggtaaatccaactacttgccgttctcggtgtactttcagtcatccattcagcatattctttttgagggtcttccccactatctgcctcttgaaaggacatctgttactttttatctagcagcatgttcttgttcatctgtggcagctcttcctcctagcaccagtgtttggtttatttatacaaacttttattcagtcattcatttatttagtaaatatgctttgaagttagataagactactgtctcttgtaccttcttcccatgggcctgctgccaatgagaggtaagaattgtactgaatctgggtaaataagcccacctgagtttgcaagagagtagcacaagcaggttaatgaggccatagctccaagtgcagagttggagaggcccaaaagcacagaattggagagcctgtggttcaggggctgccatttttccaaattgctgagatactctgctatataatggcagcccatggttatatttcttagttgtctagtgaaaatactagggagtttggtcgggtagtgatggggattgtgactcagcagaatatttcgcaaatggtatgccaaaattaagtgccaagttttggtttctttttgcttttgttgtgagttagacatgtttcctttaaaatgaaaacatcagtcttcattgttctaaatgagacaaatctctgtgatattttatgttaaaaatatctacaacagtgaacatatagttagactcgtgtttttaaaaattggttgtatcctggaggtttactatgtccaatccctgttaactttactaaagtccctgtatagtcagatacgtggtagagaagccaggtataatgtaagaaattttatattgtcagtgttgaaatggacacaattttatgatttattaatttaagtgcttattttttctttcctgagctttgtacactgctgatttataaagagtatttagtagtctgggttgtgaagtaccagagttgctgacatattccacaggcaaatgtattactttactgtactacagtatgtagtaggatcatgtggaagcttca

SEQ ID NO: 115984 - DNA, 1033 bp, Homo sapiens
catgttggccaggctggtctcaaactcctgacctcgtgatccgcctgcctcgacttcctaaagttctgggattgcaggcatgagccactgtgtccggcctagactttttttttttttttttttttttagtgctacattgcatttggagggatccctgcatttatggattgtgcagaggagaggggtcagttgctgaaagaaactaagaagaagagagagaagaagaatatttcacctaactataagccttggctattccacttgctcttacttagaaatcttatcctgtctagtggctccatttaccaaatatatacactggtagctcccaaatctgtattattggcctagatccctctccagaaagtcagattgtcctgagtgtcaaggaaagacagaaacttttaagtgacagaaggtggtcagtttggtgtagtctgtcataaggtcaagaggagtaagaatgaaaataatcaattgaatttgggacttggagggttattggagatcttatgagtaggagtattaatatagtgataaggacagaagccaatttagtaattcatagaagtggagaaaaagtcagtgagtttgacttattgttatgtaatgaaagataaagtactaaaccatattagtaaagaattttgtagtctaaaagcttttatacatgtatgccagtgctttcaagtttggattggcttgtgatatacctgattaatttattctgatacttccatcaacagtagttactactcagtgcagatctacagtttaagcccataggcataggtttgaatcctgactttgctgtttctagctgccttttattaagatactgaatctctcctggcctcagtttcctcatctgtaaaagagtggttattacagaatttatctcaaaatgttgttgacagaattacctcaatgtgataatgtattaatggtgagctactaatatcattatcagtggaattaggatagcttttagtatctagttcagtgatcctcatcttcttaccttttctccctt

SEQ ID NO: 115985 - DNA, 3289 bp, Homo sapiens
attaaaacgtgtgtacgggtttttgggggattgggaccggagggacatatttctaaaaaatttccagaagggaaagttttcattgtgattctcacagaactgtgacacaatttgtcattttcaaggttcctgagaatttgggaattcttttaattcgttggcttcttgcgaattactacttacgaactgagcagattatacccaagccatttatattttgtcattgcatcacagacagggattacaatcgggagtgctggctgttgcataatgcacacatttgggccctggagggaattcaccgaagtggatctgggtttggtgtgccatgcgtttttattttttacacaggatgtacagatgatctttgcaaactacgtcccttatcgtgctataaagtgtttacaagaggaaagatttttattgactagtatggaccagactaaaatttttagtgttttagttttgcttgttttggaggaaaggcaaggaatgagatggtgagaggcacctgggaaaagtccgtttatcctaacacttgaagcgcaaacaaagataaaacatgatcgtctttcacagaaatcttgtagctattatagtggacttttctctaagttaatgatggggatctgtttggggaacttagaaatagcttatgtgagtagcaacattgaccttccacatgagtgaccataaattaaggtgttttacctgtggattttaggttctaaaaggcttcaaattagtctgacctttgagatagtattcatgtcattacaagtggtatttatttaataaagatgggatataggccgggtgcggtggctcacacctgttttcccaacactttgggaggccagagcgggtggatcacgaggtcaggagttcaagaccagcctggccaacatggtgaaaccccgtctctactaaaaatacaaaattagccgggtgtggtggcacatgcctgtaatcccagctactcgggaggctgaggcacaagaatcacttgaacccaggaggcagaggttgcggtgagccgagatcgtgcccttgcactccagcctgggcaacaacagtgaaacaccaagatggaatatatatccaacaaaggattttgatttggagaaaacaaaataattaagtgcttttgaggtaaagtttccatgccatcctccttattaaattaaactatttattttctgttttgttgaagactctcccactaattttgtcttcaaacaagtgattacatattgtgtaccatccctggcaaaaatatcgtgcttcccattatagatatgtttattctatagggagaattatggaggcgagaagaaccttggacatttagagatgagtcttggtttagggaatttaagtaagcaaagattgcctgctagagattgcaggtgacctgtctggacctatcctaggcctatggggaatgagatttttttttttctagcaaataacagtgctgagtcaaacacaactcttaaacttttacattgattctgttattatacaagtcagagaagttcactgaattggtaagattgtattgactccagtttggaagtgatcttggtgtgcttttgtctttgaagttgcttgagattttgagcattatttaccaatggttgagaaattgaaaagaaaaatcgaatatttttctctattagctcctacctaaatactccgttttaagccttaagcatactatgttcagtcatctgcctaaaaattcagtaagatttactttttaaaggtaagtacaacataagagagttgagtattcatgtagtggttcccacaatatctgtcaaggattctgtataaaggattgttgtttgggtaggaagttaaacaaaacttgtatgttccttcccctaagattttatgattctaagtgaaaaaaggaattgtgtgattattgtatttaagacgatagtctcttcacatgccattattttttgtatatttagctctgaaatttaagttctaaatttggtatgcctcagtggtggtaggaatatttcacaattgtttcaatgataacaagaaaatcacttaaggtagaatttattaaggaaaaggtgtgatgatttaaagataataagggaaaaactaataatttatcagagatatcctagaatgcttattagactcatggagttttagagttggtatatgataccttaacgtttacatgctctgtataggggactactcatctatgctaacctattttttaggctagaaagtttgtgacgtacctagattcctcccacccctgccttttttttttttttttaaatgaatacagttttggttactagctgttccaataagatgctagttttagactaaacaaagatagctttcatttattccacaaacattgagtgtctgttgtgtgttgtaggtcacaaacaggccctactgtcacggagtctatagtttagtgaagtattgtggattacaatgttaacaattccttaaggtctaactgtacaaagatttttgaaaatacgagttgggaacaaatttagcaaattgcatttttaaaaaagcgccaagttgcatgttgtcacactttatttgtaacttctcaggtatagaattagtttaatttggaaaattcattccagtagtccttgtaaggtgtactgttaggctgggtacaaaaacatgaatgtgcaaagtaatctagaaattcagtcttaaagatgagacaaacattaagcagataattctgtcctgtgagtgaactgaacaaagtgatatggggcatgccgaggagggctgcattaattctgtctgagtgactctggaagggctttacagaggcagtgacagttgaacttggtcttgaacaatggatgagtgagaacttgtcagaagcttttggggatgtgggatatgacgagagacagtcccagcaaatgctaaagcatagagttataactggtcctgttctgaaaacagggaagtcagttgatctggcccaggtcccatggtgggttggggcctgattgtgaatggatgtgtatgagttttgctccatggtgatggggaaccaataatgggttttcaaaggaaggaatgaacagaatggggttctctctctctttttaggaagagcattccaatagcagtttaaacgctggattggagtggagaaaagatacgagcttttatgataatcttggcaaagccttgaagcaaagctgtggctatggaggtgacagaggaggggctagagttgagacacatctgctgcagtaga

SEQ ID NO: 115986 - DNA, 1105 bp, Homo sapiens
gccaaattattcttcttaaagatctatgttgcttccctgctgctgcaaaagtaaaatctaggcccagtattcaagattacctaactatctggccctaacataacctttcaactttacctcccaatgctctctaacctttgaccttaaactcccttttcatttctgttatgggctgaattttgtaccccaaaaattcatattttgaagtcctaacccctagtacctcagactatgactgtattttaaagataagataaattacaataaggtcattggggggggctctaatccaatctgactgatatccgtataagaagaaaaaattgggacacacaaaggaacaccaggatacatgcacacagataaaagatcatgtaaggacacaacaaaaaggcagccatctacaaaccagggagagaggcctcagaatgaaatcaaccatgtggacattttgaccttggatttcacacctccagaactctgagaaataaacttgttttaagctacccattttgtggtattttgttatggcaaccctagcaaactaatccctaactctcccctacatttgtttacactatttcccctacttagaatgttccctcctctctttgcccatctgtgtttttcttattctttgaggcctctcctcagatatgaccacctgtgttgctttctcagaccatcccaatccaagcacttaacatttactgcatggctatattagacttttctcacattgcaataaataaataaccgagacttggtaatttataaagaaaagaggtttaattggctcacgtttccgcaggctgtacaggaagcatgattctggccatctgcttggcttctggggaggccttgggaaacttataatcatggcagaaggcaaagggtaagcaggcatgtcttacgtggtgggagcaggaggaagtggggggaagtgccacacacttttaaacaaccagatctcatgagaactctatcatgagaacagcattagggggatggtactaaaccattataaaccacccctatgattcagtcacctaccaccagaccccacctccaacactggggattacaattgaacatgagatttggg

SEQ ID NO: 115987 - DNA, 1044 bp, Homo sapiens
gaccattagccccatagactggcagagccaaaaggaaccctctttatcatcactcctctcacatctcagagatggaagtctggaaaagccatatgacttgcttgagatcacacaccaagtttgtggcagaggcaggactagaaatcatgcagcctaatactctttttagtactaaataataatagcgtctagtatttattgtttgctatatgcccggcggtatgctaagaatttcacatgcaaaatctcagttaatacaactgttttattctccgtttattggaaattgaggcagagaggagcttgtaccactaccttcagaagcttccaccatcctttttctgctgatgttttagacttcaaacaggcccctctttcccaagatcaaccaatgctggttcatagctttgtcttgagtacagaaaataggttgagggaaaaggtcctgatcagaaaacctgttatgtgtgctctcaaatagacttgattggattctaggatttgtaatagcaaaatttacatcttaaatttcagagggcagtttttaatttgttgatacttctttaaacaggaacttccagagagtcaatgcaaagcagcccacgttatctacaaataaatgaaatactattaatcagtgatcaagaatttctcccatgccacataatggatcagcattggaagttttgtgtggaatgtgaggaactaacaccctaaaaccttggtttcttaatattttattggatatttgttcaaattaccaacaaacatttatatttcatcttgtataatctggtgggcctattttaacatacactttatgagttgctatttaggatgtatgtttactgttcttaagatgtatgtaactgttcaacaattatataagattaatgcttttttgccattgaaataaaggcacatttgaactagaccatattgattggctctctggctttctttttactaatataaacttaaaactaacttttcaatcaacacctctacctttgtataaaaaacaattgatccctaaggaaatga

SEQ ID NO: 115988 - DNA, 1025 bp, Homo sapiens
atttttagtttattattttattttttaaatcatctctcctaaaatgtcaaggaagagctatttgtatttcccatcggtagggtgaccatcatcctgatttgaccagagcagtcccctaattcagcaaaattattactaacgttttgtttcactttcagaagttgcttgtttagatgacccagtacaggaaccaaacaaatcaatgtttgagaaaacaaaatttggacaaggtaaaaaaaaaagaaaatattcaattccatttacttttataagtgtttagattctacatattgtgcaaatagatcaaatagattgtcaaatattatgcatatcactccatattataaataattgctggttacatcatctttatttcctgatagactaagaagatctttgatttcagagaacttttatgaactcttacttcttatattcttcaatgcctggcacaccatagctttccaataaatgctcattgaataaataaatgaatgaataagtaaatgaaagcatgaacgtgatttaaaagattgctgttttaaaactggatttactttgattgtcttaagaggtggacatacctagatcttataggctataatggaatttgtggtgaagaatttaacaaatggtaaatgggattttggttagttaatactatctcctttatctgaacttactgtttcttttttttttttagacagaatctcgctctgtcacacaggctggagtgtggtggcacgatctcggctcattgcagcctcgatctcccaggctcaagtgatcctcctgcctcagcctcctaagtagctgggagtgcaggcatatgccaccatgcccagctaatttttttttgtagagagggagtttcaccatgttgcccaggctggtctcgaactcctgagttcaagtgatctgcccacctcagcctcacaaagttctgggattacaggcatgcaccaccatgcccagacctgaatttactgcttctaattgtgggatataagagggatggccttggc

SEQ ID NO: 115989 - DNA, 1050 bp, Homo sapiens
tggctctccttagccaccaattgctaccttccaaccaacgactaaatagatgtttagatagatgatccaagttttgtttgtcttttagagttgactcccaattgataataattgtatgaatataaaatcttgataaccttactgtcacctccttaaaaaaagggcacatttacttaaataaaggaatcagcttcctctcaaaggaaatattttgcgtcaacaggctgcaggtggtcagattaaaaaaatcaaaggcagtaaattgcacaggcatagttttgtgtattttaaagtgattaaaatttggagacaaagtatctttaacctctaagtgaccgctttgaaaagttttctgctgttattgcattttttctctttctgtttcttcctatagggtatccatagagtcatttaagcatggagccctgagagaacaattggccaacttggctgcaagacagaagagccttttagttgtggcaaaaaaacagaaaaaaataagcctgaaaattcaaaactgtaggaatgttacatcattgccttgtcttagtttaaggaagctcccacccagatcagaaatctctagtgaaaaagacagccaagagctcactagtctggaaaatttagagcatccccaatcaggttcactttctcctgtttctggaagcatgcaggaaacacaattgtctctggaaacttggaactacagccaaaataccaacatttgtctaaattcagaggcagtgagaaggggagaattttctggaaatgatatgaattctaaacaaaatggcagtgattgtaccttggatggttttccaaaatccagacattcagatggcacagagaagaataaattaccatcccaacctgttgcttttattggtcaaacagaatattcacagaaagagaatgatcttacagaagctacagacaaagaccatgaattctatgtttcttccccagtaatcggcaaattaaatatttcagaaactgcaagtgtccttgccgaaaatgctgcccatccatcaaatattatttgtgatcagg

SEQ ID NO: 115990 - DNA, 1007 bp, Homo sapiens
acacacacacacacacataagttttcaattcttccaataaagaattttggattgctaatctctaaagagcaatatgtttttgtctgggtgccagtggaagagatatatgagacttattcttccctgtgattcatataacccaagaatccattttttagagaatggttctctaatctttttatctcttgccctgaaaccatatgcatggttgatgacatttaggaagtagagcaagaagattgtcccaaagtttaatgcagtgattctcaaaccttagtttgcatcagaattacctgaaaagcttgttaaaacacagattgctgggccctaccctcaaagaatctgattcagtagttgtctctattacacacttattgtctcatactttctgtaggtcaggaatcaggcatggcttagttgggacctctaacagaattgttcgtaggcagcaaagtgttggccaggactggggtctcatctgaaggctctactagggaaggatacactttcaagctcatgtgattgttggcagaattcaatttcttgaggatggttggctgagggcctcagttcctcactggtgattggctggtggccatcctcagtttcttgctgggtgggcttctccaacatggctacttgcatcatcaaaacttacaagctgaaggcaatacagcaagtctgctagcaggacagaaaatgttacaatctcttttaacttaatcagttaaatgaaataccctcaatatggaaatattctattggttagaagcaagctattcaagagaagaagagtacacaaagtcataaataccagatggtgaggatcattaggagccattttagtctgtcctccaaagtaagtttggagtggactggggaatttgcatttctaacaagtttcctccatggtgccgataccactgatttaacgaatattttctgtttcttcaccctatccgtttattttgctttgcatctcagtctgaagcttctctaatgcagtt

SEQ ID NO: 115991 - DNA, 1050 bp, Homo sapiens
cagtaggttgcctgttcactctgatgatagtttcttttgctgtgcagaagctctttagtttaattagatcccatttatcaattttggcttttgttgccattgcttttggtgttttagtcatgaagtctttgcccatgcctatgtcctgaatggtattgcctaggttttcttctagggtttttatggttttaggtcttatgtttaagtctttaatccatcttgagttaatttttgtcccctgagggtaaggaagggttccagtttcagttttctgcatatggctagcctgttttcccaacaccatttattaaatagggaatcctttccccattgattgaataaacagtatttctatcactctttctgttgctttttaatatagtatttattgagcatcaggaaacctaacaacattttgatagcaggaaattgttaggtctattcatttcaactatctactatattcccatcagagctgcaaccagcaaactttttgtctgttacataaaaacatttttaaaagcttccattttcttaaacagtccagtgtggaacagaaactttaaaaaattagaaattttattttctaattgtataaccaggtaggagaacaacaacactgatattgtaaaatgtttgtttcagatgaggaattaactaataacatcagtggagatgaaataactataagaaattgtgaggagataaaagaaaaaacggagtcagaaattcacatgcctactaatagccaagaacacaaaacagttcagaatttcagaaaaagacaaagtttcttaaaaactacctgcaacctaggtttgtattcctataattgtataggttaaagtttacaaaatcaagcccagcaattcactctacttcaaggaatttctaaactttcagatatattgtttctttttgtagttattcactgacttatatgactatttcagcaatatttgttgttaaggcatcacttgataatccaataatctttaaatatattcatgtcatacttctttctatgacttctagtttattatattagag

SEQ ID NO: 115992 - DNA, 1412 bp, Homo sapiens
gaatcaaataatagttgatttatcaataatccagattgaattgatatagtactaccgctgaaaattaaagctaactatgtattttttttctatagaaaccaaagttcagttctaaaagtcacatttggcatgtttataatgaaaattccaacagacagaagctggaacatgtaaaagtcaataaaggaagcaaagcgagtttatttataaataaagaagatgtatatgaatattaccaaaaagatcccaaaaacacaaaatttggtaaatccaagcataaacaatcaactcttgaccagatatactctacaggactcagaaagggcaatctccataacgtcaaagatcccaacacaaacgtaccaaaaggtataggaagaagaaaaacacaacataaaaggacccaagtagatgatgtagactgtaatccaagaaagatactagctgtctctccttccaggagaataaacagattggttacctatcagcagcatattccagaaactcataatgaccttccagaagaattgtgtgaaccttccagcttaactctgtcaagcctgagaaatggattagatagcagtactgaggcttgttcagtttccaaagagaaacacatccagaacctggatttatcagatagtcaagaagttcaatgcttggaattagaatctgttgaccaaactgaagctgtttctttcccagggcttttattacataaagaaatcaagttaccagttgttactacagataagcagcctcacactctccaggaacaacaccatgtactttataaatctcatgaaaacagtaacttggtcccaaaagatgagagatttaacaaatgggaaaattctttcctatcctttgtaaaggaaaattctgataatgatgatgatgatgattgctctacctctgagaaggctataacatctaaaaaggtgttgtgttctacaggtggcaaaaaacactataattttaaggagaatttaacaaataaaaaagaaatgggtttccaacagtttttactttctgaagatcatctttcacaggaaaatgagttaaaagcagtcagcctaaccacacttccagaacaggaagctgttaatttttcttattcagataatgcagttatttctgaacatgttgcaaattatgaacaatgcatatttggaccttcttttgatcactcaaatggcaatcctgagcaaaattccctggcttgtatgagaacacttttgacacatgaggcttcaaagttgactaatcatgtggagctattcaaaaagccacaggattatattcccagagcaccaacttttttaatgaatcaaacagatacacatattgtggaaaagatggcaaagaattgtgacactgagaggaattacattgacagagaccaaaaaata

SEQ ID NO: 115993 - DNA, 1052 bp, Homo sapiens
cagctgaatcactcttaggaaagtatagcaaagtgagcctaaggtaagttccaaacagaaggctttcagatcattttcctgttgaagtagctcatcaccattatctttcagggaagagggcagggtgagaagactgggtggcaggagaagagcattatgtttctccttcaaagattatgccaggtgggttatgtgcagtggcatccagaaggtacctggggctggctttgcatggtcattgttactatgagactcagccttgaatgaaggagaaatgatgtcaaacactggaagaagctgatggtgcactgagctgtaggggaaaatttatgatgaaatggtagatgtacagcaggagcagtggccagggaaatggaaaaaatacagtatgaagtacagaggttgggacagggagctcagaaagtgcagtatttctgcaaggctgggtcactggtacaatgttccctgtgggtagaatgtgacatgttgtgctagagaagagtgattccttaaaggtacttaagtacttaatacactgaacaatacttggacagcctggatggtgcttttgggtgtccatacttttcatgttgtttctaaacttgctcagtttagaaacattgcaaagagtcttatggtgcacagagatggcacagtaaaatccagggacaagcaagtgatttcaagtgcacccccagtactttaccttagcaaagcctgggtttatactataatcaggattttaacaggatattattttaaatgtcatacccaggttatagccctgttataaccctcaaccttgtattcttatttgccagccacagcacttactctcttgatttcaagagatatgcggttctttctgttggtattctttgtctgcccattgagttcaagagtagccctatatgcagccaattttgactttatggatttctcaagcctctcttaacatgtttctttgtattagccttttttttttaatgtgccagtgttaacattctcagtggctgttcccttcttgtcttcagccagttaatatatacctt

SEQ ID NO: 115994 - DNA, 1060 bp, Homo sapiens
gattttttaaaaaccagaaaaagagaaactaattatggagatagggcatgaagattaaaattgcagtgttctaatatgaaaagagggaatatgagtaaagtgtaggaaattatgattggtattaatacagtgaatatgaatttagcaagtcttcgaaaggaaaaaaaataaaccctcttaagtagaaaggagacttacttagaagagatcaaataatatactcatttactcagctgtaataaaaatatggagcttgttaccttgagaagctttgcaagacggatatgtaagtaagctgaagaaaggtttagatgatacgtataaagaatacatatgttcatggaagttaaatctataatgaattattaagggaaagaacaattcctgatacactgttaaccttttaaaatcaatgtaatggaggttatgtactatcttgttccacaaaatatcacttgctgctgctgtcagataataaaaccctaggctgaatagtccattgatctagcctagtgtgacatttctaatgtttttgtagatctctcatcattctacattccaaatttcttgcaaaattaaaactcctagagtgaccatagatttgcctttgaattttcaagataaatattgatcaaaatcatttttacttatgctcttaagcttttaaatctgcattgtcctttattacattaattattattaaatctttcattatgtccacatatgtctatgaattcttgtacttggatcctataataggcattttaatttaagcaaaggtcaagacaaaatttaacttcttatagttttaatttttttgcagtgttgtaattttttgtggatgtatttacgtatttgcagactctgcaagacccaaatccatctggattgcaaactttggctcatcaaaatatcacttcttgtgagccactaagtaataagagaaattcaaattcagtgacaaatagctctgatcaggaaactgcgtgtgtgttgaggagatcatccagactagaaaaactgaaagtaagcagagatgcaaagtactcagatcacatgt

SEQ ID NO: 115995 - DNA, 1021 bp, Homo sapiens
cagtggagcaagtagctgaaaatatgagtctatgattttgccttttaaacttcaacaagttttcattgtgttaaaatcaaatctacccaaatatcaacaccgagaagatactttgtgacttggaagcatagagtgatctttttagaagttcctaggatagagttttcgaggagttaggaaatgaaaatagaaagatttcttctcaacagggctgagaagacatatctttagattgcttatatgtaggaaggaaagaattctttactaaaattttctctgttagctcagaaaatcactatgtctacctgggtgcagagtactgatgggataccccacattaatttacattttgacatagaatatatgcagttgggatgccaggggagggaaaaaatatgcctagcttaagcagaattttgacttctatgtctgagaatactatcaggtggcatagctcttggggtttagaattcttgtagtattatgcctggaggctctgtagtggcctatcactcacaaagtccctttgtcatattgacagtttctttgtttttaaaaataatctttattttttcccctgattataataataatgcatcctcattataaaacacattttaaaccttacagaattacataataatatggtaacaaatatcctccacagtttcactctttagaggtaatcactgttaacagtttggtgtatctctctccaattatttccatcatattctatattagttcattttatactaatgggattatattatatataatgccttccaacttattttttaaatttaataatgtgttttgtttatctttcaatgtcagcaaatgtagcactacttaaatcttttaatttgctgaatagtattccactgtgtgaatatattgtaatttatttaatcaattcactaatgatggtcatttggattgttttctttcttttctttttatcttccgattaccaaaatgtttctgtgaacatccttgtgaagatttatgtaacaaaatg

SEQ ID NO: 115996 - DNA, 1152 bp, Homo sapiens
ctgaaagcaatttcaaaagagggattctaacagtattttgagtattagaaacattgtgaggctgggcatggtggctcatgcgtgtaatccctgtactttgggaggccgaagcaggcagatcacctgaggtcaggagattgagaccagctggaccaacatggtgaaaccccatctctcctaaaagtacaaaaaattaacagggcatggtggcaggctcctgtaatcccagctactcaagaggctgaggcaggagaatcacttgaatcctggaggcagaggttgcagtgagctgagatggcaccactgcactccagcctgggtgacagagtgagacctcatctcaaaaaaaagaaaaaaaaggaaagaaaagaaaaaaagaaacattgtgagaacaggtataacctattaaggtgatgtcttagagaaataatagtcatttagaaatgttaagtttagtgggtttttttgcttaaaataaccacaactcagagccattcattcacagctagggcttgtaatatttatacataactgtaccctcatttctccaccttttccctctgacctcttgtcctttggcctctttactccacatttacttattcctacaaaggtgggggaacaaaaagaaggtgaaattttattcctagttaataattttataaatcaaataggacattttggcaagaaagaattttataaccattaatggctatgaagctttgggatcatctgttaatttaactatccatgccatctctgcttcttctgttagcacagataatttaaacttaggtgaataatttgccatccgtaattatggtccagccagttatgctcttggtctattattaaatgtttaaccatgttttcagtaattagcgatttggtataggaaagcaataaagagtattccctttatttatggaagggaaggaaagttgatgataaattttgagggtagcttacaaacaagataaactataaaactataaagttttcattttaaatactttattgtatatgctgtaatgatgtaatttctatttgtaatacacaggaactaagtgaaggcagagattctcctgaagttagccttctctcaggcactgctattacagtatctgatacagttgctgtaaaggagacatc

SEQ ID NO: 115997 - DNA, 1032 bp, Homo sapiens
atgtattaaaaagatagatgccaatttgtgtttcttatgaaaaaattgattgacatgtattcttgcatattgttcattaacaaattaacagctccagcccccacttgtattcaatggcattagctcttggttggtagttctgtctatagaggaggaaataaatcagctgtcaggagcaaccttccttcctacttgctttcttaccttttgcatttaccttttgcacttttggaggccaacatgggcagatagcttgagcccaggagttccgtgtagaaccttaagtaggtacagtcaagtgaataattagtcctcaacaggaaaagtcactggtcctttagtaagataaatgaaaattacaaatatttgaaaaattactttgcagagacacagaaatatcttgtaagtgtgtaggtataccctgtttaattaattcttgggagtttctgggtttgtctctcgacatttcttatctttggcctctgagctctgtaaagcctgcttgggaagtatatatgtgtgaaactaatgtaactttggggtgtttagggatgcattatcagtatataatactgagcattaattggagaaggttgaggttatcacattgctttatttgtgttttttgatatgatttgcatgttgttcattaacgaattaacatctccagcccccacctgtattcagtggcattagctctgtattgtattagtgtaatcatgaaaatgcttgcaagttcagcctaatggctttattttcagagagctttataatttatcatagaaacaaacataaagggcccctaaagagaagtctttttctaaagctcttagatgctgacaacatattaaaggtaaagattccttttaaagtgacaaaagccagtaggttgtgaactcttaaaatggaagcatgttatcagtgtattttatctttttcgaaagggacacaacaacttcagattttctgatatgtattaagaattaggcagaatcagttttgagttggggtctctgtcacccaggctggggt

SEQ ID NO: 115998 - DNA, 1150 bp, Homo sapiens
cgggcaggagctgacagctcttcccgtatctggggctcacaagcatcaggtgcatggcaggtcaccctcccggccaagggtgttaagcaggctcggtctgagttctgggtgcgccacgcctgcctttctggtctctgcagcagcaaccccagcaccctcaaagcctagcgaccgagaatgagaaaccgtgaaaaaaacacgcagcggcaggccacgcccagagtaggcctgcgcgcgcgcgcgcggcctcccacttccggccacgggagctgggggcggggccgagcgctgcgcagggctccgtcgtgtggcgagcggctgccccctgtctgcgacgagcggcgggacccgcgggccgcctcgcagactgctaccccgccgcgctcgcggccgcctgcgtcctcctcagcagccctgcgacaagtcccggctcctgctgcgattatattatttttatttttaattcacaatttcccctggccctcaaagcgtttttttgtttgcgggcaagagggagttagaggagggtaaaaaagactttgaatgtgaggcaaagatggaggaaggcgtccaggccccagactgggacagtgatgaaactgtgatagagggttcagtgacggagagcgacctggaagaaaaggagctgccctggagaaggtgaccatcattagggccacagtgcctgaaccctcgcgccagggcggcccaggtgccctctgagggggtcagagttttgagtggagatcgtgaccagaacatgtgcttgtgggcaggatcagagccttgtggggcagccgtgcctgagctgagagcttgtaaataagcaaacacagtctgttcccacctacccccaaccagctagggataaaatgaggtttgtactaggtggctttatagcatttttcaaaaggctttccttttgggggctttaagtctttttgcacaagcaaaaaagatcttgggtctgaacttaactgcattttgtttcaggagacttcattttgcttcaagagactcgtagctcagttctaggaaaatgggtaacagtttctctcaagaaaagaatgtgtgatggggaaactggtccctgccaaactggaaacgaatagttttatacgaatccaaaaaagtcggtatttcaggttat

SEQ ID NO: 115999 - DNA, 1018 bp, Homo sapiens
tgagctttcagtcatcgacctgaccctgcgttttccctcacgctccgattctgcttcctatcactgcctcctactgtactatcacagccaggacgagcacgggtcaggcactgaggctgtgggacactccacccgcctggtcccctatcgcctccgcctaggcagctgccatgcgtgcgcccccacagctctaggaccaataggcaggccctagtgctgggactcgaacggctattggttggccgagccgtggtgagagatggtgcggtgcctgttcttggccctgcagagagctgtgggcggttgttaaggcgaccgttcgtgacgtagcgccgtcaggccgagcagcccccaggcgattggctagacaatcgaacgatcctctcttattggtcgaaggctcgtccagctccgagcgtgcgtaaggtgagggctccttccgctccgcgactgcgttaactggagccaggctgagcgtcggcgccggggttcggtggcctctagtgagatctggaggtgaggcgggcggtgaccgagaagaggggcaggggcggcggggagcggggcggagatgggtgggagcggggtttgggctgtgttggtggcaattctggagcttccctcggccctgggaagtggctaccggcagctcctgcggacctggagggggctgcggttgcgctttgtcggtgtggcagctcggacccgcggggactgcaaggaatgtccttgaggcccggcaggccgagcggcggccggcatcagtgccggagtaacccggggtcccggggtgggcttgagaggcgggcggcggtctggcctcttcgtgactgcggtcatcatcggtggacccgcggggcgtagctgcgttcatcgtccctgttcagtcagagtaggcagtgctggctgcacggtcacgaaaatcggggcggaaagggtgtcaggcagggtgacctcggaggcccctggattcgagaaatgctaggggtctatggggctgtcgggccggcagctcgca

SEQ ID NO: 116000 - DNA, 1107 bp, Homo sapiens
tgtgggataaccatttcaagataagagtgtgagtatgcgtgcatgcacacactctttgtattcctttatggtctagtttctagactatagatagccacattatggaattacatggtctacttaggttgacccatgtgaaattgccagtatttaaaattcaactaacctacaaaaatagcagtttcatatgattccatttaacacttatctttgtcagagaactttggagctctagcttcataagtgaatgaagagaatagatatgacttaaaaaacaacatgtaatagaatgtgagctaattgggtatagaatccagatttcctgattgccagtgcaagattcgtttttttttttttttttttccttctttctggaataccagcttgagcagcagaatgctagatcttgttgggattgaaaatgactgccatataagacgcagttcttggcttcaaagagacaaaatgtacacatttattaatttgagaacactgtgagatagtatataatcaaatactggaatgtgtaatgcaggcggagtgctgagtaggaggaagtaagatgccaaaacatccttttctgcagttggccatggtaggtggcttctgtagcagattggattgacatttaagaattatccattcttttaaagaatctgtaaaagtttgcagcatactttttagtctgaataagtaaggcataccttgcctatttgtttctttaagtaaaattaatttttggccgggcgcggtggctcacgcctgtaatcccagcactttgggaggccgaggcgggcggatcacgaggtcaggagatcgagaccatcccggctaaaacggtgaaaccccgtctctactaaaaatacaaaaaattagccgggcgtagtggcgggcgcctgtagtcccagctacttgggaggctgaggcaggagaatggcgtgaacccgggaggcggagcttgcagtgagccgagatcccgccactgcactccagcctgggcgacagagcgagactccgtctcaaaaaaaaaaaaaaaaaaaaattaatttttattgcagcattgcataaatactgtcaacttaatttgcaggagctatcctgtagcct

SEQ ID NO: 116001 - DNA, 2228 bp, Homo sapiens
cccacagtaggaaatacacgttaatttaaaagccagacacacacttatataggtatagtttcttgaaacatagttttaagaaataatacctacccatactacctggcttacccaacagctattttttataatattgttttctattttattttatttaaaaatgtttgttcttaacgacaaaattgatgtcatgatgtaattgatgcagttgttgtggatcaacagtttgaaaactgtttagctagtggtgtggtatgtctgaaatgtagagaacatggagtgatgcagtgagagatgacacttggtatttgctttggttccttaaagctgctctttttttttttttttggtctttcccctaaccctttataaatagattaatgctttctttcacttacttgattgcctttttatagtctgtcttcaacagatgaatcacttttatttattactaaatgtgagattcatttgaattcttgctagagtggcagttaatgagctttttaaatctttttggttgatttttgcaggttactaatatgccttatcacaggcattgattttagtgaaagaagtaagacttgcaggtttatttgtggagaccaatggtaatagaagatttgttttcaaaatcagaatgtcataattattatttagcaaacaggaaatttagtcatggtagtcagtaaatcaaaatcttctatatgttcttttgggaatttttttgaatgctatatacagatacttcagccagtcatcctcttctagtactgttccagcttttgattagttgtgaaagtttggagcttttcacatctaatgcttttccattggtcttctagcactattgttgatgaatctgctagaagaaaagcagccaccacagcaaaattcttaaccctgttttattaatgtagaaacatctatcagaaaagactttttttctgttgacagcaatgttaggaaggtttattaaacatccttttgctagtgacattatgccatatgttctatggaatgaaaaagtacaagaggtccctgcccttgaggatcttatcaactaacatgatttatagcaggacactcaataagtggattcttgggtgtttaccttttgtgtaatcagaatgtagatgatgaagaagatacttaacatgcattttatatctaggtaattagaaaatgtgaatagctgtttctcacttgtgttttctgcttgattgctcttctacttgcaaggcttaggtaataaggtcgagatacttatctggtttgatcttaaatgtttgaattcatataatttttaagaaatggctgctttaaagttggttgccagtaagtaataaaggatttattgtttgagtgaagaagaaataacatagttctcttaattttataattattttccagaattataaggaacagtatcaaatagtcatatgtatgggacactgtgcatacaaagcagggtttatagcacacttttccttaaaatcttttcctaaaaatacaatgagctgtatactaagtgttcacccttgatattccttccaggatccaaggattctgtagctacaatgttgtcaagactttttcgaatgcatggcctctttgtggcctcccatccctgggaagtcatagtggggacagtgacactgaccatctgcatgatgtccatgaacatgtttactggtaacaataagatctgtggttggaattatgaatgtccaaagtttgaagaggttagtgaagttaatttgatactgactaaagtaaattacattttcaatttttgaagagcccttaagcccctatagggagcacataatttttaaaagttagagtaaaatatttattttagtattttggaacttacctcaaatttctgcttacatggaatgcactggaaatgctcttattttgctttgtctttacaaatgaatgtaattgactttatttgagaaatacatcttttataagtgactaatagtcaaaaatgattgtgggccgggtatagtgactcatgcctgtaatcccagcactttgggaggccaaagcaggagaattgtttgagcctaggagttcaagaccagcctgggcaacctggacaacatagtaagacccagtctttaaaaaaaaattaaaggccgggcacggtggctcatgtctgtaatcccagcactttgggaggccaaggcgggtggatcacgaggtcgggagatcgagac

SEQ ID NO: 116002 - DNA, 1717 bp, Homo sapiens
ttttaaaagtcaaagctaatggaatttccttttctttctctcctattaggatgttttgagcagtgacattataattctgacaataacacgatgcatagccatcctgtatatttacttccagttccagaatttacgtcaacttggatcaaaatatattttgggtaatagttttacatatttaacttctggtgtcatcagatttttgatttgctgtggaaataaacctgttcattcaaatcatgtatttggaaatatgtgtattgctgaaagtgtgctgcatgcattgaatagtttccttattattggcaattagacattctgaaatttgagaccttaataatttggagtaaactagtattatctcagaatgctgtgtgacactgttattatttgtgtagtaaaggataaagtttttttagtattgaacttttgtcattttaggtattgctggccttttcacaattttctcaagttttgtattcagtacagttgtcattcacttcttagacaaagaattgacaggcttgaagtaagtatttaaaacctaaatatactttctgtcaaaatacattttaaaaaacttttcttccccatgctgtaaaggtacattttcaaaagttaagaaaataaggggaaatttttttgtataattttactattagctaattttaataactattaacattttggcatatatccttttctactgtttttatacttaaagaaaatatctgatatcatatatattgttttataatttctttatgcttaataatagtttatcaacatctttccatgtcccttttttttttttttgagatggagtttcgctcttgtcacccaggctggagtgtaatggcacgatcctggctcactgcaacctccacttcccgggttcaagcagttctcctgcctcagcctcctgagtagctgggattacaggcacctgccaccatgcccatttaatttgtgtatttttggtagagactgtgtttcgccatgttggtcaggctggtgtcaaactcctgacctcaagtgatccgcctgccttggcctcccaaagtgctgggattataggcgtgagccactgtgcccggcctccatgtccttaatgttaaactaaattgtttgtaatggctatatgtattctcttctgtctaaacgtcttgtagtttattaatcatctaatgttggactgttaggttatgtaattttttttattaataacaacactgtgatgaatgtctttgtaacgaaatttttgttcatatttgtaatcattttcttaagatacattcctagaagtgagacagtggttttgctttttttagagctttgcttttttttttttaagagctttttagtgctattattgccaatttagtttacagaaagtttgtttagtttatccttccacaggtagtgatcaatgaaaatttttatatattccactttttttccctaatggtaatccaaggagatattttttactaaggatgatactttgatacaaaattatcaaaaggtgtttaaatgtaaatatacttacattttaacattaaaaatatttttaacaaatattttgagcaactactatgtttagctttgaggatgccaaagaaatatagggtatacttttttgtctgcagaaaggtacacatactacaggatcatacagtatggagggggaaaggttttgttctaaaaagaatttttt

SEQ ID NO: 116003 - DNA, 1181 bp, Homo sapiens
aaatatagaatgttgtaggatttaattatgtgtgatttaaatgacagagttaatgcactacctcaaaggaatattcctaacaaatatcttattcagtggaaagggaatcagggcactatatgttcttttttaaaaatttggctgggcgcagtggctcacacctgtaattccagcacttcgggaggccgaggtgggcagatcacctgaggtcaggagctccagaccagcctggccaacctggtgaaacccagtctctactaaaaatacaaaaattagctgggcatggtggcgggtgcctgtaatcccagctactcgggaggctgaggcaggagaattgcttgaacccaggaggcagaggttgcagtgaaccaagatcacaccattgcacattgcactccagcctgggaaacaaagtgagactacatctcaaaaaaaaattttttaaaatcctttatattacaatcatactttgtatcttgaatacctgttagttttatcatattgtatattttactctttgaatagtaatttgatattaatataagccataggatgctctaacatttaaaaaagttgttctgtcccttgccttcattgatatgtttgatctgttttaggatgaagtaagggaaaatattgctcgtggaatggcaattttaggtcctacgtttaccctcgatgctcttgttgaatgtcttgtgattggagttggtaccatgtcaggtttgtaagcaatttttgccatattttaaaataggtatgtcgctaaagaggaaaaagaacatcttggatttgtattatttattgttaaattctgacttttaaattactcttaaaattttttattatattagtgtgtgggtatatctggcctgtttgctttggtggaaacttagcagcaggttactgatttatttttcactcctgccatcctctctttgtgttccactttgtgatatttttattcatttgatttcttttgtttgtttttttaaccaacattgcattccaaggttggtctggaaaacactttccagcccctgctgttacttagactcaattggtgacttggttctttgtgttttaattatcatgtagggagaaaagagtcaggaattggacagatctgagtaagattcacctaataaggtgattggaaatatttaatccgatagtaagca

SEQ ID NO: 116004 - DNA, 2700 bp, Homo sapiens
tcttaaaatttaggtaataaaatacaactttgagtttttgtgagcagtttttataggacaatttaaatttatgtttcaaagcattgggaattaaaaaaatacaatatatgcttgttctagtcagtcaaattatatcttaaaatgtaggtaataaaataaaactttgagtttttgtgagcagtttttataggacaattcaaatttgtgtttcaaagcattgttatgtttgagcgacatcagaaatatgttttatattatactcaagtttatttgtaaagtgagggagaaggatttggtggtcatctaaggtctcttctagcctctataattctgttttctatttgagatcaccaaatgataccttaaacagttgtagtacaatatgtttgttaatttttagtcttaagttggcattttgtattatatcattttccaaacagatcaatgaaataaccaaaattataagaacttcagtaggcatcatagaggttatattgaaattagagtttgttggtacacaaaaaatattattttgaccttatatcaggactggcataactggcaggatattctacttatataaaaaatccttggttaattggcaaattgcttttctcctaacaagtgggattagatcaatagtgtcactggggttttgctctgttagagtagcctgtcctctccttatttaataataaggcactactgcttgacaaaaaggaattggaaacacatatgttttatcaattgtgtattaaacactaccattctgcctggcattgtgatatggggacatgagagaaggcaagagctttgctcttgagggacttagagttctgttgttattcctgctgtttcctaaggcttggcatcacctctaagttgctaattctatttccagtaagtggcaaggagcttaatgtactaatattttcatgttttgtccacctgcaggaagacaaatatatccttgtgatatatgcagcataaaaaataacgtagactttactagttgtatctttaatttttctctaaccaggggtacgtcagcttgaaattatgtgctgctttggctgcatgtcagttcttgccaactacttcgtgttcatgactttcttcccagcttgtgtgtccttggtattagaggtaagaccaattcttacatatggcactagtagaagagtaagatttctgcttacacagtttacctaaacagaatcaataccttctaatgtcacactgacttaatttgtagctttctcgggaaagccgcgagggtcgtccaatttggcagctcagccattttgcccgagttttagaagaagaagaaaataagccgaatcctgtaactcagagggtcaagatgattatggtaatgacatggttttcttcttcttttagtatcctcagttccaatctcattatttttaagatttctttttttctacaattttggcccattcaatgatattgcacccccttcttcctttttttcttaatgtgttcatttctttgaggctcctggtctttattagcccctctctcctaaacagactttttaagttcccccaccttatctctcgttgaaagcctgttctttggggtgttttcagtagttcagtggggtcactactttagttagttgcatagcaagcttggggctttttttttttcatggtaaggggaagctatgagagataatgtctggctgtccagttgctagggataagaaatttaagttctattgatatgcagaggatacattactttaaaaattttatttcagtctctaggcttggttcttgttcatgctcacagtcgctggatagctgatccttctcctcaaaacagtacagcagatacttctaaggtttcattaggactggatgaaaatgtgtccaagagaattgaaccaagtgtttccctctggcagttttatctctctaagtaagttaattgaaatctactttgtgatatattaatcataacactctatgctaatgtaagtttagattgtgtcctttacatttctgaataagattttaatttgctttcttttatttagaatgatcagcatggatattgaacaagttattaccctaagtttagctctccttctggctgtcaagtacatcttctttgaacaaacagagacagaatctacactctcattaaaaaaccctatcacatctcctgtagtgacacaaaagaaagtcccagacaattgttgtagacgtgaacctatgctggtcagaaataaccagaaatgtgattcagtagaggaagagacagggataaaccgagaaagaaaaggtaacttgttattctcttcgctttcaatccttcattgctttgtcaaaaagtagtctgttttcaaaattatgtgccgtgttgtgagatttcttttgatttcttgaacagttgaggttataaaacccttagtggctgaaacagataccccaaacagagctacatttgtggttggtaactcctccttactcgatacttcatcagtactggtgacacaggaacctgaaattgaacttcccagggaacctcggcctaatgaagaatgtctacagatacttgggaatgcagaggtgaggatgataacataaactccaatgtggcatttttcattacaaaggagctttttcaaggaagaaaaatctagtatctgctgaacactacagctaagtt

SEQ ID NO: 116005 - DNA, 1574 bp, Homo sapiens
aaacagtggtacctatttatgtgtaggtagcaaagaactgggcagatggtagacagggatgggatgaagactttttgttatatctcttttaatatttagtttttaaaccatgtgaatatattgcctgttcaggatatcaaaaatagcaagtttactagagtttaaacaatagctgttatatctgacacacacttgaaaccttgctaaattcacatttatttttctttttatggtgtattagtgcaagcctgtctttgtattgtaaaatctaatgatacggtatttatattatttttgtttggcattttttgcattaaatgaattattttgcagaggtatcttttaattaaaaactacagtgatttaatttaaaaattacattattttagcttagcattgtttgtattaaatggtttataacatgaaatacagtccttcaagtcttctgtttcatctctctctctgaccacaatttcattttttttctccatttctttagaaaggtgcaaaattccttagtgatgctgagatcatccagttagtcaatgctaagcatatcccagcctacaagttggaaactctgatggaaactcatgagcgtggtgtatctattcgccgacagttactttccaagaagctttcagaaccttcttctctccagtacctaccttacagggattataattactccttggtatgttattttctcgattaagagagatttgctttgtatgtttttaatcttttttcttgattagtttcatatatgtacatagttttataaaacattttccttttaaatcattttatcctaattttttattctgcttatgatgtaggtcatagaaattaaaaatatatttcctgcttttatagtcattactcaaagattttagtattttaaacactttttaaaggtgaattaaacattttgtttaaaaagaatacatactaaaggattaagtttgaagatagttatactgacaagctgagataaaattttgtgcatttactatatagattttcatttggtgcctgactttaccttttaggtgatgggagcttgttgtgagaatgttattggatatatgcccatccctgttggagtggcaggacccctttgcttagatgaaaaagaatttcaggttccaatggcaacaacagaaggttgtcttgtggccagcaccaatagaggctgcagagcaataggtgtaagttggcatttatatatttgccagtttaaaaatacatcataagtaaggcaatgagaagagttttaaggacaattagtgataccttttgggtcaagcatgagcatttttgggtaacatgtgcttgcttctctaacatatactgtgtagcttggtggaggtgccagcagccgagtccttgcagatgggatgactcgtggcccagttgtgcgtcttccacgtgcttgtgactctgcagaagtgaaagcctggctcgaaacatctgaagggttcgcagtgataaaggaggcatttgacagcactagcaggtgtgtgagtggatttgtatgtacagttatatctatttgtttattttagaaccag

SEQ ID NO: 116006 - DNA, 1415 bp, Homo sapiens
tcattacttggggttttaggtaacagctgaataactagaagatggaatttattactcattccccagtgacatataaatatgagtatttttattgaatatttttaacattatcatcttttatctacatctttttcaacaatgactacaaagaacttggttttcataccgagaaagaaacacattaggaatttatacctgaccaagaaagtaattgtgatggttaacaaaacagctgttacttttgtgctcagtttctttgaagtatagttattatacttagaaatatatcatagatacaaattcttctcataaggatgaaggatgaatatttcatgcagtttaatatgtgtgtgttttgggttcttgttaacagggtacagagaaagcactttcaaaacttcacgagtatttccctgaaatgcagattctagccgttagtggtaactattgtactgacaagaaacctgctgctataaattggatagagggaagaggaaaatctgttgtttgtgaagctgtcattccagccaaggttgtcagagaagtgagtgactggatggataatttatcttttttattttgtaatctttaattgtatttaaaaatgggggaaaggagtattaacattttaaataaagttaaatatatgggacagtgttttccatcaaagatgactgttgtaccttgcccatctgtctgtgtgtatcatccataggaacaaactttactgattttttttaattttttttattttttaatggaggacagggcttaaatggggccacatctaaactttgttttctggaggttcagaaagatagatttgggtaacattcccctgaaccttctggaggaacatctaaatgtacacagctctgttttgtaggtattaaagactaccacagaggctatgattgaggtcaacattaacaagaatttagtgggctctgccatggctgggagcataggaggctacaacgcccatgcagcaaacattgtcaccgccatctacattgcctgtggacaggtgagctctccagcctccacttctcttgtgttacgtctttctaagtgaaagaagtatattgtatattttttcttttcttgtttccaggatgcagcacagaatgttggtagttcaaactgtattactttaatggaagcaagtggtcccacaaatgaagatttatatatcagctgcaccatgccatctatagagataggaacggtgggtggtgggaccaacctactacctcagcaagcctgtttgcaggtatgatgtatcaggcatagagtccacaagcctagttctgactctctgggtttctctttctatctgagactatgtatcactcacctctattttaattggtcttttccaaactcttttgtcatatcagcctaatccattgtgt

SEQ ID NO: 116007 - DNA, 2663 bp, Homo sapiens
ctgtcaggtgtggctgtcaagtcttggaaagttagtgcttccagtggagtctagttctattctgatgccattacagttgccctgtttttagttgatttagtaagaaattggtcatgattttaagggtgaatcttgttgtgtctctccctggctacagatgctaggtgttcaaggagcatgcaaagataatcctggggaaaatgcccggcagcttgcccgaattgtgtgtgggaccgtaatggctggggaattgtcacttatggcagcattggcagcaggacatcttgtcaaaagtcacatgattcacaacaggtaagactcaaagatatatttaacatgttccccctatacttcaaaaaatatgcagtgtaaaaacttactattcatctactgtagttccaagttaaaattctacactcctgatatttatatattgctactttgtcattttctaccataggtcgaagatcaatttacaagacctccaaggagcttgcaccaagaagacagcctgaatagcccgacagttctgaactggaacatgggcattgggttctaaaggactaacataaaatctgtgaattaaaaaagctcaatgcattgtcttgtggaggatgaatagatgtgatcactgagacagccacttggtttttggctctttcagagaggtctcaggttctttccatgcagactcctcagatctgaacacagtttagtgctttacatgctgtgctctttgaagagatttcaacaagaatattgtatgttaaagcatcagagatggtaatctacagctcacctctgaaggcaaatataagctgggaaaaaagttttgatgaaattcttgaagttcatggtgatcagtgcaattgaccttctccctcactcctgccagttgaaaatggatttttaaattatactgtagctgatgaaactcctgattttgtagttaatttattaagtctgggatgtagaacttcaagaagtaagagctaagttctaagttcatgtttgtaaattaatacttcatttggtgctggtctattttgattttggggggtaatcagcattattcttcagaaggggacctgttttcttcaagggaagaaacactcttattcccaaactacagaataatgtgttaaacatgctaaatagttctatcaggaaaacaaatcactgtatttatctccgcaggctatttgttcagagaggccttttgtttaaatataaatgtttaaatataaatgtttgtctggattggctataacatgtctttcagcattaggcttttaagaaacacagggttttgtattctttactaaagatatcagagctcttaatgttgcttagatgagggtgactgtcaagtacaagcaagactgggaccttagaaatcattgtagaaacacagttttgaaagaaaaataccatgtctctaagccaactttaattgcttaaaagacatttttatttagttgaaaaatctagttttttttgtaaactgtatcaaatctgtatatgttgtaataaaacttatgctagtttattggaagtgttcaagaaataaaaatcaacttgtgtactgataaaatactctagcctgggccagagaagataatgttctttaatgttgtccaggaaaccctggcttgcttgccgagcctaatgaaagggaaagtcagctttcagagccagtgaaggagccacgtgaatggccctagaactgtgcctagttcctgtggccaggaggttggtgactgaaacattcacacagggctctttgatggacccacgaacgctcttagctttctcagggggtcagcagagttattgaatcttaattttttttaatgtacaagttttgtataaataataaagaactccttattttgtattacatctaatgcttcaagtgttgctcttggaaagctgatgatgtctcttgtagaagatggactctgaaaaacattccaggaaaccatggcagcatggagagcctcttagtgattgtgtctgcattgttattgtggaagatttaccttttctgttgtacgtaaagcttaaattgcttttgttgtgactttttagccagtgactttttctgagcttttcatggaagtggcagtgaaaaatatgttgagtgttcattttagtgactgtaattaatatcttgctggattaatgttttgtacaattactaaattgtatacattttgttatagaatacttttttctagtttcagtaaataatgaaaaggaagttaataccaataagtgtaagcagtaaccttttttctttggattaaccctagccctgaggtctggaagcttgtaaagtctggtcatagtagtaacctgtaattcatgctaggactcacatgaccatttattctcaaattctacaacattgattgatagcagtattctattacattaaaatgagctctcttagagggtttgattagttcagatttatcatctcaactagacatcttttggatagtgagagtgggagggctagttaaggagaagaggggcagccacaaccaaacagccattgcaagcatttaagctgtgtgagctgaattggagaggggaatttgtacagcttggtatagctgaggatggcctctttagaaattactgtgagtcagtaattt

SEQ ID NO: 116008 - DNA, 2273 bp, Homo sapiens
aaaatatttgtattaaaagaagaaaagataacattttacctttagataactgcacttgtacctcactagagttaatcccacccaatcagattgagaaataaattggggaatgtggaaagagtccaaaagaggtcagaatttggagaggtactggccttctggacaacatttagaccctctacaattattttcattaagctgattcctacatcctgaatattcatgttttctcatctacagatatttgtcttcccccaaactaaaagaaaaaaaactaccctttactctcttttctactcagttactcttttgtgctatgttagaaacttgaaatatattggtgatgtggggattttgtccctgactgcccactgtacaggacaagagagtacagtgtttcagttggaattcaggactcctggttttgaggtagaggatgatcactgcagtacttggtttggaattgccacaggggtagctaaaccaaaggagggttatatctgcaagggaggtgtaagaaggcaaaataaggaaaaggaggaatgggttttctatttgttcagtttcatcaactaatttatacacttaatacaacttcagtgtcaattgctattaagaaatttttagttgggctgagctggttctcttgtgaaattgtgctggttatctttaagcttatcagttatttgtccaattaaacacttttcaccagtatttagtccgagttgtacagacgatgtatttggattttgtcatggttcatctacagactcaaaacataatcattttaaagtaccttgggagtgtgtagagtaacttctataatagctttatgatcctgatgatgttttttaaacacaataaagttggatcttccatgttacaatcacagaattaaaaccagtatttaaagtggaaaagtattaaaatattatggacaaatatgctggcttgatttgttttccttaaccctgagatattgccctactctgaatagttaagagcttgaaattcagtgttcttcccgtaacccagttagggatcaagaaaactactgagttgcagcctaaatttttttttttttttttttttttggagacagagtcttgctttgtcacccaggctggagtgcagtggtgggatcttggctcactgcaacctccacttcccaggttcaagtgattcttgtgcctcagcctcctgagtggctgggattacaggcatgaggcactatgcccggctaatttttgtatttttagtagagacagggtttcgccatgttggccaggttggtctcaaactcctgacctcagatgatccacccacctgggcctcccaaagtgctgggattacaggcctcagccatcgcgcccagctcagttttttttttaacaaaatataacaggaggaatatatcaagtacatgacatgtaataaatattttgtgtatcttttgtcatatgtattacacatacgtgtgtaatgggttacagtttacaatgaatttcttactgtggatcacatccagaagttttaaaagattggtagagaagccatattcacttgggtgtttctaaaatggaagcacagtgctggtgaatgatacacacttattttgtaattgagctgtatgcatttaatcataaataaataatctcatttatttaaatctcgtttaatctcagctccacttgttgcactcaggtaatttatgccctagaacaaccatgaaatgggaagtgtggacttccatttcactcagtcagtggattcatattgaaaggcactgagcatatttctctcctagtgttcaaagatacatgccatccaaacaatgtgatctgtaaacaaaagccaactacttaatctggtgggatgctggagggaaaatctgacttgtgttgaatttgatgacagagaaatattatgtggtcctcattcctagagggattttctagggcacttttaactgtgcagtttttctttagacttgactttggcatataacctgcaaataaggtgtagttctaactagcagtttcaaatgaggttgcttttataggatcttccagattttcttgccattattcgaacttggttacaacagagttcatactatcatttatattgtctaccttttaagacacattttctgtgaacgttccacatctgtatactttgaatagccttgcacaaataccataagtgaagctactttatttggcctcttcattctctcttcctatagaattctgtgaggttagtactagaac

SEQ ID NO: 116009 - DNA, 1668 bp, Homo sapiens
gctgaatgctctaagctggaacgtaggatctatagccttgtctgtggcccaagaccttggccttgtgtacaaaaatgacaaaatattgcaatagcaaagctgaacatctaacactagctatctcttgctagatctccttgctcagcatataactataaatacatgtaaaattacatgtatatggctatatttttatttgcttgctcctagaagagaaaaaaaaatcaactttgaatcacaactaggaattgatgctttaatttttggatactttttcagaatttttaatttactatggtccggcctaagatcctctgttgtatcaggttttgtgcacaaaagaaaagcacaaaagttgaatgcacatggggcatgtgctttctgtgcaccaaatatctggatgaggttcttttttcaggcctacagtcaaatctgtgtccagaattttttgacttttttgctttgtataatcatagaattcattgctgctgatttctataatgattcatgttgtcatgtgtctcttaataactgagggctgtcagtaacctgtgattttgccttttctatagtcttactcccatgaagaaccttggttctgatggagaaagtgaaaagctttatttcttcccctagatatctttatatttctattatattttttagttgtgtactgtgtactagagatttttttcagtttgttatgaacacaatttggtaagccctaaattggttctgcctgtctccaaacagaaacatctgtacaaatcttgttggtatagactactttctggaaaatggtcaagataagttcatgttttcttgaaatttctaagatagtatatggtatcacttgtttaaagcaaatcagactgagtttgacatttaattcaatatttctggtattcagtaacgggtatatatgtttgttcttccagtttgggtcagtttaaaagatatgttgcaaagtatacatagaaaatgtgagcaatgcctctctttgccttttgatcagaaacttcagcagagcggtaaggattccacatgatttaaactgaaatgcttttctttgttgctgtaagaacttaaaatgtaaaatacctttttcagtttaagtcctgtaaacaacattgaagcatggagatgaggcaaggaatagtactcactgaagttgaaatgactgcccacttcaaaatcttcattgtgtttacacaccagtgtatttatacaaatcagaggcattttgtagatgctttgctgacttgttcagctctgtaaaaacacagaaatcagacccattttgtaaagcggaaaatcatgttacatggaacatgtcctgtatatatcacatacatggtaatggagtcttaatgataagtgcaagataataatttaatgatgggattagtctgatcgcttaatatgcacaatcctggaagtgaattacttgcatcagatatagtgatatttattattctgtacagagagaaaaatacatataaaacatatgcttacattacatgcacgcggatttcatgctccataatcttttctattttttaatttacctttctgtaaatgatgtgcatggaatatgccttatagaaaaatgctgttcataatttgactacgtggaaaagtgcctatatggtggtaatgctagtaagg

SEQ ID NO: 116010 - DNA, 1022 bp, Homo sapiens
aaaaactgcaggaaagcctattttgttctagtattaacaggtactagaagatatgttttatctttttttaactttatttgactaatatgactgtcaatactaaaatttagttgttgaaagtatttactatgttttttgatgttcccctatagagtattgtttcgttggtttttgttgttgtcgttgttgttgttttaaacagggtcttgctctgtttcctaagctgaagtgcaatgacaccatcacggctcactgcaacctcaacctctggcctcaaacaatcctctcatctcagccttcccagtagctgggagtccccacaggcatgtgccaccatgctcagctaattttttattttttgtagagataggggtcttgctatgttacccaagctggtcttgaactcctggcctcagacaatcctcctgcctcagcctcccaaagtgctgggattacagacatgagccaccgtgcctggccttgaaaattgtagtttatagcctttaaaacttaattcttttattgtttcctttttcttctaatgcttatgtaaagaaattttgatattatagaactgtagaattgtagaagtgcaaacttcctgtattctttcctttcccagaaactgttatttttgttgtatattcctccagatttttctgtgtatgtactgacatatttttgaatgttaaaatgtttatacttactattatacaaaattcttgttttataacctttttttcacttaacaatgtatcttgactatctttctttataagacatgagatgtgtaaaacatctcattcttttaacatctgttacatgcatgttgcagaatttattaactagtcccatgttaatgtctgagttggttccatatttttactgtcaaccagtacagcactgaacacctttatgcaaagaggtagaatctttaactttattttggtgttgttgagacaaagtttctctcttgctgcccaggctggagtgcagtggtgcaatcttggctcactgcaacc

SEQ ID NO: 116011 - DNA, 1030 bp, Homo sapiens
tcttagctttcagccattgatttaacaaataactgagtgcctattgtgtttcatatactattctagctgttggggatacagcattgaacaaagcagacttaatttagtatctttaaggagaatatattctagccaggtttatttggttttcttagccatgttaaacagtcttttgagaatggtaaataatgcctaattcaaattgatacatttatttttaaacaactcacaataagtcatttatcacatatgcatgtttttatctgaggtttaccttggatttataattttaagtacttttttgtctgttaatttgaaatttttaattttcttttagcagaatatgttctataaatagactttcataaaaatctaaagagcagctgtattaaaagcatgctttcctgcttttatgggcttgatttttaattttcaaacagttttggaattatgttctctttaggtatacagaagagaagtagaagaaaatgggattgttctggatcctttaaaagctacccatgcagttaaaggcgtcacaggacatgaagtctgcaattatttctggaatgttgacgttcgcaatgactgggaaagtaagctgtcattattaatatattttaatctattattttgaatttaatatcaaatccaacctagttttctgcatctcctacatagtttacaaagtcaacgtagaaagtatttggaaaatcatatagaggactagcaatacatttatgtagagcttttcagtgtatgaaatgcttcctagtatgtaatttgatccaataacctcagtaatcctacagtgataggtaggtattattgcttattttacatacaaataaagtaaaattcagataggcaaagtgacttgtcaaaggcaacaagagctatatggtggagaagccaagactgaaattgaagatttctgtttcatcatctactctttcctaaactgtttccgtggtaaatcctaggtgaatccttttgtgattactttagaattattttatttttttagaca

SEQ ID NO: 116012 - DNA, 1044 bp, Homo sapiens
atcagtggcataagaaaggtttttcaccttttttgtattgaaatctttgacatatacatatatatctttgctcatctttgtgtatctttgctcgtatgagagcaaagatataggcaaagatatgctctctctctctatgtctttgttcataccagaccttcctgatatctccacataatcttaaatataggaacattagactggatgatctctgtgccccctttatctctactcttccattattttatactttaacacatcatctctgttttatgatatagaatggaatatttcttttttcctgaaaatgcttattttggtcacttgatacacattaggccaatatgtgttacttgagtgacccatcttccttcttttcatttctgtctcctgtcattaacctggatatctggaatgtggactaaactcttcaaacactatgtaaaacctactaacctttgtgcatttggttgctcagctactaagagcaccatttctgaactgaagttaactgaagaccattctgttttagagattatgacataccttttggattctcatgcctttttcctcccttctcaaggttgaagagatggtgcagaaccacatgacttactcattacaggatgtaggcggagatgccaattggcagttggttgtagaagaaggagaaatgaaggtaattccccctgaaatgttatagattgccaaaggcgtctctgtttcagtcatattatcattactattgatatgaataaggatagcactttcaacttacctttaaaacaaattattacatgtgatcaaagcagtaccatatattgagcaataaaatgtctttttgcttttctggctttgcctttactaaaggtttttatgattataatataaatatatgattaaacctttctgttttgactaggccatgaagaaaataaaatttagagaattagatatgaccaggtcacaattagctgatggtcctgtatttggatatttccttttgttttgtttttttaacatactgaatgttgtgcctagatg

SEQ ID NO: 116013 - DNA, 1036 bp, Homo sapiens
tgatctgcccacctcggcctcccaaagtgctgggattacaggtgtgagccaccatgcccggccctgcgtatgtttttaaaaagagactcatattcataatgaatctgtgacaaaactacataatactgggagactttggtttattgtgctaagctccacattgcattaaaatcatatcacagactaatcaaaaatgcaggaatacataggctataaatgaaagaaaatataatgacagcaaagaaagaatgtaagccagtaataaagaatgcctaagaattaggggttcagaacccaaaccagggccctcactgtagtgctgtagaacagctgaattgcttttaagtccaggtaactatatcactgagaagcaggtgcctatatttttacaaaattttgctgacagcttacttcttcgtaatattaataaccttttgtaaaactcatgtatgtaacttgagagaaatcttgctggatttttttctctaatatatggtgctcatgattgatcagatcctgttttagcctttgattatgtactgttttatatgccagaagaggtaaaaatgaagaaaataacattaaggtcttcaagtatttgttgtccttgctaaagcattagttgtcattagcagacgtggactctagcaattcactgttgtaattaaattgtgtgccttatgttcagcagttcctttataatagatgactaattcccaattgataagattttttgtttcagaggatgttacactgccttatcagccattatcaaaggatctagcaagttgattctgtatagtcacacttgagaatatagcattggatgtagatctggagttaatattagttgagaaacattgtgttatctggaaaactcttccagttcaacacagtgtaaaattatagtagtgactatacagtagtgttacattttacagttctcacaccctatagagacttttgtattaagcaaaataagaggctcaaaggttattcattaacattagaaacacttatgttatattacattgca

SEQ ID NO: 116014 - DNA, 1039 bp, Homo sapiens
taaacctgtgagtcagccttccaggggcggcctgctaaggtagaatcattggaatgatttggccagggtttggataggagagaattggcagcagcgttaagattgacccatgataaataatgctatgcaggtagcagggagtctgactaggagcaaaatcaacgaacttatcccttgcctaacatagtatctgtggagtcagaaagaagaggttaaattgggatatctgaggcaagtatcaggatttgccatgtctgcggagtagtttcataattctaatggttataagcactaaggcgttcactaagtgaatgttggtagttccaggttatattatccattcttgagttacaaaatacactttaaaaccttcccatcttaatattatatgtttttttagtcacagagtgaaaaggtgagattacattggcctacatccttgccctctggagatgccttttcttctgtggggacacatagatttgtccaaaaggtaagctaatgtcagagtttactaaaagtacaccttgtattgttcttcattgttggtggaaatatcttttatttgagacggagtctcactctgtcaccagagtggagtgcagtggcgcgatctcggctcactacagtctccacctcccgggttcaagagattctcgtgcctcagcctccctggtagctgggattacaggcatgtaccaccacacccagctaatttttgtatttttaatggagacagtttcaccatggccaggatggtcttgatctcctgaccttgtgatccacccacctcagcctcccagagtgctgggattacaggcgtgagccaccatgcccagccggaaatatcttgtagtatataagttttctccccttttcattaatttaagtaatgagactgtttttggttttatatattgtattccatatacatcctccaaaacagttagaaattttgttctgaaaataaagttctttcatttttatttaaggggaaagttgggggtgggcaaataaggagtggctagtccaaaatagt

SEQ ID NO: 116015 - DNA, 1046 bp, Homo sapiens
aatgtttactatgtgtttgccactaacaatttaggttactgttactagattttcagcttatttctctatccttttttcgtctgtaatttgtaaactatttagataacaagttataaaaaaaggttaatctagagttaaataactgttccatataattcttacagaagatattaaagaaaatgagattacatactgcaaaagttatttctgtacaatgccctaatgtggtatttaaatttttatttaatgaagagggaagatttctgacagtcactgggacacatgggattctgcttttttctatatttaatatggaaaagtaatggtgggagacatggcttatacatattgacagcaatataaactgttttccaattttgcttgctgagtattaggacattagctgggagaaaatgtttcctaaagtcaacacagaactgcactttttcatcaaatctttttaatcacttaaaagtattgtacttatattatcgttattgcttggtacatattctcagcttgtctgatactgagaatgaaaaacaacattggggtaggaataataaaaataggtagcaaagtaaattagtatcccgcaggttaaaatattaccgtaactgaaaacagttctatcatttttcagtcacacaggaagtccatgtacttcataggcaaataatgattaagataggaatgcttatattgctgttcagttcttagccccttgttctttttagtagtactcctctgatatatagagggatagaaggaataattcagcactttaatgtgttatttaattctcacagaagccccattttacataaaaatgaaattgaatggattatgagaatattgattattgattggtaagtagtaacattattttttcaagaacagcaacctaaaatactcatacagttagctctaacaatgtttacaagtcttaaaactattcctgcaaattgttgtattacataaatgttattgactcctcaaccatggttttttaaagtaatatttgttaattataaagtaagaaaata

SEQ ID NO: 116016 - DNA, 1075 bp, Homo sapiens
cccttccagtcatggtctgaactagtttttcaggtttagttgggtcctcttggccaggaggagggtacattcagctagttggtggggcacctagaattttatttttggtttacacccaaatacttcaaaaagtaaatcttaaagagagaagaaaggtcagtgatttttcaggtgggttcttctgtctgggaaggtgcttagcttttaccaagatagtaaaaggattgggaagattgtacactgagtagtgaagaaagaagatatttagatagctagtcatattaactaatgcaaccaatgaagagatgtaacttaacaagatattatgtcaaaaagacagggagattgttaaaaatcaatacaaaaagtttaggaagttcatttaaggggggaaaagccagaagatttgactgctgcttcataataggatgctgaaatgggtagtaaacataaataaaggtactccatgctattaatcatcagaaaaatgcaaatgtaaacctcagtgagataacaccatatacccatcagaatggctttaaaaaaaaaaacaccaccaccaagtgttggtgaggacgtggagcaacaagtaatctcatacattgctgatgtaagttataaattgtgcacacacttggaaaaaaatttttcaatatctactaaagctgagcctagaggtcccctctgctcagatgcatattgaaaatttgaagctctcacaagtattgatgtcataggtccattcattttaattaagctgtttagattatggggactagaggccaacctatattcccttgagaaatgggaaaattcccagcaaccaagaaaatttagaatacgctacctgcaaggcaagttggaattgtatacttaactcaagtgcttttattgttaacaaaactccaatcacctgccctcagctacaattaatatatctgtttcatcctattatttcttttctcttttttgtaattcctgtttattcataacttttgctctcctatcctattcttagtttctgtttccttggtttgtcatttttctgtcttttgatttcaacccctaactgcct

SEQ ID NO: 116017 - DNA, 2150 bp, Homo sapiens
agcttttctttcttggtttattgatttaagatttctcccagcctaaataaaattgactatgttacctttcttttttttctttgttttagctttaggactatatatttaaactttagtgttaagtttttaaaacattttctaagtcttagttatcttggtaatgttacttcagaaaagtctaaatatggaaaaaaattattgtttttctattatttaaaagagaaatgagctactattcaaaaaatctcaatgctctggagccaggccatgcatgcagcctctgccatgtatgacatatgtgagcttggctgtgttaattaacctcttcttagtgtttattctcagctgccatgttggtacttctgctcaaagtagtagtaagacataaatgagataatatgcaaagttacttaccagaatgactgatgtatttccccatttatggcatataggaaaagcaagagacttggagtctcaactaaattcactaaattataccatcttgtttctggatgaagagttttacgttaggtgagagaagctaaatgtgcatataaggagaacagcctgtttcatgttatttaatcagggccagccgtctcactagtgattaaagatgttattaagtagaattaatttctatatttttaatggagatgacctttaagggcttaatcagttgatttttattacagggcaagtttttttctgttttaattaaacatattttattttgctcacttttctctgttaagtccaatgacagttcctttgcaaggttcccgttttgtgttttcttcctttagtgaagattaatgcacgaagtatatatttctcctttagtgttgatttctttacatctttgaacaatggatagatttaatctttgggtctctctcagagcagtgggacttaagctgagataacaaattttgagtgatttttagttcctgaaaaaaatactcaactgcagggttgtgatgcattgtacaagtttgccctttctttttttttttttttttttttttgagatgaggtcactttgtcacccagcatggagtgtgatctcggctcacttcagcctctgcctcctcggttcaaacgatcctctcaccttagcctcccaagtagctgggactacaggcatgcaccaccgtgcctggctaattaattttttgtatttttggtagagacacggtttcgccatgttgcccaggctgatcttgaacccctgaactcaagtgatctgcccatgccagcttcccaaaatgctgggattacaggtgtcagcctctgcagccagccaccctttcttatttttaaagatagtttatttgtagactaggagaaatcattgttaattgttgttaatattatttaatgtactaaagtaaaatatgtgatgtatgccaactgagcagcctatcagtgaatatttaagtgaattcatatttagaatatgaattctaaaagtaaattgttgagttatttaacatgtaagaaggagaaatttcaaatgttgtcattgttttttttcctcccatagaccagggctagtgagatgtttcttgattcattcttcagtatcattaaggaatattgattgtggaagctaagtttagtaattttactatttaagtatgcattatcgtcttgatcctctatataaaactgtacaggcataatgatgataatgataggagctaacacttattgaggatcaccaagtactaatcattgtattaagtgctttatgtgttttattttctccctactatcctgaaaaataaagtagtattttgcagaagaggaaacaggtttagattaaaattaagtaatttgcctgagactgtactgtcttttagtttgtgatttctgagtattcaattttgtgttaattctcttgtctgtctgttaccattagtaaacggactgtttatgaacaattcccatgagctaacctcctgcaaattgtggtgtataatctgagttctcctactatacctatgcaagataaatatgaactcatttttcttttcgcccgtggattgtcaaacaggacagtatattatattggtaactgtttcagtagcggatttcagactccagagtctggcaaatgtggatttgaatcctggcactactatgta

SEQ ID NO: 116018 - DNA, 1053 bp, Homo sapiens
tcaaatgatctgtaaagaccagatacttaattgcttcctctatcctacaatctcctatcttgttaactccccttagttagcatatgggcatatgaattaggcctaaactatcagaatgttgcgctgtccttctctacccccccttttccttgttttcctctccagccttactttgattctataacaggaccaatacagagaatcaagagacaggaagtttttcttctgatagtgctggcagcaggagaatgcagtttccagtagaagcagtgccagtagtggctttacagggtccagaagtggaagcagtcctgtccatacaaatggcacctgtggtgcaatcccagcaggggtttttgttgcctagtctaccctggctcctttccattttctgatctcagttctttgtatttcttagcaatatgaactgcctaataccttctaaatgaattccttttcttcttaagtgagcaagaatcaatttctgtggcttacaatatagagcactgattgattcatcttgtttgtacctaataggattcatttagctgtcttgttgagtaaagaaattctaatattttgtgtttatttgtaaaaacagaaaagagatgctagacttagacaattttaagtcttcagcctcacaagtgtttggcaggatatttggaaattatcagatatcctactgtcagggtagaatagggtcaaatctccattgtgatggtggtgctaagtgtctgtaactctaacagaaaaatcagccaaccatttttctgactggtagaacctgggaaagttacttgctttaaccagggctattagaaagcaagttgaaaacttgaaaaaggagagagctagaggaagggatctcagaattgtatatataaactcttcaagtctctggttgactcctgaaccatgcatgtgtgcacctgactgagagcagtctgaaccatgtccgtcatggcagagatgtgagagagctaaaactccattaaagaaaacctgccatcattttagctgtaggaaccaggcaaaagaacctagatagta

SEQ ID NO: 116019 - DNA, 1099 bp, Homo sapiens
atatattccatctttcaataacatgattcagataatgtaactcaaatagcgtgaagtagaaagtacttaaaatatttggtaagaggccttggaagaagaaaaacatgaaaaagggcacctgttgaaatctgggtttcagaatgtggaaataacttacagaaaattatataattttaattatataattatacaatgtattcatttgctagggttgccataagaaagtaccacaaactgggtgacttaaacaacagaaatgtattgtttcacagttccagaggctggaaataggatcaaggtgtgggcagggttggttccttctgttggcggtgagggagaagctgtttcatgagtttccccttacatctggtgtttgctggcaatctttggtactccatggcttgtggatgcatcactccaatctctgtctgcatgtacacatggcattctttttatgtatttgtctttttccagatttcccctatttatcaggacaccagtcatactggattaggggtccaacctactccactgttatctcattctaactaattaaatccacaatgctgctgttttcaaacaaggtaacattcagaggtactgggagataagccttgaacatataatatgattttgaggggggcacagttcaacccgtaacacaaagtatctgttaagccaagagccccagtctgattgccatctgttattttatgacgtcactgggcttaagaaaattgtatatgtggtgcattttattttgtgtaggggttgtaggaacatgactgttaaatatttataaagcaactcttaattccgaagtgcttaaaacgttgtgcatgggccgtgaagtcaaatctgggttcagaccttaactgtgtgtattagtccattctcatactgctgtgaagaaatacctgagactgggtaatttataaagaaaagagatttaattgactcacagttctgcatggctggggaggcctcaggaaacttacaatcatggcagaaggcacttcttcccagggcggcaggagagagaatgcaaaccaggcaaagggggacaagctctttataaaaccatcactcccatgattca

SEQ ID NO: 116020 - DNA, 1038 bp, Homo sapiens
tttagttattgtcaaatactccttcaagagtaccactcctcactcctaccagtagtgaatgagtgcctctgtttctccttacccgcaagtattgaggaagttgggtttggcaaatgttaaagtatttgtcaaactgctacattaaaatggtatcttattattttaaattgcactttttatccatgaggttgagtaacttaataatttatagcccatttttatttctttttccttttccaattgcttatgcactttttttttggtttttctttcctttttggcttgtagaaactcttcatatggtaattaaccatttggcacatttgttgcaaatattttcccccacattgtcacttgtctgtttcttctttgcttgttttatagtctatattaggccctagagaaatcttagatttttacatactcttattgacatcttttattacggcttctgtatttacttgtttagataggtgtttctctctcaaagactatctctctatatgaatgtagatatattttcatctaaaatttacacttgaattttgattcctgtggaagttattttagtttaaggagtgatattgatgtttttagttttttttccacatgactaattatgtatcctggtagcattaattaaataactaacctttttccaagtggtttcaaacaccactttcatcatatattacggtcccatatttatttaaggttgtttctggactctcttctgggcatttggcttgtccttcttatcctctgtttaaaattatattgtgggtatttcatcaaccagttccttaaactgctaatgattcattggtgaagatagaagtaatttatttgcagttactaaagttaaaacaggtagagatttttggtataatatcttcagatagaattagttttcctaagttctgtagtttcatgtctcaccttaggcatctgcctttgtatacctcatatcttgttgaacttttaaaatcaccagatgagtagaattcctattattcttatcataggttggttttaggg

SEQ ID NO: 116021 - DNA, 1051 bp, Homo sapiens
atggggtttcactgtgttggccaggctggtctcaaactcctgacctcaagtgatccacccacctcagcctcccaaagtgctgggattacaggcatgagccaccgcgcctggcctacttagtttacatttaacttagtatatagaaacaactgttcctttttgcactcgtagtcattagacatgaataatgtttaagatatgtaagaactataacaagtaaactggcataaacaggtttgggaacaaccaactgacttgttaagcatgtaacccaactagtgagaacagaagtacctgataatacaaaaaatagcatactggttaagaatggtcagcatgccatgggccaaaaaaaaaaaaaaaaaagtgttggctaaggccagacagttaaatagaggtcagttaagggagctgttgtagttaaaatctgaaaatgggtacgttaaaacaaaaatacagagtttactaactcactcaaagagaagtcacattttgtgatagaatttatttggcttataaaagtgaaagatatatatataatacttcagatttccgttaatatctaatccttacttagcgtatgtttgttatgcatttagggaaaatcttacagtatttttacattattttttatacattatttccccccttgtatattcaaagtttgaaaacaaaagtttagaattgaatatcaagttagagaaacacagaagaaatatttggaagtgttgataatgaaactacgctctctattcttagagacaatttttaggaaatagctttaacataaaggctcagtatttattttgactggtatgtggtacattgtaatgtgtttagaaattgtatctagtttaatattttgggtgtttttcttccgagatagatcattattcatatcaatggacagaatagtggattgaaatgtaccttgcgatcttgaagtgtttttccttgatcctccactccccttcttttgcgtattattattggatgtttattagttgcaatgcttaactctttgaaaatagtataatgattgatgtaaaaa

SEQ ID NO: 116022 - DNA, 1076 bp, Homo sapiens
cttcatgcagtctttggtgtcagaatgagagactacatacataactgaacatacttctctgttgaatatgttaattatgacaaggaccaaaacaaatatcatgaaggtacttaggagaggatgaaagcatacgaagaataaacaataattttaaccaaaatctggctttcgttttattcttcaaatgttagaagaaaatgttatattttatttcttacagatttatttataatattgtaaaaattactgaaaatcattatgcaatctagaaaatctcaacttttcactttttgtaatcattttactgtttatgcttagaattaagttggacttttcacgttttggttttaaaattagattgctgtttcacaaagtttggatttctaaaatacttctattttttgttttcttctctcttcccttccccttcccactcccagtggacaaactacattcatgggtggcaggatcgttgggtagttttgaaaaataatgctctgagttactacaaatctgaagatgaaacagagtatggctgcagaggatccatctgtcttagcaaggctgtcatcacagtaagttccttttcttcttcattcaacaaatatttattgagtgtcagctacataccaggaactgttctacgtgttcaggatacatccgtggataagataaagatccttgtccttgtagaatatacattctaatacttttttccataaagtgattttactgtggtttttactacatattgttattttgcatagacatgtagtttttatctggtgggtatatcaaaccagtttaagggcttcaggaaaaaaaaatgtttgaagcctttttatttgttgaggctgggacagttactttgtaggttactgaatatttaaaaataatacatcttgtaagtaacattctaaaattttaacttaaaaatataaatgtaaattcatttttaaactttttaacattgagctaatgccatctctttgtggagttgggagaagctgttctcatgttcctcacacatgatttgctatttacagttttgatttctctaatgtggaataaaagcc

SEQ ID NO: 116023 - DNA, 1027 bp, Homo sapiens
ccttagttcagaatagagatattgaatcggcacatgatgggtacaggaaatattcatagtaacttggaacatgtgagaatggagactgatctttagtccaggaagagcattacttaataataaaatatttttgcggtaaggggtcgagggtaaggaaaagatgttttatcttttatatattttttaaaatccctgtatcaaaattttagcaaagcagtcattataggactgcaggtggatgatctcttgatattacatagttgtggggattttttttttaagtttttgctgtaagaagattcacgtagcctttttgacttctctctcccttcctgttaaacttttttagacatggctggagctagcagttaacttggagagggggagctgggccagtccctcaacaagctggtcataagatactatgtcatgtgcagccagtggctattaagaaatcaccctgtttccagtattcatatttggcaaatcacttggacattatttgtggaattgtttcatattaggcttttataatgtctagaaagctaatgagaagggggccaggaaaggcatgagtagtcagaactaaggattgcaagtgttgacttttatttgtatagcagcaaaattatgttgtatattgatgctgtgatcattcttgaaatttcagtgcaaggttttcagtaacgagaagctcctcaggatttctttagattaaatgtatcctgtaatttaggaatctctattgaacacattgtgtagtaggtatacattttcagttggtaataggaagtgggttacttgcttctcagtgattttggtagtttcatcactgctcataagatgggaagctgactgccatattagtattgtgatgtgttaagtattttacgaaacaaattgtacttttgacctactgataattacttttttgggggttgggggagtggagtgaccgggggaaaaagtaaccagtgctctggagtaggtatactatagataaaaaaatggaagaccaatctcgata

SEQ ID NO: 116024 - DNA, 1031 bp, Homo sapiens
ggccgctgagtcccgcgtccactcacacctccgctaccgccgccatcttcctgcctggcccactatttaccctcccctcccctgtcctttcccctccccttcgtcctcccattctcccccactactccccgccccgtccccctcccggcgtctgacgcgacacgccgagccttcgggatcctcctcccgaaccctacctccggctctcccgggtgacgacgggtagaaaagcaggaggagcggagaaaggagagggcggggtagggatgcagctgtgctgcattctgggaagggcgttggtccgtcgctcgcgcagcctcctgggagttgtagtcgcgatcctgaggtaacgggtgagtatcccgcgcggggatcgcttgtccccttggggccttgtcagtcggtgggtgggcttcgtttgacagttgcgtgaccagcccctcggcctcgcttctatccttgccttgtgtgtttatgacgaaccctccgggcttgcgggcccagacgtgagagagctttccgctgaagatgacgggcctgctttccagggcggcttgtcgaaagcccgggagcatctggccgcttccgcctcaaccatgggctggggttttgtgagctactagtgccaagggttttctttccaccagaccaccgctgtaaatctcgagggtcttactcattagaagttagaattcacatttgacgtttaaaggaagaatttccttagtaccttctcacaagcacgcacttcgcatttttagatttctagagtttgctttgtagaaagtaattttgaggttgtcagagaataaatgacgttagaaaggtttttaaagtaaaacaagaatgtgagatgatagcctgggattttctcttggttgtaaatgaatatcttactgagaaccacgttaaccatgcctgcccctcaaagataggaaaggttggatatatagaaactttctcgtattagaaataccgaagtgcagtggttttgtgtgtacaagggattaggcaataggaggctatttttg

SEQ ID NO: 116025 - DNA, 1386 bp, Homo sapiens
tatttttttgtgtagacagggtctcactatgttgcccaggctggtcttgagttcctaacctgaaatgatccttccatcttggcctcccaaagtgctgtaatcacaaccctgagccactgcccctggcctaattttatattaaaattgtaatattctagattgtagagcttaaaaaatacagtaccaaaaaaggtactacaggagaaatgttttctcgttttctaaggacattagtatgaactgtcccttaagacctgtgcattttactgaaacaaaattagtctgtttagcatcacttttatatagataggtatttttgccgacatctagtgcccaaagaaactcccagcctatctccttcatgttgattcagcattccaagaaacaatcaactcctataagataaaaacttagattttcacacttttgagtatgtttatttctgagttaaagttttcattgttaaagaacctggaaggctttttataaaatatgcaactcatcatccaaatagaaacttaaaaacttggaggctcggcgcagtggctcatgcctataatcccagcactttaggagacagaggcgggcagattacctgaggtcaggagtttgagatcagcctgaacaacatggagaaaccccgtctctacaaaaaatacaaaattagccaggcgtggtggtgcatgcctgtaatcccagctgcccagctactcgggaggctgaggcaggagaatcgcttgaacctgggaggcggaggttgccgtgagccgatatcgcaccattgcactccagcctgggcaacaagactgaaactctgtcttctgtctcaaaaaaaaaccaaaaaacaaaaacaaaaacttggggcttggggaattgacctttgaattgacactgtaggtaatatgtttatatcagaatattattcatcctgtcgaaagaagataatttccacttattgttctataagaatgaatttaatgtctttaggatgaagtagagtatagatttttaaatttccctctgtcccattcttcttcactagaaccaattaaatgaataaaaaaaggagaaaggcagtagaagagaatacatgcatggttctcacaaggcaggccttctgtctctggtaaaaaacttgagttttagtgtatatactcttggtttaggatctgtggaatttcattatttctgttctttctctcagtgacacatgtaaatgagaaaatcattcaaatccagtctaaaataatttttaaagttttttcctcttgttttgcaaaaatattaaaagctaaagctaaaaattcaaagttgcacctatactttcatttttgtcatacaaaaattgtggccatatggtttcagtgtatgttttcatgtatctgt

SEQ ID NO: 116026 - DNA, 1033 bp, Homo sapiens
agacactatgttcagtgatgaaatgatgggcagttttttgaattattttctacattttctttaatgacttaacattaaatatttgaaaataccttgtaaggagtatttttttaatgcaatagataactgatgatccaacccactaaggcctttgatacccactgtggatcctacctaggacatactgttcttttctgaatgcaaacctgtattcatctcagagagcttgtgctgtgctaagtactgctcacaacaatcctgtgatttagttaactactaataaattcatcttacaaataaagaaactgagatgtagaaagattaaataattttagggtcacctagctagtaagtagtagagctaagttttaaatttaatcttctgtttcctgagtatgtgctcttagccaccaggttatactacagtgatgctttccttcagacatttttcttatgctttgttttgttttcctccataggggtccagattttatggaaatgagctcaagaaagaaaagcaagtcaaccaacgaattgaaaatatgatgcaacaaaaagctcaaatcaccagccaacagctaagaaaagcacaattacaggtattaattaaattgttaaataaagtggaagctggtagaatagtaattgacagttaaaatgtattgtcaagtcataactgaaaacaagatgaaatgtaaatgttcattatattgtaaagcatacatattcagcaaatgaacatactttactttgctaagtgttgctctgctcatttacataaagactccacacatagacattgtcacctctattatacagaagagtaaatgaagtcttaattaagttgagtaacttgcccagcttgataggacaggtagttagcagaactaggatttaatccaaagcctatgttctttttattgtatacatcgcagctagaaaaggccacgggataaatgtggaatgttttctgcaatgctgattttgcaaaaaaaatttgaggaatatgttaactaattaaattggagagtaa

SEQ ID NO: 116027 - DNA, 1001 bp, Homo sapiens
agtttggaaatatccaagttgcagggcactgtgtggtagactgacaactcaaagcagtcaaatttctgatagtaaaacaagtcatggcaagaggaatttgctctttatcaaaatctgatccaatgttaacagagctctatagtctataaggtaacaataaaattagattaatctaatatgctacaaaatccttctcttgtgacagagttcaaagatcataaattttatgttttctttatcaaactatacaatgtgtgattttttgatacatatgccttctcagagcacaagataatttttaagtggtcttctattatgatgaaagatgatttatttgtcatatcatcatttttaatgcttcacagcattccactgtgtggaggtaccataatttatttaccatatcccaccttggtttcagttttttatttcatacgcaaccctgtgattatcattcttatctttgtactctagtgctgttattttgaccaaagatggtatcattttacattttcaacatgaaagtattgattttctcacatagttgtaaaccattaatatttccttattatgagaatttcctcttttattctgtttgcgagtatatacactaagttgctagcacaagagaccaaaaatgtaatattttaaataagagctgctttctttctcacataataagtgagtagttctagctggtgagtggctgattatcatttagagacccaggttctttaaatcatattgttccatcatcccctggtgttatccttacctgaattaacaaaagtgaattattttccatccatattccatctcctggttaaggaagaaagggaaaatattgaaggcaagtacagtaatttgctattaaacaagtgaaaaagaagttgcacacattacttcagctgacattctttggcaagaatttaagttacatggccacacctaactgcaggagaagctataactttagctgggtgccatgtgcccagctgaaa

SEQ ID NO: 116028 - DNA, 1049 bp, Homo sapiens
ttccaggaacaatattcttataatttttgttgttgttttttttttttggtctgggtattgtacttggaaaattattcctcataaccatgcctatgtcttcttttagtatttttatagctcttggcatactcatatctttagtcaatttggaatttgttttgatgtaaagtgtgaagtatgtttttcttaaatggtgttatgttttccctgcatagtattattttccctaagtggtgattcacttgtcccaactccatttattgaatcatgaatcctttcttcactgagttgaaatgaagtacttccaaattaaaaaattctcaattgttctttgatttatttctggactctctcttctaatcaattcagtcttttcctgtatcagtaccatacagttttagttattgaacggtaggaatatagtttaatattctcgcttgtaactcttctttaaaattttttttgtatttctcatgcatgtttctttcaaataaacttaggcatcattttatcaaggttttaaaaaaatcagttctatccacagtaatattattttaaaattgatattaatccttaagcaacgtactttctggacattttcattttattgatctataatctacaaatatatttaacagttttaatgatacagtatataagtgatgctaacaactgttagctattcatactatttttaaagctcatatccttaaatatactaataatctgaaggaatagaaagtatctttcattgtatagcagaatttaagattttgttccagttttggttgactatttcatcagaggctctctggcatcttttgcaacaggaatggcaggaaacgtgttttatgttgattgttcaattgtttcatttgttgagcttcctccaaaagaatttgtataaatgggaggagattgaggaagtttaaggagtcaagaaggcctgagagaacagagttgttttcgtaggaaatgtgtttctattttagagtcttaaaatttccaagtactcgattttattatgtgtgatatgatagtatgaacta

SEQ ID NO: 116029 - DNA, 1740 bp, Homo sapiens
gagtacaacatgagggaaaaagccacatatacacctatagctctccacctttgagaaaacttgctagagggaactccacgttccatagatgaccccacttgctcattgctggctgtttttctctcagtttttaatgttttattatgcagctatccattgatccttttagtaatagatgtatttattgaacttgtgccatgtaccaggtactgttctatgttctgtatattttccagcttatttaatagctttcttatgatttttactttaatggtcttggtaacttccctatgttgcatagatcacaactattacacagccacctccagctgcagggtaagctgggaaagtgagtatttagcctttcttgccttgatagtggaggccggccacaaaaatggaagttagaaatgagtatgtctgctgcaaaatcacttttcttacttgcttcctttgtttatttctaccccctttcatttctttctcgttgtaaaactaagttgttagttttctctgaagaaactaaaattctttaaagattaagaatcttcactattgtatttgacatatatattaaagttcatgaagaataaattacagcttgggttttaaattttacttgtatagattaacatcaaattttaacattataaaagcaattctacagaggaacatttacattatgctacagtatcttcagttgtaccttcctgttcagcataaacatcatatgccaaagaggtactatattttgttgtatatttcctttgttgcttttttaagacattattattatgaatcaaatgtcagttgtttattttacttacattgaagcttttagttatagtgagttggactccaaatttataaagcagtagaatcatttgataaaagcagttggattagatcattcattcattaaatattaagttcctgttatgtgcctaagggtatggagagatgaaagggttagtagggaattatatttgaggataggctgtctctatgaaaataaaagcaattaccaattttaatttaaaaaacaatacaatatacatagataaacacttataaacaataataaaatataaacccataaacacccatgaacaacaaaatacacacccataagtaagtggatgggtggatggatgaatggatggatggatggatgaatgggtgtgtggacagagactgatagacacttaataaattaagattaatgttgtggttaatggtgtttcaatattatgttgtctaaaagtatgttaacttttttaaaaaattaaggttgacagatttgcaatggaattagaacaaagccgaaatttgagcaataccatagtgcacattgacatggatgctttctatgcagctgtagaaatgagggacaatccagaattgaaggataaacccattgctgtaggatcaatgagtatgctggtaagtaaagatcaaatacaaaaaggaaattttataacgtactcaagtaagctttactgtttcatgaagggggaattctttattgaggtctaccagtttgctgagtatttttctgggtgccttatatatgactcaattactgaatcctttcaacatactttaaggcaggggaccccaacccccagttcacagattggtattggtccatggtctgttaggaactgggcctcacaacaggaggtgagcgtcaggcaagcaaacgaagcttcgtctgtatttacaaccacttcccatcac

SEQ ID NO: 116030 - DNA, 1057 bp, Homo sapiens
agtatgcaggcagctgataagtctgattccaaaacactgttttttgaaaggaaactcccctttcctacaaatcatcaataaatatttcaaaaaatatatttaattttattaagatataacaccataaatttatgtatgtttatgtatgtgtatacatacaaacttgctgtagccatgttaaagctaaaccaactgcttttgaaatctacaaaatattttctttcctacaatttctgtcctcctaaaaatcagttattgtttctaaattcaaaattattgttatatttaaacaaagattaccccttttgtatgttgaacaaatagttttcccttctactaagcataactttttgtcctattaaacatatgaaagtatatctacaaattaatgggagtgattgtttgattattcccactgataaaattcttttttggcgaatttgatggatttttgaaatgttctaacttggcactgagagttgcaactgagatcctacagcagttacctattgctgcataacagcctcccccagtatttagtggacagccaaaatttatttgctcatgattctgtaatttgagcagagtgcgatggcgatggctcaaccttgctctacctggagttggctagggcaatttaactgaggctaaaaaatccaaggtggcttcattcataggtctggcacttcgactgaggagattggaatggattccagcttcagaactttctcctctccattgttgcttcaacatttagtaatctaccccaaaatatttacaatggttgctggattacaaaaagcaaaagcctaggtttcagaactcagtgtcacttccttcacattatttttatcaaggcaagtcacgtggcatgaggaactagaacccacttttgataagagtaacttgtaaagtattgtggctgtgatctacaatataccacaaatctaaaagttagagaaattcttatttaaaagtttgtttgtcctctgctatagatctagcttttatgtcaattatattaaacttatttactaaaccattggttttgtttcta

SEQ ID NO: 116031 - DNA, 1024 bp, Homo sapiens
ctgcatatagcatccagaatacatcattctttttcccaattctttgcctttccatgcagttttcatttgcttagaaaacttcccatttcctcaaactttgaactgccttaatgataatataaaattaaatttagctattttttcttaatgtacaatatacattttttctagaaccacattttatttataacttacagaatctactcatcattaatttcaacctattgtctgaataattacttattaatgttgttaaacagtgacaaaattcatgtattttgattagcctactttacttgccccataatcatttgctgtctaagagactgataattgaaaagggagtaatccattgcttcaaaaaggatctttgaagtagatttgattatttactaaaattgccaaactgtcatatgtgaaaaccgccattttttctattttttatgacaactggtctatcatgcagtgctggaatttaatttttgaattaaaattttagactactacatcaaatacttttagactgctatagtaaaatgtgtttaagactgctgcctgaatggaaacacttaaaaaaactgtgacctaatacttattactctttagttataccaggggtctttaaattcacccctcttatttgtattccacctcattttccctagaagtgacactattccaagtttaaacacaggtttgtttgttttttttctgtccaaggcagtctgtgacagcaagtgctttttgcatacctctgaaaaggtggtggaggagaggggagcacacttacatttggttactgcttatctctttcattgtattcctaattaaaaagagataaaatactaatcataaatatagccttttaagaagttttaaaaatcctacaaaagtttagtaagaaaaggtattttttaaagtcgtactttaactcagcaaaacttctggcagtatgccagtgaaaaccaaagtgtttttagttattttagtctggttatttatgtaagtcagagaactcttcaaa

SEQ ID NO: 116032 - DNA, 1050 bp, Homo sapiens
tttcctaaggtctaactaacaaagagtttggatggcattgaagctgaggaagttgtctgtttaaagcggccttttcttgttgttagaaaagactagcctcaaacatatcaaaacattggatgattctatttttcttcattttcctaattttctataatctaattattatagcaattatgactgtttttagctctgccaaaattaatgacttcccactcccttctttgccttagactttataatttcaagactccagggtttttttaaaaaaataatccctttatgacctatccaaaagcaatgccaagaaacatgcagatattacacatactgctttcaacattttgtcaaaggtatgattatgtctgagatgtcctggacccctgaacaaagttcacctggatgaaaaagtgacacagaagggtttgctcacaacccacaggaacatttcatgtgcaccactcattgcttcagacgggccaggcagtgctggggagacctgtttgtaactttccctgaagcaaaaatggtagatccacaatgacattaatctaactctctcacattatttgtgactcacatcatttgatgcaagtttaatatgggcatcaaatacaacttcattaccttatttaaagtgctaagggatagctctctctttttttttataggagcattaaacaataatcatcatttctcgacacaggcacagagcaaaaggttttccttatttggtgtaactttattgtttgaggatgtggaacataaagcctgatgtcactttgtataaaatcttactttattaattccttactttcacaagagaatgggggaaaatcattaaataattatgtcaaagcatcccctgagggcctcccataacaattacttgcatgatgtgttttaaaagctttacattgggattaaagtaaatgttttcattttctactaatttttttcttttttttgagatagggtctcactgtgttgcccaggctggagtgcagtggtgcagtctcagctcactgcaacctccgcctcctgggttca

SEQ ID NO: 116033 - DNA, 2032 bp, Homo sapiens
cagagaataaaccaaaatattttgccatttttaaaatggtaaaattatccctcaggggttccagaaagtgtatactttattattttttagagcttctagatttttctgcatatatacactattttttcagtaattgcactatgcactactgtatatgatgttctaggacttgcttttctcattcaacataatgtacatgaatgaatttaaatatttttcaatgctcagtatgtaatatgtaatgattactgactagtatatgtgaggagtagctgcaaagcagtgttttccaatatgtttttcaagtatggatagatattccctttaaaaaggttctggggtcagatacctttggaatgtaccattgatgtgtcactatgcatattaatatattaaaaattcataaatcttggaataaaaagtttcacttaaatttgtcaatcccaccattccccaagtttatatgacaacagcactccttttttaatgccttttgaaattccatgaaacgctagtttagtaaatgtggtcaaaaagtaattaaagcagttttcttgcatgacttgtgaagatagtcacattattcataccttttatcgatgataaaagatataatgagcactttgggaggccagggtgggcggatcacctaaggtcaggagttcaagaccagcctgaccaataagaagaaaccccatctctactaaaaatacaaaattagccgggtatggtggcgcatgtctgtaatcccagctgctcaggaggctaaggcaggagaatcgcttgaacaacccaggaggtggaggttgtggggagccaacttggcaccactgtactccagcttgggcaacaagagcgagactccatctcaaaaaaaaaaaaagtgtaatgaggttgtaatctcaatttttagcttcactttaaaatctattaataataaatattgattcttttctaggtttctggaataggaaaagttacagagaaaatgttaaaggcccttggaattattacatgtacagaactttaccaacagagggcattgctttctctccttttctctgaaacatcttggcattatttccttcatatctccttgggtctaggttcaacacacctgacgaggtatctatatgtattgtcattctgctttttcttcagcatttgctgcaatatcagttttaaccattgagatgaggctatatggataacatgttttaaaattctttcaggctagtttaattcaaaatataatgtttgaattagagtcaacagattggatgtaggaggaaagaaaagaagaataaagaatcactcctaggttgtggtgtcagcagttgtgtagagagacaagaggaatgatagtttcttttttatccctaccttgttctttgttcagaacctaagagaaatgccagtagtcaggttgttgtggaaagaaagatggccgtattccataattcaccctttaaggaaggagatgtaatgattcttcgaaagccttaaactacatttcttttcttttccggattcattcattcagtactgactactttactttgtgttaggcactattctaggcactgtagataacagcagcgaataggacaaattcctgccctcatggagtttacagactagtgtgagagatagaaaataaccaaataaacaaatgaagaaagtaaagcagagtgagggtatagaaaatgactggggggtaagtgtgagggttagcaaccatcatccaaaggcggagagacctgagggagccagccatgcaaaggctggaagagggaacaggtggaggaaataccctgggttttcttccctgccactctttcatctaggtcttaaaaagaggaaccctagaggtagaaggtaaattgttgtgggatagtaggtgaaaagaaggaaattttaaaagactgggaatcgtggaagtcaactctgggcactatttttacaattttgtcatcaccttgtcagcctgtcctcaaaatgactcctttatattcttgtatttaaactaaag

SEQ ID NO: 116034 - DNA, 1345 bp, Homo sapiens
acccccatctcaaaaacaaaataaaatgggattttagcttatgtttggaaagggaagtaaacgtttttggctaaaatggtattttaattattctttttttttctgagacagagtcttgccctgtcacacaggctggagtgcaatggtgtgatctcggctcaatgcaacctccatctcctggcttcaatctattctcctgcctcagcctccccagccgctgggattacaggtgcctgccatcacgctcagctaatttttgtatttttattagagacagggtttcaccatgttggccaggctggtcttgaactcctgacctcgtgatccgcccgcccaaaatgctgggattacaggcgtgagccactgcagccggcctcttattctttatgatatgtttatcaccatgttttataaataattggttataattccatattcttatgtccgtaaacctttctgaatttttctaacatgtaaatgacttttttctagaagttaggaagtcatacagaataatgtattctggttgggtgcagtagctcatgcctataatcccaacactttgggaggccaggatcgcttgtggccaggaatttgagactagcctgggtaacatagtgagactctgattctacaaaaaaataaaaaattagctggtgtactggcacgcacttgtaatcttagctactcaggaggctgaggcaagaggattgcttgaacccagaagttgaaggctgcagtgagctacagctgtgccagcgcactccagcatggacaacagagagagaccctgtctcataaataaataaataacatattgtatatgttatagggtagaactgttaccattaagttgaagaatgtgaattttgaagtaaaaactcgtgcatctacagtttcatctgttgtttctactgcagaagaaatatttgccattgctaaggaattgctaaaaacagaaattgatgctgattttccacatcccttgagattaaggcttatgggtatgactttttcatttttttgtttttccttaaatctgctagattttcccaaataatcaactttgggaatacagggggcccccaacttaacaatggttcaacttaatgatttttcaactttgcgacagtgggaaagctgtatgctttcagtacactcttgacttacaaggtggttacatcccgataaacccatcataaattgaaagtattgtaaattgacttattatgttttcaatttacagcgggtttatctggatacaatcctactgtaactcaatgagcacctgtattctcgccttcattttatttcttaaacctgtttacgaagttcttcctttgct

SEQ ID NO: 116035 - DNA, 1040 bp, Homo sapiens
tttgtccagcgcccaggatgtattccaagggtgaaccctatgtaagctatggactttgagtgacaatgttgtggcagtgtaggtttatagattgtaacaaatgtaccactctagtgccacatgttgatagttggggtggtggaggggtgtgcatgtgtagggaaaggggatctttgggaactcattgtaccttctgctcaattttgctgtgaacctaaaattcctctaaaaaataaagtctattagaaaaaaaagagctaaagagtctgtatagttgactccagttagttactggtattaatttaatggtattatgtgtcacatatgaattaaaatcctacatcattatactaactccaaatagttaatatttaatgatattcttttataaaggaaggtaaatctgtacttataataccagctttgaaatgttacttatagtttctctctagccaaccttttgtatatgtcatagcactagacaaaatgtttttatgcattgtgagtgaattggctttgttcaatttgaaattgattgtgattggtttaatttaggtgttcggatatctagttttcccaatgaagaggacaggaaacaccaacaaaggagcattattggctttttacaggctggaaaccaagccctgtcagccactgagtgtacattagagaaaactgacaaagataagtttgtaaaacctctagaaatgtctcataagaagagtttctttgataaaaaacgatcagaaaggaaatggagtcaccaagatacatttaaatgtgaagccgtgaataaacaaagtttccagacatcacaaccattccaagttttaaagaagaagatgaatgagaatttggaaatatcagagaattcagatgactgtcagatacttacctgtcctgtttgctttagggctcaagggtgcatcagtctggaagccttgaataaacatgtagatgaatgtcttgatggaccttcaatcagtgaaaactttaaaatgttctcgtgttcacatgtttctgctaccaaagttaacaag

SEQ ID NO: 116036 - DNA, 1056 bp, Homo sapiens
aaaattcaattattttataaattattaagtaatcaatattaaaaatgaattattttctagaatctcttcctgcattttaattgtgtgttccttttcattctaggccaggattgatgacaaagtactcaacatcaaagaaaataaaaccaaacaatcccaaacatacccttgatatattttttaagtaaacattgaacattttatcattaatttttaattgaaactagttattttataatcaatgaatttgttctttctgattttaagtttgcagatttatttagtgaaggcaagtgcaataatccttcctcagatgatgtttgcttttctaagatacatatactgattctgtgtatcttttttataaccatgagaattttacttccattatacatcaattggaaatcaatcctgttaagagataattcttaaaagggaaattaggaatgggataagaaggtgatttttttattatttttatactgaatataaaaacatttgtaagggctctcaaagattcacacatgcctatattatcataagaatttttcagcacttaactactttgttggcattgatcctagtgtctttaaatacttcatgagcattcataattaaaatttatcttaagttctatgaagagtattaatgtaactagcataagtggttttcttcaggaaaataaatatcacagtattatctgtgttaaaatggtttttgcctaaaatataatttttaatttggcttttcttatttaaaattccattatcttatgaataagcacttgaatcagtttttaaaatatttagtctaagatgattcaaagtagttttattttaatacaggacttttaaatggcagtatttcatttcttgtcaattatgttggtactttccacaaatctataaagaaggataaattgtaccatcattttattataatcctcaagagaaaatgtgtaattcaaaagattaatgtgtattaaaacacattatgtatcttagttacatttctatcagtacttttattaatatttgtgaaagaagacagcttaat

SEQ ID NO: 116037 - DNA, 1059 bp, Homo sapiens
tcttctaatttgaatataagttctctgcactaatttttattataggaaataggttttcttgctgcctcacattgttcacaggacatcagagaataaatgtgatataggcaaatagaatcctaaggcctttctgaattactaggctgtttcttaaagggtattagatatttacacaacacttgttctggattctggcccagctaccattgtggtaaacaaacagctccacccctcatggtcttcagcaagcttttcatgaacacaaaccacaagcacctcatctcgtgccctttccatgtgtgtgctcttcccgggcttccccgttcactcccagttgagtcaggatagtgcaggctccactggggagcccactcatgcaacccagaattaatacttggcattatggtaaacagaccaattcttccttccttctccctgtatgaattgtcctgagatgcattagtatatcatgtctctcagaatagagtagcccaagattaaataatcagttatgcttgtaccaagtgatggccacttaggtaattcgctttgttcttgctctccctcctccctagacaactcccctttctcctccgctccttccccggatgtacacttctgaaaaagttgttgcacacaaacttcggtcttagacaagctctactttttgaggaatctagactacaactaggaatggttttcagtatccaagccaaaacaatatggacaaactgaagtgaatattatgaatgttgtgattaagaatattataaacatatttttaagctttaagctctagaaatgtatgttgtctaaagcaccaagcaattagtgttggcctaagttaatgtaaattcaacagtttaacacttgacacagttatagtatatattcatatttgtttatttttgcataaagaggttaccccaatctggtggggagcagtaatagagaaagagaggtcagtggaaactggccatactgaagaacagatgggacaatacttcttctcaatatgtttttgaaaaacgttttggaatcatgtgaatctattacctg

SEQ ID NO: 116038 - DNA, 1060 bp, Homo sapiens
tttgtgacactgtagcctcatctgctgggtaactgcatgcttctagggccacttcattctctgtcatattttgtgtatcataatttcagtggctactttatttctacagttcctcttgcccatcctcctcaaggagaaagcctttttggcaggctcaggttagtggctggcaactaattaggtgactggcaactaaaatttcttatctgttgcaagagtatctcctatttataatggttatccagttgtttatgtacaaataaacgtttttataagatactttaagaaaagaagttatttttctttaaaaaggagttctgttctttttaaaatggaatctgacaggatcttttgtttttaagaagtttcattctttttttaagcaaaaactacagcttggagttttttaaatacatagtgaatgttttgaccaaatacatgtaattttacttaaactattttaacaatgacttttctaagtggaagaccctaatagaaattgacatgtcctagtcagtgatatggactgagaacttgataacaaatcccactgctggctactaagaagctttatcgggtttaatagggaaaagccttgtactgatacatattgttcatgtttacatgtaaatgtgtacttgtatacatagtgtgtacttacatgcattacatgcatattatgtgtgtcaagtaagtcacgtgtgtcctgactttaatgactcagtgctcatgtctgaggtgttcctttgagctctgaggtgatgtgcataaaagttttagtctgctcccaggtgaaccaggttaaatatgagggctctggtttaaagcaaggaccagactgcatcctgagggcttccgtgtgcccctgggattgtgagataatcacatccacatactaacagtcaagtagagagaaggaagttggatggaatgaggggaggactcagggctgacccctcttccagacaccacagagtttctctctgtatacaaagcctctgtacacattacaagattccacttggccctgttggaggaatggctgccgtggctttcttaa

SEQ ID NO: 116039 - DNA, 1536 bp, Homo sapiens
ggaaggaacagagagatggatatgactgtcaagggtggcacgagggagatcttcgtggtgatgagtattctgtatcttgattgagtgatagttaacaggaacttaggtgataaaatgacagagatctatacacaggcattatctcatggtgagcttcctggttttgactttgttatattctaattatgtcagatgtaaccatggcaggaaactgggtgaagagcacacagtacttttcaatatgatctctgtgtctttctataaatctatcatttaaaaaaaaaaagttggttttttaagtttctaaaatcttataaaatcgttggcatactcaggttaaagggatattttggggtgttcagttttgttttgcttttcgtcttgtgattttgttttttccatgttaaagttggttgaacatacagttattttaagtgcctgtgtattcttcataatttatggaatcaatagattttgctgtggattttctgccaccttgttacttcttttatttttttttcttcttagtatgtgccaagagttgtaacctctgcacaacagaaagcaggaagaactattacagcccggatcacaggaagatgtgattttgcttcaaaaaatagaattagcagcagtttagctataatgggagtttctcctcccatgagctcagttgttgtggaaaaacatcatccagtcacagtggtgagtccacatttgatgaccttttgtcaaaaagtctttttcctgagagttcatagactagtaaacacttacataacatgttgagaagataaaaatttatgatgactggtacttgttctgccttttcctgttacagttttttttttttttttaatatatatacttgtttttctcaaacctgctataaatctacgtttctgctgttgggaaattaatttcagaaacatcgtttcttccaaactgtaaaaattataaaatactaaaagtaatccagtgtgtttgtggtcaaaagagtaaaatatgtaaatgctttattatcagtttaaaaagagacaaaaattgttcactcactagctgctcatgtagcagatatttgattacaagaaaactcccctacatttatagtttttaatttttggtccttttttaaaaaaagtcttccccttttttcagtacaattgtcagcatgtttttagtttaacaaaattcaacttgcagtaaatgcatgtgatataaagaaggtgcattgaatttgaagcaaaaattttaaaacccgagttagtgcttcagctttgctacttgttggctttgtgatatatacaaatcaagtaaaatatttgagcctccactttctcttctgtaaaatggggttaataaaaatagttagctccttgggttattgttaggattcaagattaaatgagataatgtgaaaattaaacgagatgtattaaggcattttataaactataaaaccataagcaaatttaacttactgaaagttactagaaaaagatacatgagatatctctgaattatttcctacaaatg

SEQ ID NO: 116040 - DNA, 2037 bp, Homo sapiens
aacttaagagttatctgatatcagcctatattagcaagagttgatcacctgcctctcttccctgaccttcatactgtttctacatctcctaatgtctgccaccatctaaagatagacactcagaatctctaccaaaacaagttaaaactcagtgtgtgttttgttttcaaattaaaagtattttatattgaattagtccctttcatcagaggagttcaaaggatctaggtaggcactgtaatcattgttaaacttcttaaataagctaactaactaatactctgcaaattttctatacagatagtctaaggaaaggacttatgcagaggcccaaatttctggagggaaagagaactacatagaaaaccatttaaacatacaacttacataatgccctctgttcagatgttctgaaacagctcattgactgaatttctaaaccctcaccacactgtttgataccacacagatacagtcttaagcagaaactaaccaaattataatactggagcgaaaacatctaaaattggaagaaaccctttgtactagccctggaatttgacattattggctccttagatcaagattaaggttcagttttgagggaaggttagtgattggggtgtcactacaaatcagttaggtgcacaaatatgctcttatgatttatataatttatctgcaagaacccatttcttttacagtgtaaaaagtgaagattttagttttattgatttatttttgttttctgacgactcaagaacaaaaataaattgttaggataggcgcaatacatgaaaatgagggagtatagtgatatcagaaagtggttctaaagattgattgcaggtcattttggccatctatcaggatatttgtatgaactaatacaaaggaacctagatctccaggctcactgtgatcatattttttgtgacagttgtgatggcaatatactctacttagctaaggtcccagctgagtacataatttattttcatcttttatttaagaacaaatgatccattagctttcacatgtggaaggaagtagtctgaagtttttagtggttaatgctgacattaaccagttaatactgacaaactgtattaactgaacattgtatctaatatactgtaaacatctaaatttttgttaggaccaaactttagccagtatgtgttttcattgtttggaagataatagtagtcctaacctggaagaatttgaatggaattaatttgtgatttatagggatagactccacaaataataaaaaggaagagtatggtcctggtgttcaaggaaaagaacattctgctcatttggatccttcagctcctccgatgcccttaccagttacatcaccactgctgccatccccaccagccgccgtcggaggagccagcgcgactgccgttccctcagctgcttcgatgacttctaccagggctgcttccgcatcttctgttcacgttcctgtttctgctcttggtgcaggatctgcagctactgctgcatcagaagaaatggttagtacagtttatacaggtcccaccttatgaaaagggcggccaggcccagtggctcacacctgtaatcccagcactttgggaggccgaggcaggtggatcacgaggtcaggagatcgagaccatcctggctaacacggtgaaaccccgtctctactaaaaatacgaaaaattagccgggtgtggtggcagccgcctgtagtcccagctactcaggaggccaaggcaggagaatggcgtgaaccctgtagacagagcttgcagtgagccgagatcgcgccactgcactccagcctgggcaacagagcgagactccatctcaaaaaaaaaaaaaaagcttgtttgtaaatttaatattttgaactcataaaatattttcctatggagaaaaaaaaaatctgtggtatttaggcaaagtcactgaaaatatttaatacacaaagtgactagagcattaaattgtaatgaaaatacctgaaagtgctgtcatagtagtgataattaa

SEQ ID NO: 116041 - DNA, 1085 bp, Homo sapiens
cctcaatgtgagcaaatgcagacagcagacttttcctaacagtctaatatgtaatccaatgccattagctactgactgtctggagaaggaaaaaaagaagctctggatcacatctgagtgttttgttcatgtagtggagaaatcagctttatttttcatgacccaatgacagtgaaagtagcttctctgatctgagcagcagactggcctaacagcttgtagtaaaactcctattcattattaaccctatcatattccttaagtgtggaaatgcttcaaataataggatccagttcccagtctccaggagattacggcaaaggcatcataatgtgcaatatatcacgtgacgacaagtaccagaaaacccatttcctataattaggagtgttatctcttattcttaagcaaacttgatgacatattgtatgaataaaagcatgtgatttgtcaaaatggctccttaaccagcccactgttgttattcatattactccagatgacggtagatttctgtgagtagtgaaagcaaaatgcctctttttctgtgcagctatatcaagggaaaaccttcaatacaccagcgtatttcttggttccatgttggtgaggttcctgtttgactgtggttcacagcatacatagtattctccatttaaacacaaactcatcatttcaatgaagtctgtttgtaaacccaggaaaggcagcccctggcatatatagttttgatgcaacattgccacattgttttcaatctctgctttgctttttcaatctctgcacagttgagcaaccagtgtaaaatgttgcagtggtttgaatttggaggttttttctttatttgagacagctaaaaataacaatgggaatgaagttacgattttaattcttgctagaaatatgtcttaatgggatactaaaacacaattttattttattacaaacaacccctcctaattagggacagcagtagtatttgcacttgaggatggcttacctattgagaggtattgaacaaaatgaaataaatggacaggatggattggatgatttggtcctttctagttctagtattctttctt

SEQ ID NO: 116042 - DNA, 1062 bp, Homo sapiens
cagtccccaccgccttccctaagcctcgccttctgggaaggaattcaggtcctggctttgtttctctttgagtttccctcacataagttccagtgaaagaggcagaactgaccacattgactttgagtggtcattaccacattcacagatggtccctttcaagtctggtggtgcctgtttaatgcagggaaaaccatctgccagaatgcctttggccattggatggaagagaatgtctcactgttacttaagagcaggaattgcatacgacagtgttgtagctgattatgcttcataatgcaggttgttttgatgctccttgagcatcttctttcccccaaagagctatgagatcttggtaactacttagggacaggaatccaggagtattgcactcctcctgggctcgaatgaagacactctgggtgcgcttgccagttcttcttgcaaagttgctcctgtacatactttacccgagatgggtccagatctacagaaggatatggagaggaaaagtgagctaggactgtcagcatggttcagagccttgtctttctgaattatccttaagcaagtctgtcccttatttgtagtgtatccactctgttccacaaatggaattcagtgagttgctctccatgaatcctgatgttttactgcaggagacagcacatttcctgacccaaccaatggatctggcagaaactagtttgtggccaattatatatcatggttttgagaaaactatatgcaaatataaaatgaattttaaaatgtttaaatgtatattttctatatataggtatgtattttgttcattaaataactggcactgtaagaagaaaacatctaaacttcactgagttacataaacgaaagcttgaataatagatgtctttctaaataagatgactcacttctgcaattaatttataaacttagcaaaatcctaatgaaatttttctttgaaaagtaactaagcaattctaaagtttatttggaggaaaaaggagatgaggataatcaataaatacttgcagaagatgaagcatggaggataca

SEQ ID NO: 116043 - DNA, 1009 bp, Homo sapiens
ttttttttttttgagaccaggtgtcactctgttgcccaggctggagtgcagtggcacaatcatggctcactgcagtttcaacctcctgggctcaagtgatcctcccacctcagcctcctgagtagctgggaccacagatgtgcactaacacgcttggctaatttttttatttttttgtggagatgggggcctctctttgttgtccatgttggtcttgaactccgagcctcaagtgatcctcccaccttggcctcacaaagtgttggcattacaggcttgaaacatggcactcagcccattcaccagattcttacctagtcggtgcaagccactgtaatctgttgtatggcaaatacaaagatcaaccagatacaaactatctgcaaaagtcacttgtcatcagaatgacacaggaagcaaaggactgagagattcattctgtttgaaggaggagtggatttttaaaaaaggctttcaggagactgtggtatttgagccaggcttcaagttgtggatagaatttggacttgcagagatggagctgggtaaatggtgtttctgaaagacagaacaaactgagcaaaggcacaaaggcatggaaatcttggatggagtattgtgaatagattacagttccagtttgtcgaagtgtagcatgcttacagggaagcaattggaaacgtgggtgggacctacctgttgttggagagcttgaaatgaattcattttggtgccaatggggagtggttgacgtgtgagcagcagaagagtgacatggtgaaatgtcatttgggagactgctgtgtgtggaatggattggacaggcacaaacttgagatgggaatcagctgagacacatctgaaatagtctagccttcaggtgatgagggccttgttgtgagtgatggaggggagaaggtgtttatgggcaaattcctgaaccttaacaaccatgagctatgggtgcagggaggagggccatgtcatatggtactgggacctccagacc

SEQ ID NO: 116044 - DNA, 1099 bp, Homo sapiens
gcgttgctctctctccgttcattttgctttcacgatagcctggagtgaatatatcttcccttccttgtcagcccttacttctctcttaaattatgttctactgtgttctcacaagattttctcgtaaaatataaaaccaccttccttttgggagaatatgtagactgtgggggtttcagtagttctgacatcatgttccagggcagtgccagcgacacttttaaccccgaagaggaaatccctgccccgctcttgagttgctctcaaaggctgacctgtagacactattgcttactaattcctccagcgtgacatttatcctggggatctcattttgtgctaatgtagctgaagtctgaagtcagtactctagtgggcctcccctatttttccctattaattaatgaactgttatttaaagtactgctgacttctctgggttcctgagtcaggcagttctactactctgggcatgaaagaaaaataaaatgaaacaagaggataaaatatattttactggacaaagtagaagaatgaacaattatcccatcaaacactttggaggaaagttctgaatgtgtgttggaaatgatttaatgcaggagcccaggatggtcagcagttggtgaggtctggctggggactctgtttagaagcactccaatttccagaatcactgtggcaatatgatggctgtcattccaatttactgatgtgacgagatgggctcagatctgtatgactagggcactgtgcttagcatctagacatgatgtaatattcacaggaaccctcttagttgtagggggcagggtggtgaaaaactgggaattaagggtattacaaaggcataagtaggtatattttatctcagacttgtcagttaggattttgtttctaaagccgacagaactactggatcaaagaagatagcataaaactgttatgtttctcagtagcactacgggaatccatcaactgcatcaaaccttccccaattaacaaaagcttgggtaaatcctgcatcaactgaagactggcattcataatgcccttaactggttccatcacattaaaccgattaaggaagctcacagac

SEQ ID NO: 116045 - DNA, 1040 bp, Homo sapiens
tttattaaataagcttgtgctgtggggctgttttttcctttgtgaactgccatttccagaatgggttaccacgctggtggtggccctagctgatgggcttgaaggggaggcattcatcttgtcccatcgcggctcacttagctgagacctctgcaggagcttacacgcgggccagcagaatcgcaaatagttctcccaccacccgaggttttatcattgctaagctactgcaagattattgtaattgaaatggttctcaggcttctggggttctttctctctatctctctctctctctctctttctctctctttttttctagcctgtgactcacatttttttctaaggcattgtatcagtggcctttgcaggctgctcaagggatccagacttttgcatttattgaacatgtcaggcattcattaagtactgcaccatcagggagaatttccctgctattaagcgtcgactccagccaaatcagattcacctgggcgtttctcaaagaaaagcctgtcagcatgataatggtttgaacagggctgagctgtatggttgaagtgcgacagggcagaagacaggctgtggtgaccccagagttggtctgtaactcacagaggaatcacacagtggagaggcttcagaaaatcagaaatctgactgtcacaggtagcggggcaagctgcctgatgatgcacttcaggaaggctcagcaggagggtggggaggatggaaaaacccgtaacggagcagctagaaaattaaggcaaggaaaccgtaagtctgccctccagactgccacggttttatgtttgagactgaggtcactcccccagggaaaacaagaggaactgagaggtgagagtaggggagaaacacccctcactcaccccttgaataaaaactttggtgtcagtagcatcctgtactaatgtttattgagcatttattatgtatcatacttcattccaagaagtgaaggtatattctttaatttttacaactcttctatgaagtacgcattaatattatctatgttt

SEQ ID NO: 116046 - DNA, 1103 bp, Homo sapiens
tcccattatccattaaatattcaacattggctttggaaaatattgtagcactgtaatttaaagccaatttgggtagcattttaataagatttgaggcttttgaataattgtgttaataccagcagctgcttttatttggttagtaagatgactaattctataattaatatatttaacaaaaatatactgaaaatatattcatcttgtcattaagatgtccatttgtacaggtttctctttaacatgaaaagatagtgtgaggatatcattgcctccctctgctatgatgaaaatgatggcaggtaggtgtgtgttgctgatgcgcatggctgtgtttttgtgcggcgtcagtggcagcactgagcgagacccaatcgaagactctgcagagccatggggtatataaatcttcagagtctctgactcagtcaaccatacagcagctcaattttgtgccacaatcctggtaatgagatttttccatggtattggcttaacattacccctcaatgggaacgttttattctgaacgtttgctttgtggaatgatctttcagttctctctcaaagtcactcctccacaacatagaaatcaggtgtgaaattcaaataattgaagaccttaattcttcattgtgtacccaagtttcgagggttactgccttggtaaagaaatgttggcaggtgctccatctttgcctcactctcttctccatgtcattctggctgttcttttattgcgcgtcctgctttttttaaaatatgatgaagaaaagttcaaacctaactggtaaattaaataaaatacctaacattgctattatttaacttgatttttgtttcctacatgtgttttaaaccaaaaaaatactttatatttttaaaataggacattagggctctcagcaatgtcctgactgaaatcttgcctctctcctttggcacactgtggtttattgttgttgctgtcatttcacgttgttgttgctacctcatttgcactgaataagcgttctgtggaaacagcatctgagccactgctttccacccgtgttctagatgcatccaataggttttactagaggaaaggtgctatgtgtcca

SEQ ID NO: 116047 - DNA, 1042 bp, Homo sapiens
aaggtaacttagcgctttggtctgtttctctctacaggtaaacaaaataaaaactcctaaacaaatagatgagctgattgaaattgagagtgacacaggaacatggtataggaggtgttttgttcggatccgcaccgagctgtacggagtaagtaacaagtcccatgatgacctgcatgttaatttattgcatttgaggttagtcagaagaggggtttactgggcctgccctatgagcgaggttctttcctgctgcccaggacacctgactcctggactagagccaggtaattggatcccactcgaccagcatttagccaatacattccatctgtgggaagggaaagtgttaggccaggagtcttggcagtggcagggtgccttcaaatcttgagttaccttgtccattgacatccaggaagctgaagaatgaaaattccaattacctttaacttttacattttaaggtgaaatgaatccaacccaatgacaactcagcattttttataatttggtggaaggggtcggggagtggggttgactaagtaactgcatgagaaaactaactctctaatatttcacagatttggttgacttttatgagatgtttcaactacccagtcagggataatacaataaagcttacaattgtttggttcaccctgtcctttgggtaagtgatatttaaattcttggcaagcaaaatcgttcaatgtccacattgtaactcctagccatgctgctttcttttctgatactgcttgatgctgttaacctgctaaggaagaaatttttttcagcttaggtttgctgagagttatggtttttataaaccagttattttatttgttttgtcataaagctaaggtagcaaaaccaattgtatctgcaaaatccagtaaggccctggatgatttgccccatgacttctctgtcctgtcctcctttgcccagccccagccataccagcctctctgctcttctttgaacattctagaacagttcccatctcgggcctttgcggtgttcctctgcctgagtt

SEQ ID NO: 116048 - DNA, 1072 bp, Homo sapiens
cctgggaggcggaggttgcagttagccaagatcatgccactgcactccagtctggacaacaagagtgagactccatctcaaaaaaaaaaaaaaaaaaaaaaaattgctcccaatatggaaacacagagactcatatcagagaaagggctagggcttttgggtatagcttcagcagcttgaatagctaaattaaaataaaagaagctctgctttaccatttgatatgagctaagacaaatggactttgccttcatgtaccactcctgtgctatgttgccatagaagtcctctgtgccagagggtggagtcagtattatctggactttgaaatgtaggagagttttttcctagaactatgccaaaacatttgggatatcaatttgcaactgatcttgagtgcttcctctgggctcattccctttttttattgaccccaaagaggtgtattctgtgtgtgtcctgtcctgtctctaacttatatttcttcttcaacaacatctattactgagcttgcagaaccctgtaggtacccctccatccatctccctgcagaacatctaacactcaaccctggatgtctgcttatcaaatattctagttcagaccctcagtgacccacctattaaatatttaggctctgaaaggaaccatacaatctttgtacggcatctccttcattcattcaacaaatgttaattctctgtctttgtgaacgaggtcctgccagagttggtgcggccaaaagcaagattaagactctgcagcttcattgagctttctttcatcaacctctcattctgcaaacagagcttagatgtggattacactatacgtttaaaatgaacccctcaattgcttgagcccattgtgccactgcactccagcctgagcagcagagagaacctgtctcaaaaaataaataataaaataaaataacctcctcaatgttaaagcaaggctaggtcatagcctccttcctttttcttgtatactataagagtgtgatactgttttaggagaatcagctgcttatccctctgccataaggaatagaaggatgagtattcaccta

SEQ ID NO: 116049 - DNA, 1007 bp, Homo sapiens
tctttacccctcctccgtggcgctcggggccaggagcgcacaccttgtgagatgcagcccacgctctcagggccgtcctgcaactctgcacagactcccagggccaggcaagcctgtctcatggtgtcgtttggccgcatgttcctgcctttctctgcctaccttcttcccttttctttcccccttatgcccccttatgcatgcacagtttcagacatgaggtcagaaaggatttgaggatctgattgttcacacctgccgatccctgagagtcctgggcagctgctgccatcacccagtgcagtgggattggtctcttccttgatgagctaaaatcaaaacattttcccagaattaagcaacccaagcccttcccttaggactgtccttgttttgacagagttctcttgtttcctccccattcttcagttccgaaggtctgtcatcttggatctcttactgaccagctgtgcgacctcagggacaccactcagcctagctgggcctggattgtttgagatttaaatgaggagtatgaaataaatagcatctcagggcctttctagctctagaattctcttcactgtcgtcatctggtattctgtaatggcaatttcattcattctttcttgaatacattctacgtctaatataaagataaatatctcacttatttgtgaagattttggtacagaggaatctttcagctatcgcgactaaccaacctatgtaatccactccatccctggccctctgctctgcttgatttttccttatacgccttatcattatattatatatgtttatgctttggctatccagcaaaagtcagattcattttgtctctggtagttagaagtagagggtgaagggggtggggaatatatgcttcctgctcccacaaccttgccatcaggcaatatattacaatggaagcaaatcctgccaagtgtactagcacaaaaacagtcacaaagtttgtttttgagctccaaggaagtccatct

SEQ ID NO: 116050 - DNA, 1053 bp, Homo sapiens
ttttttttctgtttgatgtcaaaatggcctttacctatttcttcagtaatatacctgatctgttcatgcactaaaggctctggagccaggaatgtctgaatttggccttcacctggtatcacagaaagacaactgggatattggtgttaaggggcatatcggctgtatgttaggttttctttaatcctcacatcgtgccaaacttagtctggttactaagcctaaaaacaccagtattgcaacaacttctgaaactctgaagtggactatatgtttctcacagtttttgtttatgctcagcaaagtatgtattttaagtaaagcttctcttgttatctgtaatgtagacaaaaaaaaaaaaaaacctgttagtatattctggatgtattgtgtgtcccttcattgtttcaggtatggcgtaacagttctccgtgtgatgttcttttgctctaaatgttgaccattcctcttgtcgcccgtctctcaccaaccagtcacagagccattgccagggctcccttcagtctttcttaaacaatatctaaatgcagtttagtaatcccaggattttgagttacaagaatacagtttatgggtctgtttcagctcttacttaaggctagcatggttgggcaggggaagagctgagccgagccttcactgatctcttgtcatttcatatgattatccagtaaatacttattgagcacctcccatgtgatacgtattgagacactgctgtgtgcaataattaagcctatggaggacttaaatgagggcaaggaaaacagaatgagagaagacactctcacactgacccccattacatgtgaaccctccgcgcccccccccataaatacaaagtgttatttttccacatttaaaacaaataatagccttcagcaggcagtgcaggaactattcagtcattgagataacctttgatgagaggagaaagctccttgattacctggtttttgttggagagactattaactagtacttggaaaatgagaaaaatgaaaccacacataagttgttcccttaaataat

SEQ ID NO: 116051 - DNA, 1061 bp, Homo sapiens
aatacacttttaactaaaagagttgacaattttattttcacatttcccaatacaaatgaaaactgcatcttttttgtcccacttctcccctccaaaactattctctttgataggagaggggagcaagacttccttatgctgtttagaaaacccagcatcacagcagcatgatctcctggtgaagcagaacaggtaatataaaaccgacataatgagccctctcctttatccttatctgtctggtcaagtctttctgggccgagtgggcaccatcatgggacaggcaggaggtcttatcactggggacccaggcatcattggcctgtggcctcccataagcggcctcattccaggagcaggtccccctggcatcatcccaggaggaggagggcccatcattggcatcatggcaggacccctcatatggggtgctggcatcataccagggtgaggaggacctggaagactagggggaggtggtatcattgctcctacaggaggaggagcagagaatggagcaggaggtatctttccttgttgaaatgcagccgttgttttgtcaatcaggctctgagcctgctctttcatccatttctgatagtagtctttcacattctctttgtgtttcctaccactgcagtgtgtctttctcacaggaggagagtcatgggtgaggtatgtattgcagtagtcacaataaaacttgggcatgttgctctgcaggccattggccactccattccgtgacacccagaaatgaatgacttgtctaattttactaaagcaaagctctagctccttgaggatggggactgtttaaagtttgtcttaattatctgtatgtattcttttcactgtatctggcattcgataaaaccttagtaactataagttgaatgaatgaatgacccagcaagaccatgaggagtgaccagaagctcatcagaaggatttgagtttcagaatacaaaatgttttcctcattaaggggccaggctggcagcagaggtggactgaaagtgtgcagagggagcccccaagagctgactcatgcttgctga

SEQ ID NO: 116052 - DNA, 1072 bp, Homo sapiens
cttaccagagaatctgggtgacaagtaaaaatgcttatacttttagtgcccttccaagttctgtggaagagaagatatgagaaggatggatttggatggcggcaatgggagggcttcatgaaagttgtgaatttgaaatgaccttgaggaaggtcagaggaaaacctgaaaggcgtgctagtatatttgtactgtggaatcttctatttatataggcaataaaggacaattggagctgtcctgaggagagtcacctgatgcaaccccttactgatgtaccttcttgttctttgagatggtttaaaaaaagaaacaccccaaacttttcattagagacatgggtgagtggcccagtgaagtgagtgacaggggaggcaggtgtggcaagacagcgatgtgagcatttggtgccctgtctgctggctgcttagcggcctcttcactgtgcttctgggtttggctgtcttttggatgaacagctttgccagagggttttgccgaggataggtgaattcaatgagaacaggtaagaaaatgagttgtacttagagcaggacaaggatattgacaactgaattctctagggggtagggtttctctcacctcatttttcttcattctctccattaattgtggcaatgtttacctttcagatttcactgatttacggtcctgcaatgtccagcatcccagttttattgaagaatgacttagactgtgtttccaattcattggcaattgcctgaggaactttcatttagactttttgtgggattttactaagctctaattggaccttcctttaattttataatcgtgtattgtgtatgacttcttcttgccaaggtgcctaagaggagctgacagctgtttatttagtatatgcagtggttttcaaagagcagtctctggagcagcagcagcagtaacagcagcggagcatctcctgagagcttgttggaaaggcagatgcccaggccccactcagacctgccaaatcagaaagcctgtgacggggtctgcagtctgagttttaataggccctccaggtgattctgatgcgctagagcat

SEQ ID NO: 116053 - DNA, 1031 bp, Homo sapiens
acgcccaactctagccctattttctcttcagaatgggaaaattcttaagttatctatatggaaatacttcagtctatcaatttgggtggggaccaaattaatccttgtgtctgtatacttaaaaaactagtatgttctattgtttccagatatagccgaggtggggagaacatttggacttctgtgttgtatattttgccatcttgcaggggatcttggaagtgtcattctgaagttaccaagcattctcttatttcatttaggcttccaagttgaagttggtcgttgctgctgctgttgcttgtctaaaagcctgagggtttataatgctatctagatgggaaggagctacttgaaatgtgtttgaatctttatgcttgcttcagaatgtagagtttgacttagctaccagggtcagccaaccttgtggtcaacccagtcctgtgggagtttagaagggaggtgaggaagaggaagtacacttggtacactgggttcacctaacgtccctcaggcctcaccgcctctacaaagttaatgaaattttgtgttcataagctcagtgaagctcagctgagaggactaactggaatgttgaagccattaggaatcgaaaacctgggccgcaactcacgtgcccactttttaaaaaaattctagtacttttcatagaagatgtttgctagtaacccctctattattcctcacctccccaaaaggggaccattgtaatcagccagtcttggtccttgagattgtcacttttctgttttttgccccagtcctacacgaagcaggcttctcagggtgggatgaggagcctggtaagatagtcacatagtcagcctcatgaaatatgactccccattcacctgccccctaaactgtgcttcctcaggtaagatctagtaaggcagcccaccagagcctcgctgcatgttgaactcttaggaagtttgtccaagaaatggtagttatagagctaatacaaacatgcttttgctctcattctgttctctactaatgagttt

SEQ ID NO: 116054 - DNA, 1031 bp, Homo sapiens
ctggctaattaaaaaaatattttttggttgagacagggtctcactagggttttttgttttgttttgttttgttttatgtagtctcactctgttgcccaggctggagtacagtggcatggtctcagctcactgcaacctccgcctcccaagttcaagcaattctcctgcctcagcctcccaagtagctggaattgcagacacatgccaccacacctggctaattttttgtatttttagtagatacagggtttcaccacgttggccaggctggtctcgaactcctgatctcaagtgatccccccacctcggcctcctaaagtgctgagattacaggtgtgagctaccatgcctgtcctcactagggtattctttttctttttcttttcttttctttttttttttttgtgttttaaacactttcaagctctcaaaacctcaaagaaggatacaatgaacatctattcccttcacttagctttaccacctgttgacatcttgccacaccattccatctacagacattgggatggctcacccctaaatccttcagcacacatctcacatactgagaaagacattcttctctccagcttcatcctcagtgttaccattactgtgtgttcagttccattgttcaatataaattccacactatgatttcccctgctatgctttatagccatgttttaggacccaggtaagtttctcgcattgcctttggctgttattcctcaaggccttccccagcctggaagagtggtctcacctccctctcaatgcaatgaccctgaatcctctgaggagtccaggcctgtttcctccaggtgcatcacatcaggggctacagtgtccaccctcccactactggtgatgaatagatatttttaaaaacctccctaggagattccaatgtgcagccaaggtttgaattcattgaattaattaaatccaccctactttatttgtatgtgtttttttttgtgctaaaatacacataaaattatcattcttaccatttttcagtggacagt

SEQ ID NO: 116055 - DNA, 1041 bp, Homo sapiens
aagtagctgaggctacagttgcttgctaccatgcctggcaactcccttgattttttttaattgggagctgttttaaactaagccttttcatttctttgtcatttaaaataatactaaatggactttttaggtttccttttcaagtaggccctcaaagctaactttatagcttctttgctgtggggcttttgctgaaatgaaactgtacagacaagtctactactaatatgggctttgaaatgtcctctctgatgccagaaatcctactatttaaattaaaggagtaacttttccaaaagaattagtactgctgagtagattttatattaatctgcctaaaatttattcaaataatgaaaatgaatctgttttaagaaattcagtcttttagtttttaggacaactatgcaaaaatgtacgatggagaattctttttggataaactctaggttgaggaacttaatccaaccggagctattgtgaaggtcagaaaacaggagagggaatcttggcaaggaatggagacggagtttgcaaattgcagcttgagtaaatagttatgaatgggactgctattgtgtctcccaaggaaagttcctgtgatattatattccttttttaaggaaagagaaaatgcacagaaaacttttgctgtgcttcctttttctgtcctacctctgaaaataaactaagcaaaaaaaaaaaaaaaaaaaaaacacccttcccttggtgataggcttgtttagaaatattatcttcaaaggtctctttaggtaagccaagccattggctatattggtgagtctgggacagttatatatgtgccctggaaagaaaacaaaacacgggtgtgattccttttgtgtcagtgtttacaactcagataccaaaagaacaccttgttgattaaatcaagtctcaagctctggccttatctagtggtgagttagagaatcagatttgaaaggagaagtgcttcaaatgtttaagcaagtgaaagccatgagttgcttaacagtcaatattcatgattagtttaaa

SEQ ID NO: 116056 - DNA, 1050 bp, Homo sapiens
cattgaaatgtaaattgccttatacccgttttcattcttgcggacttctcaggaggaagacaggttttatgttacaagcattgaagagaaaatctttctcctggtatctctttttttagtatgcaacaagattgaggatgattcatttaggcaactctggtctactctaggagcttgcatatctaacaatatgcagtattctcaggaattttaccagtgtgggattgctggtactttgaggggagaaggataacttcatatctggatttaatttctgagttaataaaccgccatcaccctggaatgcccatttttatttgtttccttatccatttatgaactaccttaaggcatttatcaaatagtgacttaaatctaaaaataaaattaatgtcctttgtttggaatgcttttagagaccattaggacttaggagcagtgcagtggatgtggagagaatgaaagattcaacaataactatataaaaccctaaggtcccactcaagtggggcggcctggccaaaatgtagctcaaaacataatagtggctatgagaaaaaagctattttgttgtcattgttataacacccagcaaggaactgtataggttatagggccttttaaaatttttcagctggataccactttatttttattgtgactttcaaacacgaaaataccattatgttaaaaaaaaatactatggaatctgtgtggcagaatgtatttaagctgaacagattaaggctgtaggaccaaagggctgaacaaccttgagcatttttctttaaatattcaagtttaaaagcatattccttggcacccctaaaaggaaagcccagtaaaatgaatatgacatttagaatatgtagcattggagattttcatcttttttttttttttttttttgagtccttgggtttatcagctggaaactttcatggcattattgcatctttacatagtaataaatgtgtcataattgacatgtgctttaaaatgctctcacttcctctacttcctggaagattgtttctgtcttgcatgttg

SEQ ID NO: 116057 - DNA, 1053 bp, Homo sapiens
tgttcttgttgatgcttctctgaatggttagcactggctctctgggtgtgttttgtttgctaaaccttgaaaaagtcttagtagatggaatacagtggaaagattaggaagatgcctttttccctcatacttcctttaattaaataatgtgaaaatatactgatttaatagatgtttctgtgagttgtgctaaatagaattggtaacagtgttacagttttatagggctttttatctgtttgagaggtatgcaggatttcttttttattattattttttattttttgtagagataagatttcactatattttccaggctggtctcaaactcttgggctcaagtgatcctcccacctcggcctcccaaagtgctgggattacaggcgtgagccaccgcacctggccgatatgcaggatttcttgatgtttctcatcttcccataacttttctcttttcctgacatgtgcttttagcctctgatagccgtcagcaaatacctggctcctgttggttgttcagtcctctttttctcttctctcacatacctaccaccctccaggcaaagcaagtaccctgtggttctctgcctaatttatatgtctcggaacatgctgctcccctcaccttaaatgccctgcataactcacaagactcttaggacctttgagttgtaccttcatctccagaagttctccctggcatttgttctgcacctcccatggctccacatgcccagagttactgatttgtctcctctcgattctcctggaacacccagtccacctttttttttggtttgctcacctgccatctcccatgtcatagaaaggctgcagtgagacacagccctgttcatgaccttagtaataacatcataagcaggttatcagtaaatgttgatcaactgtatgaatctgctgaggttgtgaaaagggattcggagaagtttgagatgcatttggccccagtagttcttacctagggtggggaaatcaggcatgtacctgaggaaggttgctgtgctgctaggcagaggagttgtgaagtgaaac

SEQ ID NO: 116058 - DNA, 1656 bp, Homo sapiens
gagtctgggaaggagaagggtgtttgaaatgagtataaccatcatccctctcctcacaggaccattgtggggtagtgtgttaattcattcttgagtcactataaagaaatacctgaggctgagtaatgtataaagaaaagaggtctaatggcctcatggttctgcaggcaatgcaggaagcacggtgcttgcatctgcttctggagagggcctcagggaacttacaatcatggcggaaggtgaagaggtagcctgtgtaccacatggcaggagagggagagagaagggggaggtcccagctcaaacaaccagatcttgcatgaactacctgggtgagaactcacttatcaccaaggggatggcacaaagccattcttgagggatctgcctccatcatccaatcacctcccaccaggccccacctccaacaccgggaatcacatttcaacatgagatttggagaggacagacatccaaaccgtatcaggtagtgttgaggttgttgaggtaagtgtatacaaagctcttagcacagagtgaagctcagtgaacaaatggctcttcttatgaagagcagccctcagcggaggcatggcacttccttcaagagaaccaaacttggaaaccttgaattaggaagtgattactcactttacagggaatgactacggtaatgatatatttgctttctgttacctaaacttagcagcttacatatttatcatctaatggtttctttagctcagaaatgtgggcatagctttatgggtcctctacttagggtctctcaaggctgccttaaagtgttgactgggactgggttctcatctgtaggctcagctagaaaggcatctggttccttgctcatgtggcggtcagcaacactgtatttcctggggttgaaggattcataggagcttgcacttgaaagccagcaagaaaggagagtgagaaagacaaagcacaagtctgccagtaagacagagtctcatatgatgcaaggtaatcacaagagtacagtctgtcccccttgccatctactgttgggtagaggcaaatcacaggttctgtctgtactcagggagaggggcctacacgaaggtgtgaacattgttgggggatcatgcggagggagtctgtttgctacaaatggtattcatattcacatgtgtttcaaacagtagaggaaaacgtaccaaatatttttctttctttctgtctctttctttctttctttctttcttttctttctttctttctttctttctttctttctttctttctttctttctttctttctttctttctttctctttctttctttctctttctttctttctttttcttttctttcatttattttttgagatagagtcttgctctgttgcccaggctgcagtgcagtggcacgatctcagctcactgcaacctctgcctcctgtgttcaagcgattctcctgtctctgcctcctgagtagctgggattacaggcacatgccaccacacccagctaatttttgtatttttagtagagacagggttttaccgtgttggtcaggctggtcttgaactcctgacctcatgatccacccacctcagcctctcaaagtgctgggattacaggcatgagccactgcgcccggcccaaatctttct

SEQ ID NO: 116059 - DNA, 1116 bp, Homo sapiens
tgtagttcttcttcattgaatgcatccaaattgtgggaatgtggcagatggtgttatatccatttgacagatgaggaaactgaggctcaataacttgacttgcctgaggtcatgtcacacttctgtagcagagacagaaacagagccaagccctcctcattccaaacctcaggcaggagctgtggtgaaaagcagggagtcggtttgcatcttggctctttcatatgccagcattgtgaccttgggctgttactgaacttcaaagcctcagttttctcctttgtgaaatagggagactcccttctcttagggtttttagggttaaatgaaaatttacaaccgtccctaaaccttgcaagcactcagtaaatggcagctactgatgtggtttatgttggttttggcatactgctatttgcacaactgggtgttagttgagcttacctggtgtatctccttaaggcccattggatctgagtatctggcattctaggcccataattcagaatcagtggaagagacaatgttgatacatctctgaggcttggttacctgggagctggcttgatgtctggggttctagatagtgcccccaacaggagagttgttacggggtgggatgaggggctttgcccgcaagaggatgaaaagaaaatagtagaaacaggagagtggcttttgggcaaactcttggatttgctgttcagacatattagcaattcgtttagtgaagaacagagcagggatgtgtgatgggcttccattactgtgacatcaaggatttgaattctgaccacctggcagggaatttgggttctaatttgccaccagtggagatagcacaattatgattgtcttaacacaagaagccgtctcccctaacctactctcaaaatctatctcaggtactaacgctgacacagatctgctgccataaacttggttgtcttttttgtgctggagagggtttcttctgaaatgtaagcacctgggctcactctttctgcccctctgtctttgaatcagacagcagctttacctcttggcctcttagcagatttattcttaagcaatattaaaagtattgttgcttcttgtccaaatctcctttcccca

SEQ ID NO: 116060 - DNA, 1029 bp, Homo sapiens
tataacttaaaatttttttcttatccattgtaaaaagcttataaaatatagaaatgcataaaaaataaattccatttacagccttactctatagaagtagtaagacattttggtgtctttgctctttctttttaacttagatttgtgtgtgaaatagatcatgtctacgaaagtgcatggaacatatatgtatgaattaaggaatactaaatatacgggtaccactttccaatttaagagctagcacattgctagtctctatgagccccttttgtgcctggctcttccatttattattatttttttctagaatcaagttagttctgtttatgtagttttatattgtgtttttgttcctactgtatcataagtatttttcaataatgtcatcattttaggttgctttcttatctttagagctcaaggtaattacagatcatagaatagcctttccggtaccgtgccttatatactcatttaattttacaacatgctgtgagctgcagcagctccccattttacagatgtgaaacctacatttcagaatgtttaggtaaattgccttgatgacagagtatgccaaaggactgagattagagtccaagtctgtgtttccaaaacccttgccatttctaccatggacaggctgactttatggggctgtatgttggaggcaccgtgtacatttaaggaattgaccattaaatgtgatgatgacgttatgggaacttgcttaatgataaagtaggaacaaaaacacagtccgaaactacataaacagaaatatagtatttctgcctaattctaaacaagaataacacatgactaagttctagtttttaagtggtactggtgccagaaaattccagatgaaggcaagcttccacaaggaatgtggaaaaacaaaaataatttcttgaccaggttcagtgactcatgcttgtaatcctagccctttgggaagctgaggtgggggggcatcacttgagctcagaagttcaagaacagcctgggcaacatagtaagaac

SEQ ID NO: 116061 - DNA, 1701 bp, Homo sapiens
agcctcccaaagtgctgggattacaggtgtgagccaccgcacctgacctcagcttacttttcttttaggccagacagatattcatttgtggagtacagatattcttctgttggttggtgctgtttagcagtatctacctagaatcttgtgtctcacaagacttgaccagattgataggcacttttcaaatgccctgctaaagctgctgaatccctgaatgatcaaagctggcactgactttggcagcggccttgacttttagagcatagcgtgctaacaaagaggagcttgcttcctccaaacagtaatagggtaatgtccagggatcagtgagcgtgttcctttcacccagtactctgcaccttgcatctcttcagcctcctgccaccttctactgttcgacacctcttgtcctggtggtgagggagcaggcagagtctttggatacagctcagctaagtggcttcaaagtcaggcaggggaactggtagctgagcctccattgcctggggttatctacttgtaaggtttttctgccttcctaattcttattactactattttactgccactctccctccatttgtgttactctgtataaccaacacctaagtgcgaaagtcctgggcttcagtctgtaccttctctatatggtatagatggatgcaggtgagatttcctgccaactcccaaatgtgtagctccagcccaggccacttccgtgagccccagatctgtgtgtgtgattgcaaactcaacattctccgccactgtgtactatttcaaactttaaatgtttaaatccaaactcattattttgtaaccctccctcctacctataagccttcccccgacaacaaaataacatatttggtctctttcacgtccttatcatgtgaaggacgctctcatccacttaactttgcaagctgggagttaataccgtaatctcttgctttccctctgtattcagtacattttatcagtttagattcttaaatctctgtccttaggcccagcatgatctagccctggcctcactcactagcctgatttccagctgtccctctctgccctgcttaggtggaccctcctccccttagaggccttacaccagcccccacttgctgaaatccaccccacctccccactgcccaccatcctcctgatttcatgttcaaaggtcatgtcctctggggaggcttcccttgatgctcaaatgaggtcagtgtctaggggggtaagctcttgtggcctgtatggcaccctcactagagtcttaagtcccacagcaataagggctttgtctttgcttacagtatatgctcagtgcctagggcagacccctcaccaggtgagcatttgacagatatttgtctagtgaaggaatgagcggatgaatgaatgagtgaatgaatgtcaggcactgtgccaagcaatttgtacacatctcatttaatccaggaaaccgtcgaaactgcaaatctcaactggggagtcaacccagagctgagccaacacccaagcccaggctctttctgctgctaccactggcttccttgagggagagacagttgctgctatttgattttactgataaaaatctgtgatgctacagggagaatggagcaggacttcttctagtagagaaattagggagacattgaggagacttgcattttaccgatgctaatttcctta

SEQ ID NO: 116062 - DNA, 1422 bp, Homo sapiens
tgttcagacactcttgcattaaacatcacgttgtacttgcctccccctccccctcagttggactgtaggttacctgatggttaagactaagactgttttccctccaccttggtttttgaatcacctggagtgcttttaatacagtgggtccttgaaaaatgcattcagctgaattcagtgtgtctgtgttctcagtctatccagagctctgctattaggtgaaatggaagagaaactcattgcctatatgactgttattgtgacgtacagtgcaatagctgatatgtttctgacattagaatgctctcatttattggtatttgatcactggcatattatatttgggatttgtagccctactttgactgctctactatgtattgaatgaagagtttagattggtattaatatgttttaaccagtacattttaaaccagtcaaacatctaaccacatgcaaaagaagggcacgtacttatcatgcttcttcacatgcttaccatgcttgttacatgacaaagggttgcctttacctatttttccttttagaagattgaaaatatttaaatgatgctgttgttttgatcactgttttacattctttgaagattgaggaatctggtgactattttatcaagcgatttttctcctggagttttcttttttaaccttttgtggcttaattccagtaaaagattttcaagtaagtgaaaatgagttgcatatatccattaagtctttttctttatcttaagtaaaaggggagatgaagtagaaatatttagcaactcagttattgcctctagcatttaagagttcagcttgaagaaaagtagttgacttgaaagaatatgacttaaggacagaggtgagaaggagataaagaagtgcatctataggaacaaatttgtttcttatttgctttaaaaattgtttaagtaaagcacatttcaccaagttgaatttcagcttgagagatgtccagatgtgaaacggcaaaactccaaatactgcatatactgtgcttttagaaaaataaagtagtttttttgttttgttttctttttattctttaaaaatgaaggtcaagaaaaatatcagcaggaaagtcagaagtggatttagatatataaatgtcctcattgaggaacaagggggtgatctttttttttttttttttttttttgagatagagtcttactctgttacccaggctggagtgcaatggcgagatcatggctcactgcagccttgacctcccaggctcaagcaattgttccacttcagcctcttgagtagctgggactatgcgtgtgccaccatgcctggataatgtttgtgttttttacagagacggggttttgccatgttgtccaggctgtctagaactccagggcttaagcaatcctcccgcctcagcctc

SEQ ID NO: 116063 - DNA, 1018 bp, Homo sapiens
aggtatatgttcccttttgcatgtctgcttgctttccaaagactagctgctatcttaacttaaaaaattttatttttcatgccagaaaacattgtattttaaaaattgataaagacactccatttgtaagtacttgttttaaagtaatatatctagaaggcaagatagtggccccctttcctgtcaatgtggagttccaaagcagctgaaggtagaaattaacagtcggtaagagagctatcaaaagaaaaccaggagccagagaccaactactggtagtcagtagtaattctgattgtctactcaatctgccaaggaaaactaaatacattttttcccctgagtcaggttaacacttaaagtataaaaggaagtacattcaggatctcatatgccatagttcaaaatatttttttactttatatatcatcagatacatacgtgcacacacatgtaaatatgcatcatccatgggatgtgatctcagggagataagtaccaactcatatattccttttaaacccactcaccattgccccaatttttgttccttctaactgcattcaactcttcaattcataatcatacagattcatgcaaataacagtaacgtgtttacctggttttacattctaatgttctatttctagaactgcttaaaatgttaagtagcacgcattcctgtagtcttagttactcatgagtctgagttgggaggatcgcttgaggttgaggctgcagtgagctgtgaatgtgccactgcacactagcctgggtgacaaagtgagaccctgtttcaaaaaaaaaaaaaaaaaaagtaagtatataagaaagacactgtaaagcagaagtttttcatttcttgtaagttcaccagaggagttgggaattgggaagagagttgggtagcaacaactagaagttagatccatcgcatacgagtatgcgattgttgaattacatccttacctggaaaatgagctgttgtaagggttaaatgaaaacctatctaaagcac

SEQ ID NO: 116064 - DNA, 1533 bp, Homo sapiens
aaatatagttaataaaaaatggcttttgggtccagtgttaacgttagtaaattaatgtgattgagtttcaagtttttggcttgtgcatgcttaaaactttgtgagtcaagaaattcctattataaatttattatcttaaaaataagatctgctcccataccagagaagatgagacaatgagtctaccatcctaacaaacccaacacagatatgtttcaaatctttttccatctctttttattatttttttaagtttacatacatgaattcattttttggtgtaaaattgcacaagttttaacttatatattcctgtaatcaccaccaccacactaaggatactaaactgctacattattcctaaaagtagcccttgtgctacttctcagtaattaagcacaaccttcctctactccaaacccttggcaactactgatctatggttttactttttccagaatatcacatgaatggattcataaagcatgtaatcttttaagactggcagcctttattcaacgtagtgcatttgagatttatccatgttgtgtgtaatgatatgttcctttttattgctggatagtattgccttggagagagataccacagtttgtttggaggacatgtgggatgttttcagttattgctgattatgaatagagctgtcatagacattcgtatacagagttttgtgtgaatatagttttttatttctatgggataagtatctagcagtactgggtcatatggaagatgtatggttaactttataataaatgaacaaaccattttccaggatggccgtgccattttgcattcgtgccagcaatatatgtgagttctatttttttctgcaacttcctcacacttgatattaagctttttgttttagccattctaacagatatgtggtagtatctcagtgtagtttattgttttgcatttttctaatggctgattattttagctatttaaactcctttgacatttcatatagaagttttatttgctcatttggtaaactatctgctcaactcttttgcccattctttaaaattcggctttcttattgttgagttctgtgagttcttcgtatatttggattcaagttctttgttggatatataaaaagcaagtattttcttttagtgtgtagcttgtctttttactcttatcagaatctttcaaagagcaaaagtctttaatttcaataaagtccaatttatctttttttttttcattaatggtttgtgcttttggtgtcatatctaaaaactctttgcctaatccaaagccacagagattccctgggtgtttttttttcccaagagttttatgttttacatgtaggtctgtaacaatttcgggttaatttttatataagatgtaaggtataagttaaggggggttttttgcctgtggatttttaattatctcagcaccacttgttgaaaagactactccttctccattgaattgcctttatacctttgtcaaaaaccagttgaccatatttagtagagacggggtttc

SEQ ID NO: 116065 - DNA, 1076 bp, Homo sapiens
tcttttactgcagtaggtacactagaaaacataattatttgtccagatctccatcttatttagtgttggacccaggccctcaatgacagaaggtcccctttaatagggcagtgactatgtgtaccaattccacgggtctagccagcttttcataagtgacaacagaccagagagcatacttacgtcactatttcctatttctctcatctttattttcagttacagtttctgtctttggggaaaagcaggcaaaatctaatttgtaatggatagaactagctgtccacttaaacaatagaaaactgagtcataaattctgtctttataaaactcctccatacttttggaaaatgactcacttttaggcagcgtctgccatagatatttgccagaaagtgatctaacttggataagcttgatgctttgtacaagtttcagagcccctgtagagaaagctcttaggaaccagagaccatcgtgtgcctgtctgtgtcccgtgactttcagtccatcaacacacgtcactgtagcattttggaatgttctggttcagttgctctcagatgttagctacttcagaaccacctggagggcttgttagaacacagatgattgtgtaccactcccagaatttctggttctatagatctgggataggtctgagaatttacattttgaataagttccaggcattactgaggctgctagtttggggcctgcttggagatcaattcctctaatttctgtgtttgtgtcattcaaaagaattgataattaaaaaaaaaaatgcaaccaacagaatctctataaaatcatatatgtttacaattaaatcattcttacaagtaatgagatggtatggatttgttctcaagttattggatggaaacagaaacttctccactaaggagccctgtccatagctgatgtgagagagaaaacaaagctgggccacattgctttctgccttcttcttttatgtaaccaggagggagcatatccctagaatttttttttttttttctaaaggcggagtgtttctctgtcgcccagtctggagtacagtggcgcaatct

SEQ ID NO: 116066 - DNA, 1050 bp, Homo sapiens
tgtgaaatcagtgaggcaatggagcttcagggtttccttgtcccttgggtcatggctaacaccccatttaatgtctccttttcatcaaaaccagatttgtcgtctcacttatttcccagtgtctggccaagatagtgatctttatgaaaacaaactggaagtaatgcaagccagaaaagatgggagagcttcgcctctgcagaaggaagctgttaaggggaacagatggagacagggtctaaacagcttcaagaaagtgtgcacttgctagtctcagaggtgctccctgtcccccaagagctgtttgaatcaggagctgcttaaggacctgaatgacttctccaactctgccagggatccttcattagccctgcacttctgagatcactcagtgccccccatagacctctcctgctcttctgaatgcagaagcaggagtgggatataaagtgaaaatatagtaaattctaacctagtgtggcttgaaaaagaagttgcaatttatagagaattgccaaatatactgtgatggatcactaattttcaacatataataatttattaaaacactaaggatgacgtctataattgtcgtattaatctctgaaggtatcaggactttacaaggttcctgtgccttggccatcattgtgatcatttatagtgactaatcaatttgacaactatgtggcatatgaatggtaagcattcttggcaagcaaagggaagaaatgtcttatctgcatttaccagatctcatgtcttggctgtttgcagttatttacccctttcttccattaatctaaacttccaagaccctaagctcacattgtatcctgtattaacttgctaactaacctcctgtttttgtggttttctttctctgatctaatcagtccaatcagaagaaagattacacttacagatgcacatgctgatgtcatgacatcatcctcttatttaaggatctccctttgcttccctatcaagtctcaacttctctggccatctagacctcaggtgaggtccttttatcttagcgaccttgtt

SEQ ID NO: 116067 - DNA, 1117 bp, Homo sapiens
gctttcctgaggattgggtgggtgggggggtagaaggtgatagaaaaccctttgcatatgatatggtggtaagacagcctcctatcctgtaggcgtggtcaaggtttaaagctgactatctcatggggtgctcatgagggttcttcaaagactctgtcatctgtgtcagtttctgggagtctaggggtccaccaccagtcctgccactgtgatcatgttgccctttcagacagccctagaggactggacctgaaacaagccctggactggctcgttcttgtcggaggaccactccgtgcccttggaaacatcaggcactctttgccccaacacccacagcctctgagaggatggcccagacccactgcagcagcaatttcccttcactcccatgccaccagggcagctagccacactgcctctcatgttccaggtccccagagaaggggtgccagcacctctctgtgtctctttaatggtggagcactcaaatcaagcccccaactggcctcactgaaatccggcttgtgaagtaagaagctgatattcctactctttccccaatgggaagagggtgctgaatggggatctcagtgcagctctttccaaagaaatcctccctcacatcttgctcttgaccctccctgtgggagaggagcttaagcctagttcttagttatctcctttttgaagggcagatgggtgttttttttttaactcactttggtatctgatattgctagcatcttgtgttagagccaaaacttgcagtgtagcatcctcatcatgtgtatactagaaacttacttgtggaattgttggatgatagagggatggtgcagtagaatgttaaattactcaccgacggggtctcaggtacatgccacacgcttgccaacactttacaaaattgatctttaaatgtttttaccaggcttttgaaggaaaaagacacatatatctcaccattttacttttctttactaggcagttctttatatatttattgagcattttaatttttctttccatgaatttcctgttaaagtcctttgccctattatttatatatatatatttttttatttttttcttgagatggagtctcgctctgtcg

SEQ ID NO: 116068 - DNA, 1049 bp, Homo sapiens
ctcctgccttggcctcccaaagtgttgggattacaggcatgggccactgtgcccggccactatttttcagttagttgtgagcatttaaaaaaacagaagaactcataaaaaatctgaatcttccacttttcaagaaatcccaaaggtcaggcccttgtggtccacatttccacaagtagctgtgagctagagccaagttgcttacagcccccacccagccagcttcgttccttaccggtaccggcctcacccctgcaggtatctgtttccaagcccgccctgttagagtggattttctgaggctaaagttagtttggatttattccaacttatataaataatcgaggtgattagatatgactaatacttctgttctacctagctacttaatacctccactgacactttctttcctgataaaatctgaaatctcttcatttatccttgcatcccttgagccccttgagggacaggtcttatcaacagattggtttctactggttaaaagttgcattaaatttgtctcctcatacctggaacaattggatatcatgttttgcatctgcccatcaggtagatacacccttttagctctgccacattctaacatagagtggctcttctgtcattgccacctaattgtaggcctctgcttgctagttgtatccactgtttacgttatagagaaatcttttcacatatgtaaggactttatatctgtgtgtgtgcccattcatttaatagtctttgtatatgctagaattaaggcacaagaaatacaaatgtttcatgtctgtggtcaggaaatacagttagcaatggctgtagctgtttagattgtgaagatgataattggccgcttcagatcctgtgtcttacagataatcagtactggaaggtgtagggtgaagctgcgtcacagccatgaaatggaggcattgtgaaacccaagccggcccagaacaccctcgcagcatgatttgttattgcacagagctggctgtactgctgctcaagccatatttcctgaaactcaagaacgccagagt

SEQ ID NO: 116069 - DNA, 1040 bp, Homo sapiens
attattgagccagagaaaaattctcctatagcatgtgatggaagtggccacattttacctcttgctttatttccagaaatgaacacaggtgtctatatccatttaatacacccctttttggccgggtgtgttggctcacacctgtaatcccagcactttgggaggccgaggtgggcagatcacttgaggtcgggagttcaaaaccagcctagccaacgtggtgaaaccccatctctactaaaaatacaaaaattggtcaggtgtggtggcgtgtgcctgtaatctcagctattccggaggctgaggcaggagaatcctcgaacctgggaggcagaggttgcagtgagctgagatcatgccacagcactccagcctgagggacagagtgggactccatttcaaaaaaacaaaacaatacaccactttttatttgtagtgcactatacttagagctgttgccataggaattgatataccaggcgtcatggtggtcagcagacaaataggaaactcctgttatgtcgtcagaatgagttgcagagagtaccatctgctacctgtattgtacatctttctgttcctctgtcacgcctggcacaagagcagcattggtttaatcatcagcagcccttctgctctctgtagtcaggattggcagtaactcattggtgggcaacactgccttggtcttgccgcttgcactgtgaactgtaactacggacacacatgtcaggaaagaatggtgcttgggatgctcctcctatctgtgcctcaaacgttttcactcgagggatattaaaaagtggcctactgcttataaagactgtgtgtcagtgaagaggaagaggtgggagtggagagtgggaggcatttgcaagaacatatgttggattctttttttctcttcttggtgacaatgattgacggcatctagtgagtccctgtttgtcacttccttggtacagctggtagtggaggtgggggaaatcaataagggctggacaaaggacatagctagaggaagaaagcactgcaaatat

SEQ ID NO: 116070 - DNA, 1031 bp, Homo sapiens
ttatcccctttccaaaactaacatgaaattaactacagtaataacttttaaaaaatacatttgcgataaaaatgccatctactaaccagaaatttgaacaacccctaacatgaagtaaacagacagaattcgattgactgagaaacaaactgggagaagatcacagcccacaaaacgctgggggttgcagcagaggtaggagctgtcgtgaggtttgctccaagcaaaggggacagcaaggaaaagaagagcctcaaagtgagcaatcgtcagcctaggaccagcagaactatatggcccttccctaaagcagcaagtgtagatgctgatagcgggatagcatgccggtacccaagacagctaatgacctcaagaaggaacagagagtccccagtctgagaaggaaagacactggttcccttctggcgtccgttccattgctctctacagcttcttaatgctggctcctgacatgcggatctgcagtgaatgaccaacaaacagcaagtctcaaacactaagatgagtcccagatcagaagatgtcagacatttgaaggaaactgccactgaaggaagcattagattcaccaaacagaaccaagacccaaggaacaaatgaaaatattaaaatatgtgcaattgatgattcattcaatttatgttcaacaaatatttattgagcacttacatttatacacagaagaaccaaagataaaactctaagaaggaaaatttggtatagataaaatcagaaaaacagttaataaaatttgtagatatctaaattattggtggatataattaaaaaagcatgaatctaaaattctaaattatctcaatattccacaggtgggaaagttagaggtggaagcatctaaggataatagataccaattagtttaggctttgatagaaaaatgtaaaagtatattaaaacttcagcaggatattagtataggtaatatatattaaagatgcagcacattaagtacttgaaataagtataaaatttgttgcttgaagacattt

SEQ ID NO: 116071 - DNA, 1035 bp, Homo sapiens
ctctttttatgccccctgtgtcccatgcattgctagattctgctgcctactcttgttggagttgaatctgtcgccaaccttctagtctcaccagtcttgcctcagtcctgccccttctgacctcattgcatgactcttctatcaagcaccttccttgtgggtctctctgcctcctgttactctctaagccaatccctcttaaagctagaggttacaaaactgatctttaactacaaatcttgtgttaacccaccagagacatgccccgattctctattacctactgaattaaataccaaatcttagcttagccttcagctgaccccctcatctttttggctcaccatggacacactccaagctgtagcctaatgtgctaagctttccatctgtgtaaccaaatcctgctgtctgtttcctattcttgacattattctgttgctcgaagccctcattgattatgatctctttgcaaaattttcttcccaactaagtatgaatactttcttaaaaaatgcttatagtacttctcttatagaacctattctgttcttctaggtatatttattacttgtgttcttgattttattagatcaaatcaaatgaaattggcactattcaactgtttttgatctaaaaaaagggcaataccaagtggtccaaactaatgttttccacatttgaaaattagcccttttcaaagagtcaccgggtctgtcattcatctttgtagtctttgccagcattctcccctagtcccctgcacagagcaggcactccacaaatgcttgcaatgaatttaaataattagggaatggtttttgtcactcttcacatttttccatttgaatttcgagttttggaaatattttatttaacctcagaaatcagtgaagactttgttttgcagaatagctgtatttcagaagaagaaagagatgcttatgaagaactgctgacacaagcagaaatccaaggcaatattaataaagtcaacagtaagtaatggatcgtatgaaggaaattgatatttcc

SEQ ID NO: 116072 - DNA, 1051 bp, Homo sapiens
agtttgctgagaatgatggtttccagcttcatccatgtccctgcaaaggacatgaactcatcctttttttttatggctgcatagtattccatggtgtatatgtgccacattttctttatccagtctatcattgatggacatttgggttggttccaagtctttgctattgtgaacagtgccgcataaacatacaggtacatgtgcctttatagtagaatgatttataatcatataatgggattactgggtcaaatggtgttacttttaaaatcttttcctttatagcttgtttttgttcatttctaaagaaatgatgggtagttgtatttctttctgtgtttattttttactttctcatttcactcctgttgggtcagcatttagacgttaagtgtatgggatgcccataaggactttgcgcttttggaatggtctccatctgtgagggacactaaccagtgcaagttaccgataatccaaatcgttattgtggtcagtattatttattatacattactagtgtatttcacatctgcacttggcgaggcctcattcagctacagaaaataaattgttaccaccatttcctatttttgaatgtttttctctcaagctactctctatggaagacaccgcatgtcaccttgaagcatgcagaattttgaaaaagtttgtcacaaccaagaaaacagttttagacttcatataatgtttcttcttttaacctctgccattactagatccctagagactattcagaattcaaactgcagagtgactcattatgtacacagaagattgttcttcattgccctggtgcaaagacataaaagcacactaaactatctagttttattaattttcgctggaatagttcatgttagcctatggttgtaacattggttctgtgaaaattggaaagtgggaaaattgataattgagaagtaaaagtttcttaatatatcagtatgagtaagtttttccctgaaatttccccaggcagaaaaaaagtaattggagtggttgactaaactgtatcttccagagggct

SEQ ID NO: 116073 - DNA, 1039 bp, Homo sapiens
aattaacatcaagattattttctcttccacagttatgcaaacacactactctctgttaaactagaagttttatcccaagggcaagataacttaagctggaatgaaattcagaattgtattgatatggttaatgctcaaattcaagaagaaaatgaccgtaagtataagacactttccttctctagcatagtgggagaagaaggtatctggacaacttagttttctagattagggctttaagtttttgctcaaggaactttgtgagagcaaactccgctaatatgcatacctttatttataggtagattttatgcctataccactgtaccaatatgttataaacgttacaaagcctacacaagaattcataatataataaaatacacaagtaaaaggcctgatttttctggttatttgtacttcagagacagctaaatacagagacagctaaataactcatatttttaagcacccaattttattttgaccttttatttgggcatctttttttctgaaatatgacacgatttttctgccccacaaatggaggaattggaacacgatctaactgttgcttaatgatcacaaatcatggtgatttgctgtgtttctagaaattatgagctgccagcatgaaagcataccaacctcaggaagatatgccctgaaacatgctttcttgaatgtcagcttgctgctttatcatttgcatcttgcttatgaaaatagagtgaagaatgaggagctatgtagcttctgcagtccatacattcactgcttttctgtagtatgcattaccaaattcaagcttcgagctgtgttttccaccatgaaaacaaagcaacaccatcttctgtggcttatgagcttttgacttgtcagcaacagtgggtgagtgttgctaaaatcattgatctctcctccaccttccagctttgacttttctaactcatttgctccaagctcgcggatagagtgggcagatacttctctcacagtttattatgttttattttagtgtgtttgggtaaggtcttag

SEQ ID NO: 116074 - DNA, 1149 bp, Homo sapiens
gaatgccaggctaaagatttatgatttattatagaaacagtggagttagtggaaatgttttagtgatgtatcctaactgatatctaaggaagattaatctggcaggacttgtgaagtggtggagggtaggctggcagtggagagaatggttagaaggtagaggtggcctggacgtagtggctcatgcctgtagtcccagcactttgggaggctgagataggaagatcactcgagaccaggagttcaagaccagcctgggcaacagtgagactccatctctgcaaaaaataaaaaataaaattagttgggtatggtggtgcatgcctgtagtcttagttacttgggaggctgagacagcaggattgcttgagcccaggagttggaggctgaagtgagctatgatcaggctactgcacttcagccaggtgacgaagcgagacactgtctctattaaaaaaaggaaaaaagaaggcaaaggtgaaactagataaaagaccctggtgagggaccctacaaagatagaatcagttgatgaggcagccaccagcatgagagtcaaaagagaccaaagaataaaaaatgatgtcaaatgtcaaggatggcaataccactcacagaaatagggaagatggtgatttaaagagcttgaagtagcaataaggcaaatggaaatgtcattttccatagagttgtgatatcttttctcctgcattaacatttttaaaatactgataaagtgtttttaaaaattactaatgctggctggctcagtggctcacgcctgtaatccagcactttgggaggctgaggccggaagatcacttgaggtcaggagttcaagaccagcctggtcaacatggtgaaaccccgtctctactaaaaatacaagtatttttagtagctgggcatggtggtgtaatcccagctacttgggaggctgacctgggaggcagaggttgcaatgagccaagatagtgccactgcacgccagtctgggtgataaagtgagactcagtctcaaaaacaaacaaacaaactactaatgcttttgtaatgtttgacctttgaagcatatttcttaggagctcggaaatggagctccttgcactatgcttatgttgttcttgaaaacagacgttctctgtgatg

SEQ ID NO: 116075 - DNA, 1084 bp, Homo sapiens
agtggttgagatggcctagggggagttatgagaagaaagaatccaaaggtggactttaggggtaatgacagattttaagggaagaggaaacaaaggaggaaaaatcggaagatgaaatcggtatgaggacctaagaagttggaaatgaattctttaaaagatagaaacacatcaactatatgctatcaatatttggtgttacttggcatgttgatgttaataatcctaattcctgcaatttcaaaaacaaaatcttaaagctcaaacctgaacatttattattatataactttttgtaaccctttcacatgtatagaaaatagattctcccagatttctaatgttacctttaagatagacttctatgccaaatataaacctcattcttatcgatttaaaatgccagtactgcgccattatgtcttgtcccatggcctcaaaattcctccatattgaatacttgaagttagtgtttagtaacctatgtttcattcagagccagtttctcttcctgctttaatctctagcagttagctcccgggtgaaatggaaaccctccacgtaaacctgagattgcacaagctgaattcacggtgtaaaatagaggaggtgtgtcctagtaactgaggggtatggaggtgatcaggtatcatttaagaaaaggtagattaaagaaaaggaaagaaaaatttgggaggcagcattcttctatgcctgtatttagaggtgatcttagaagctgtgttgtgtgacacacaaacccttctgctcacttttgcattttggaaaagttcttgcatctgacatcacccaaagagaagtgcctttaaagataggcacaaagttagagaatggtgcctgaagagcatgccgtacaagttattagcctgattttaaaaagctgttaaaaccaagtgtttgtccgttttcagaaagtttctgggatttagcaagacatcatgcctccagacatgccaaacagtgcctgtgttttgtggaaaagttgatttgattccattttccgtgagaatgccagatctgggtccacttaaataaggcttttattcctcagagcctggttttc

SEQ ID NO: 116076 - DNA, 1047 bp, Homo sapiens
agaaagtagattgtaatttagacattcaaatagcctaagatggttatgatttgtctcttagaaatcaaaccaatttagaaggtttttaaaatgttcttatattcattgttcttacattcggcctgcaaatgtcaagttgattctgtttttcacattgagactcatggttctattgactataaaagtaagaggatttctcaaatgtataattttgtactctgtattgcacatctaaaatcctatcttttcactctgtcctgtcccttaaagagccgatatactttcttttactatatcttaaacagcaaaaaagattttccaaagttaatgctacctatgagaattttctgactttcaacaagaatttgattaaaaacattcttcattatttgcatgaagacttgaaatagattctggtcacacactataagcatcacacacactctcagataatatgataaaagaaaatgtgttggcccaaatatgttaccaccagcaaaatttaaaagggcagagtaactcaagtccctttcattttggcctagtgttcacattcactggagtatcttgcttgcttaaagtagatttgcctctacttttgattccttagagcagtctttctctacctttttctcattatggcaccctaaggaatctttttagacagttttttctctaatcactccttaccatgaaattttaatgccacagatattttgtatacctgtttatgtgccatatgtagacctgtactttatacataaagagatttttttcactccctccctgcaggaactaatttttgccccgttaggggttctatcacctccactgtgaatgtgtgccttaagagagcctgctggtatatggcttaagatgtaaagcaaacattttttggatctcttaggagatttatggaggtttcttaatttgttccttggcagaaacatacctgactttctggagtgaaagtcatctatctgatatcttcaactatctggaacttagctacaactcacagattaagaaaaaaagcaatcaaaatag

SEQ ID NO: 116077 - DNA, 1008 bp, Homo sapiens
ccaagagtttaatgtgttttgttaatgaggaggggtagaaatttgcaatgggataaaatgcttgttaggtctaaaatggttccagaattaagttttaggactccgttgcacatatccaccagctctgcctttctagaacacttgtttaggttgtttttgacaatcttgctaaatatattagcactatacaagagaataccaggatttctgtaacttaaaaaggattttgcttatcctaaagtaaacaaatgtctttgtaaaactagttctcaaatacatgctaatgccctaggttacagctacatatctatgttcgtgtgtattcaccccatttcatagattactacagcaagcaaaacctagtgccttcataccacatatgagtaaccaggaaagactattgtttttaataaaccatactcccatggtatctaattcttcttatggactaaactggtctgtgaatttgtgattgtcttgggcatatgtggtaaatattctcaaagggtaaaaatgtttgatactaatgcattcctaaaacgttgaattatatatttgcatgccttgaagtaagtggaagataaccattaacaagaaacttttttttcaattacccaggggttactctggtggttgatgttaatcagtgtttggaaggaaaaaaatcaagtgatattttgtctgtattgaagtcttccacttctaatgcaaatgacataatcccggagtgtgctgacaaatactatgatgcccttgtgaaggcaaaagagctcaaatctgaaagaggtaagttggtttgttactttagcacaaactaagtattttaaatatcatttctgtggtattatattttcttaattttaagacaagtaatgctttcaaattaacatttctgtaattttttgtcatctatggctaaggaaattaggaaaagttttagatgtttctttttagttttagaaagctatgatgagctcagtggcaatatatggatggcattaagaaaat

SEQ ID NO: 116078 - DNA, 1073 bp, Homo sapiens
tatacattaataaaactccttctcccaaacaacaaaattctatttttacataattattccctgactcctagacattaataaaacttctccccaaaaaagaaagtgtacttttggcataatccatttacaaagccagattgtgactggaatggtggcatatgcctgtaatcccaacactttgggagactgaggcaggaggatcactcaagcccacaagtttgagactagcccgggcaacatagtgagacccctatctctactaaaaattttttaaaaactagccgggtttggtggtacatgcctgtagtcacagctacttaagaggctgaggtgggagatcacttgagctcaggagtctgaggctgcagtgatctatgatcgtgccactgcactccagccggggcaacagagcgagaccctacctcaaaaaataaataaataaataataaaaataaagccagattgtaaatatgcagtttaagccctgagccaggacaggctatggtgttctcatccgccaaagctatgctatgtagacctacaccctgtctctcccctcttccaggaaccctctcagcttttccagtaattttctgggggaaatgagaatattctttttattctaatgttttaacataaagtggtaataaacaggctacgcaacgaaaacaagaaactaccacccaatagtagccttctgcaaagaatcacttccattgttctggaaacccccatttctcggaagcaggcagtttttcacatcatgtgctgtgttatgacatctacatctggtttgcatgcagacatcactgccgtcagccattagcatgtattaagtatctgttgggtgcagggcactgtgctcagtggcatggggaaggaattgggaggctttagatgacttttcaaacattaaaattaaaaaaaaaaaagctaagcattgaggggtttgcattgttttctttttaagatcaattggaacttatttcatgaaaaaatcttggtttttaaaaggtaaccatttcaagaatagtttcagaccttgtgagttgaagcaaggtcctggggatatg

SEQ ID NO: 116079 - DNA, 1047 bp, Homo sapiens
ttataatagtttacaacaccttccttggtttttagttttccatgtagtaatttgatttttttcctttgagaaatgattaactcagcttatgcaagtccttaggtaactgaagagaaatatctattacagagtggccagaagattagtgaggaaattcagttaaccaacgtttatttccggtataaaatcataatataaaaacacgtacctacaataagacattatgatagcatctgatttattggccttccttcctgttaaactgatcctggatatatttaccagctttgacttttatttgtaccctgcttcctgccgctaaagatttcaagtgaagcattcacactttaaataatactatcttttctccatcaaagaatcaaggatattccacatccatcctttacacacagagtaagaaagagaatgagattcatgatacaacaccataaatcaaaagcacccgctgaccaagcagtgcagttttcaagaacttatacaaacccaagaatgcatatcagtacattagaacagttatgtattggggtgagatggagactggaagtggaaaaatgaggacaaagggaacaagtatgtgttgaaacaatacgaaacatattacttccaagctacctgtcctgagttctgaggttttaatttgtggcaagagctttctctcctgccactgatgtgctgaagtgtgcttgaagtgtgaatgaagacagcattcatctccacttgatttttttttttaaacattcaatcatctgtgaaaacaacaggaagagcttcttcactgtgctgtgttgatatgttcctctcttaggcttgttgattttgtcctcagatcatctgaggctccattcggtcatgcagcaaatgcttgactacctactctgtgttcatgcgctgggcttgaggctgggatacaacagtgggtaagctggaaacagcccctgtcttacaggggtggagagcacagttcgacagtaggaccgcaaccaagttgcaggactaggactcacccttggcctcacaagagttgag

SEQ ID NO: 116080 - DNA, 1005 bp, Homo sapiens
ggaatgtgccaatattgtactctccaaaagaaatttaatatgagccacatgtaattttaacttttctagaagccttattttaaaaagaaatagatgaaattaattctaataatatattttatttaacccaatatatccaaaaatatttaaatatgtaataaatgtaaaaaattgatgaaatattttacattctttgtttcatacaacatcttcaaaatccagtgtgtgtttcacacagcacatctcagtttgtactagccatgtctcaagtgctcaagtgccacctgtggccagtggcggccatcatgggcagcacagctttaacgaccatgtgagtgcttaccatgtgccagacctcacagaaggctttagatcttttcatccaatccttgcatcagtcctgagagattcctgttttataaacgaaaaaacaaaacctacaaggattatataacttgcacaaatccacatggctaatatgcaacaagagtccaagccaagacagatttggctttaaatctgtccgtccccgtcgtccttaagcactagacacactgtagtgggagggaggtgggttccctgtcatgggactggatggttacttatgtctgaggtagaactttggcaatgaattccacaggcctggtgtacagtagaagtccaagggaaacaggctgtgtgagcagtttgtcctccagcaactcttgagcaaataaacattctttgtctttggtggggcacgttttattgactccagtcatttggtcattgcacagcttctctaaagaactagaagttccctagaaactgtatatcacaattagttctgagaatactatttcaaacaagaaagttactatattgacattttttaaatcatccaaagcttttatttttaactcagtgttcctgtttaatacattgatgatgatggctggaggaaggtggtgtgtaggaaggaaaggatacattgctttctcagccacagccgctttaggaaacatg

SEQ ID NO: 116081 - DNA, 1049 bp, Homo sapiens
gttctcatagccacatttcaataggtaatctagttttagtttcctcagctagcctatccaggaattgaaatccttccatgtggggaacaaagtagcagttatccattaaaatatgtccattactatagtgatttgtcaccttggcaataaagtagctattgagaatttttcccaaataaggcttgctatcgaaaagatgaagtaattcctttcaaagacctacttcaaaactcaggaagaacatgttctggttctagtctctgaactttggctggaggactactttcattttgacattaacttgcattgtgtagcttatgaactgtgaaattaggggatcagagaaaactcagcatcttgatattctcttttcaggaggtagaccatgccacggacatggtgagccgtgcaatgatagattccaggactccagaagaaatgaagcatagccaatctatgattgaagatgcacagctgcctcttgagcagaagaagaggaaaatccagaggaatcttcggacgttggaacagactggacacgtgtcatccgaaaataaataccaagacattctcaatgagattgccaaggtttttggaaacagtattctttcttccttcacttagcagacatttgctaatcaccagtcaagtgctgggcactctgtgaggtggcattagggattcatggttgcatatgctgtggttactgccctcttcaatgctacagatttttcaaggtttcaaagcagttgatgactttttttttttttttttttttttgagttggagcctcgctctgttgcccaggctggagtgcagtggcacaatctcgactctctgcaacttccgcctcccaggttcaagcgattctcctgcctcagcctcctgagtagctgggactacaggcacgcaccaccacgcccagctaatttttgtatttttagtagagacggggtttcaccatgctggccaggctggtctcgaaatcctgacccggtgatccaccggggcctcccaagcagttgatgacttttaagagaaaacaatca

SEQ ID NO: 116082 - DNA, 1009 bp, Homo sapiens
atggcctggtgccatggcatgcgcctgtagtcctggctactcgggaggctgaggtgggaagatagcttaagccaggagtttgagaccaacctgggcaacatagttagaccccacccaggtgattaggtcaattgaatctgacttttgtcaacaaattcttctaatatgttttttaaatgcacaaaatgtcaaagttgagatttaatgatgctttttacaatttcaggatttacttcagatgcaatatgaaggagtagctgtaatgaaaatgtttgataaggttaaagtgaatgtaaaccttctcatatacctgctgaacaagaagttctatggaaagtgaagtgcctacagaaatttcttggattctgtatcatctggattaggaaatgaatttgtttaatatttttgtttttaaacatgattgaaatcactgcttataaatgtgtgatttttttaaaacgaccaaaactgttctgaagaatgtacccaggtgcctttttgctaatttgatactataatagaatgagacataaaatgaattaatggaaacatatccacactgtactgtgatataggtactctgatttaaaactttggacatcctgtgatctgttttaaagttggggggtgggaaatttagctgactagggacaaacatgtaaacctattttcctatgaaaaaaattttaaatgtcccacttgaataacgtaattcttcatagtttttttaatctatggataaatggaaacctaattatttgtaatgaattatttagacagttctaagccctgtcttctgggagttatcaattttaaagagaacttttgtgcaattcaaatgaagtttttataagtaattgaaaatgacaacacaataacactttctgtataaaagtatatattttatgtgatttattcctactaaatgaaagtgcactactgcctcatgtaaagactcttgcacgcagagcctttaagtgactaaggaacaacatagatagtgagcata

SEQ ID NO: 116083 - DNA, 1078 bp, Homo sapiens
gattgatccctttatgtcaagtactcagcctttcctaatgtcttcagggtagatctctgaaaacctatcattcacctttgtccctttgaggggcagagtttaggaagtattgcttatatcaagacaaatgtttcacagtattttgagttggcttattctctaataaagtctatttgtgcattatctgctctttaccacccactctcctagtaagaaaacataaacaaaagtaaaatatgctctctgcttgtcgcttttgccttgttgatgcgttcactttttacatttaaaatttttttaattttatttttcagaatcaaaagcaacaaatgccaccttagatccccggtcatttcttctcaggaaccccaatgataaatatgaaccattttgggaggatgaggagaaaaatgaaagtgggttaactgaatacagattagtctccatcaataaaagcagtcctcttcaaaaacaacttcctgcattcatctcagaagatgcctccggatatttgaccagctcctggctgacactctttgtcccatctgtgtacaccggagtgtttgtagtcagcctcccactaaacatcatggccatcgttgtgttcatcctgaaaatgaaggtcaagaagccggcggtggtgtacatgctgcacctggccacggcagatgtgctgtttgtgtctgtgctcccctttaagatcagctattacttttccggcagtgattggcagtttgggtctgaattgtgtcgcttcgtcactgcagcattttactgtaacatgtacgcctctatcttgctcatgacagtcataagcattgaccggtttctggctgtggtgtatcccatgcagtccctctcctggcgtactctgggaagggcttccttcacttgtctggccatctgggctttggccatcgcaggggtagtgcctctgctcctcaaggagcaaaccatccaggtgcccgggctcaacatcactacctgtcatgatgtgctcaatgaaaccctgctcgaaggctactatgcctactacttctcagccttctctgctgtcttcttttttgtgccgctgatc

SEQ ID NO: 116084 - DNA, 1789 bp, Homo sapiens
ctcagtggctcacacttgtatctcaccactttgggaggctgaggcaggagaatcttaaggccaggagtttgagaacagcctgggcaacatagtgagatcctatctctacaaaaagtaaaaaattagctgggtgtgatggtgtgtgcctgtggcctggctgtttaggaggattgcttgagcccaaaagtttgaggctgcggtgcattatgatcgctccactacgctccagcctgggtgacagcgagaccctgtctcataaattaaaaaatgaataaatgaatgtactttcatttgaacaaaccagtgttactgctgaaacatttatttctgtaatgacccttgtcttcctttcttgtacaggaaccagtagatcctctaaaggaagaagccttattggtaaggttgatggcacatcccacgtcactggaaaaggagttacagttgaaacagtcttttctgtggatgagttttctgcatctgtcctcactggaaaactgaccactgtcttccttccaattgtctacacaattgtgtttgtggtgggtttgccaagtaacggcatggccctgtgggtctttcttttccgaactaagaagaagcaccctgctgtgatttacatggccaatctggccttggctgacctcctctctgtcatctggttccccttgaagattgcctatcacatacatggcaacaactggatttatggggaagctctttgtaatgtgcttattggctttttctatggcaacatgtactgttccattctcttcatgacctgcctcagtgtgcagaggtattgggtcatcgtgaaccccatggggcactccaggaagaaggcaaacattgccattggcatctccctggcaatatggctgctgattctgctggtcaccattcctttgtatgtcgtgaagcagaccatcttcattcctgccctgaacatcacgacctgtcatgatgttttgcctgagcagctcttggtgggagacatgttcaattacttcctctctctggccattggggtctttctgttcccagccttcctcacagcctctgcctatgtgctgatgatcagaatgctgcgatcttctgccatggatgaaaactcagagaagaaaaggaagagggccatcaaactcattgtcactgtcctggccatgtacctgatctgcttcactcctagtaaccttctgcttgtggtgcattattttctgattaagagccagggccagagccatgtctatgccctgtacattgtagccctctgcctctctacccttaacagctgcatcgacccctttgtctattactttgtttcacatgatttcagggatcatgcaaagaacgctctcctttgccgaagtgtccgcactgtaaagcagatgcaagtatccctcacctcaaagaaacactccaggaaatccagctcttactcttcaagttcaaccactgttaagacctcctattgagttttccaggtcctcagatgggaattgcacagtaggatgtggaacctgtttaatgttatgaggacgtgtctgttatttcctaatcaaaaaggtctcaccacataccatgtggatgcagcacctctcaggattgctaggagctcccctgtttgcatgagaaaagtagtcccccaaattaacatcagtgtctgtttcagaatctctctactcagatgaccccagaaactgaaccaacagaagcagacttttcagaagatggtgaagacagaaacccagtaacttgcaaaaagtagacttggtgtgaagactcacttctc

SEQ ID NO: 116085 - DNA, 1239 bp, Homo sapiens
ccaagataaatgagctgccagaatcaggtttccaatcaacagcagtgagttgggattggacagtagaatttcaatgtccagtgagtgaggttcttgtaccacttcatcaaaatcatggatcttggctgggtgcggtgcctcatgcctgtaatcctagcactttgggaggctgaggcaggcaatcacttgaggtcaggagttcgagaccagcctggccatcatggcgaaacctcatctctactaaaaatacaaaagttaaccaggtgtgtggtgcacgtttgtaatcccagttactcaggaggctgaggcacaagaattgagtatcactttaactcaggaggcagaggttgcagtgagccgagattgcaccactgcactccagcttgggtgataaaataaaataaaatagtcgtgaatcttgttcaaaatgcagattcctcagattcaataatgagagctcagactgggaacagggcccaggaatctgtgtggtacaaacctgcatggtgtttatgcacacagagatttgagaaccattgttctgaatgctgcttccatttgacaaagtgccgtgataatttttgaaaagagaagcaaacaatggtgtctcttttatgttcagcttataatgaaatctgtttgttgacttattaggactttgaattatttctttattaaccctctgagtttttgtatgtattattattaaagaaaaatgcaatcaggattttaaacatgtaaatacaaattttgtataacttttgatgacttcagtgaaattttcaggtagtctgagtaatagattgttttgccacttagaatagcatttgccacttagtattttaaaaaataattgttggagtatttattgtcagttttgttcacttgttatctaatacaaaattataaagccttcagagggtttggaccacatctctttggaaaatagtttgcaacatatttaagagatacttgatgccaaaatgactttatacaacgattgtatttgtgacttttaaaaataattattttattgtgtaattgatttataaataacaaaattttttttacaacttatttctgagttgtgcgtttgttttgagggaaggagtgagagaaggcaggcaacagcttcacccctctaaaagtggacactcacaccaaactctgtgacaacggtttttcatttaaaaatgtttcagaggccgggcacagtggcacacgtgtgtaatcccagca

SEQ ID NO: 116086 - DNA, 1637 bp, Homo sapiens
ttatctgcatgatacgttttaaaaagtctgcatggggagagaaatttgccaaaaaataaatcaatccctaattccttgcctttatttcattatcagttgataagcaacagtattaaggtatccagttagaagttaagagttaagttttttaaatagaacacaacctatctacagatttttattttactcttgctgtagaaaatgtaaccaacttaccttttttttttctttttaactgacagctagggtcttgaaggagacattagaatcaaagatacacacttctgcagatttatctgtgccatctgttttaatcttttaaaatttgtacagttgtaaaaatcatgatttatttgaagtatgtgctttttgtgtttaaatgccagtgttttgtagttaagtcctttttatatacattattctaatatgatacgatttcacttcatttttttgctacagattatttttatcagacgtactacaatgacgttagtcttccaaataaagtgactgaactgtcagatcaacaagatcaagctatcgaaacttctattttgaattctaaagaccatttacaagtagaaaatgatgcttaccctggtaccgatagaacagaaaatgttaaatatagacaagtggaccattttgcctcaaattcacaggtaataaaatgctaaacatgaaactgttgatgcccaagaacctgtccttctttgttgttattatgtggaaagatagacttctttggtccgtcacagcatatataagggttataaacattcttatgtgtaattatgcaaagaatgttgtagtttttccaaaaccagaattagaacttcttcatatatgtagtggttttcctactacattgtgttccaaaattttgtgatctacataaactaaaacaaaatttgtccagatattttgactgaacaaaagaactgtggacaacaataccacatttacacctaaaaaaattttaatgttcctttatgtcagataccctgccactattcaaatttccctgaatctataaatttgtttttatagtttgtttgaattaggatccctattgtgtttgatatatctcatttaatctacagttttctccttcatttgtctttttgaaattttttttccaattgaacatataatcattgaagaacctagatctttgtcttagccaatatttcagggtctgtattttgtggatggcttccctgtggcatcatacatttattctcgaataattgtcactcatttttagtgccttcaaaactgggtcaaagttgaagttactgacacactagtaaatgttgtaataagtggttcaagtcataattgatagtcatgcttttcctttgtagaaattgaagtcgttacttaaacatagtctcaggtcttgagttcagccaactttttaattgatatacagaagcttttgtcttatttggcatgactatatcttttataggagccagcatctgcattagcaacagaagatacctccttagaaggctcatcattagctgaaagtttgagagctgcagcagaagcggctgtatcacagactggatttagttatgatgaaaatactggactgtattttgaccacagcactggtttctattatgatt

SEQ ID NO: 116087 - DNA, 1050 bp, Homo sapiens
ttatgcttgctttagttttcatgcctttaaaagtattatcaatttttttaatgtattaagtggaaccatatgaaattgctgtttcttataagttaaaagtggtcaagtattgacaattttatatgattaaatttaatatttagatttacttgtttctcacactaggaaaattagatcagttattgaatggtaaagtattttggaagattaaagcattttttattgttatctttaattcattgtcttctgaaaatactatagttgttcaaagaaatatttaccacatttgaatgtatttggcattttcgttaagtttattttatcttacatgaatagaatttatttttttcttgactttcaaaggaaaatcaactctattatgatccttccactggaatttattactattgtgatgtggaaagtggtcgttatcagtttcattctcgagtagatttgcaaccttatccgacttctagcacaaaacaaagtaaagataaaaaattgaagaagaaaagaaaagatccagattcttctgcaacaaatgaggaaaaggtaatgtctttacaattttaaaaattgacataatggtgataacatgataattaagacaaaattttttatgaaactgacaatcattcaataactctgcatttcaaacatacccattaagataacctaggaaagtttagatggagcaaacatggactttttcataaactctgtcactagaaatagaaagcatttcttaaaatttgaaggagatagattaaggtcagataaaatatctcgtatatagtttggaagaagaattcagatcctcagttgataagttgatgtcaatgcacagttcataataaaagataaacacagtttataggtagacatagatacaggttcaactttcttagttatgtggagcaattttttacttactaggacaatttttttttttttttttgagacagagtttcactcttgttgcccgggctggaatgcaatggcgtgatctcagctcaccgcaacctccgcctcccaggttcaagtgattct

SEQ ID NO: 116088 - DNA, 1015 bp, Homo sapiens
atgcaccaacacgtctggctaatttttttgtaatcttagtagagacggggcttctccatgtggtcaggctcgtctcgaactcctgacctcagctgatcctcctgcctctgcctcccaaagtgctgagattacaggcatgagccaccgcacccggccaggaaaatattaaaaaaaaaaaaaaaatccattgctgacaactgtggagtgagataacatatttattaggattaatagtttaaatggcctgcaagacaatggttaagaaagcgatagttacatttaatttaaaaaagtattatgtaggctttcagatggtacttgtaaagactaaggggaaccccaaaaatgcttatgatgatgcaatgttaaattgaaagaaggaaaatataaaaagttaacagtgttctttatttctactctctaaacaggtaagtttggtggtttataggttataaaggaggcttgtttgttttattgatattttatgaactgtggcaactatttgatatcttactcttgaaattttatctcatggtttcctgtcctgtcctttcctgtcctatctctgtcctgtcttgtccttctgtcctgtcctgttctgtccttctgtcctgtcctgttcttttttgagacagggtcttgctctgtcacccaggttgagtgcagtggtgccatcatggctcactgcatcctcgacctcctgagctcaagtgatctgcctacctcagcctcccaaagtgctgggattataggcgtgagccactgtgccagccagtttttcttttcttaaccaaagaaaaattacttgatactaaattgtaaagttcacataaggaattaggattctgttagattttttctgttctcctatttgatttgcttctgttctatttttttgtgaacaatacttaggaatagaagagtatgtgactaaaatactaaaaatcagttttctgtttgctttcaagatctctgttttaatggcttgtgcttgttactagtggtttgattgttt

SEQ ID NO: 116089 - DNA, 1266 bp, Homo sapiens
ctcattaataattttactttttaaatgtggctactagaaaatgtaaaagtacaaatatggtttgtgttacatttttattggacaccattggtctaggctatcccatagtccaggcagtatgtgatgagggcctgaactaggaatgttaagacattgagaatagagagacagatttggatatattttgagaaaagtctgtagcacttcgtaattttatatatggttaaggggatctcagagataactataggatttttaatttggataataagaagatggtaatatcattaaccaagaaaggaaatgtgagaaggagagggggaacagattgtaaccattgttattttactgacacatatcttcacgaattcgttgaaacttgatgtaatgttataagatagtgatgtttaagagtattctcccctgttccctcgtatctacccacccttctccaggatttgaactcagaggatcaaaaagccttcagtgttgaacatacaagctgcaatgaggaagaaaatttcgcaaatatgaaaaagaaggccaaaataggcattcatcacaaaaatagtccccccaaagtcactgttccaactagtggaaatactatagagtctcctcttcatgaaaacatctctaattcaacatcatttaaagatgagaaaatcatggagactgatagtgaaccagaggaaggtgaaattacagactctcagactgaggatagttatgacgaagccattaccagtgaaggcaatgtaactgcagaagatagtgaggatgaaggtgagtaaataatcattatttaagtaaatagcccagtctggtaactataaaagagcaaaaccattaaaaatgttagtgagttgtagtatatctgccagaaagtaaacattattttaatgatgttattgaaaatgttgtgggttgccacttggttattcttagagagtaggatgtgaataaatgactaatacttagaccttcagaaggtttcattgtattgaatggcatagtcagtagaatacaaagccaggttacctggattctaatcttaaaatatagattaaggctgttttagtgggttagatatttgtagtctacttttgtaactgagagagaaaaacaagttgtctttaaaaagtatacattatgaattcagctacatggatattatggtaaatctaatttttttttacttgaatatataaagacatacttttaaaacacaggatttcatattacagttggccttctgtatccatg

SEQ ID NO: 116090 - DNA, 1072 bp, Homo sapiens
gataggatttcactctgttacccaggctggagtacagtgatgtgatcacgactcactgcagcctcatcttcccgggttcaagcaatcctcccgcctcagccccgaaggtagctgggactacaggcatactctaccatgcccagctaatctttatgtatttcatagagatgcagtttcacctgggtgttcgctaggctggtctcaaactcctgggctcaagtgatcttgcctctgcctcccaaagtgttgggattacaggcgtgagccaccgcgtctggctgaggctctttatatttctctttcctgtactatgttttctgtgttttctctctcctctcttatggttgttatcttttttcctgttttgcttttctctttttttgaccttccattgttcccattttgcttttatttaacggactgtaatgtggacctaaagtagattttatgtgatgtttgtctttttggaatataatttctcatttttaatttgaaagtccatttactttcactttctggggactcattcagaaagaggaaaaagtcctcttaattttaattctaagcagattatgttgcttttttacttttttactatgaccttgagtctcctgcctccaaaaaaataaaacaacacctaatctgtaacttaaatagcaaagcgatctgagatccttccccacctccagtctaaaccatagatagttctatggtggctttttctttttctttgtttctttttttttttttttttttttttttttttatagagacagggtcttaactgtgttgcccaggctggaatgcagtggcacgcaccacagcctctgacacctcctgggcttaagtgatcctcctgcctcagtttcctgagtagctagcactataggcacacaccaccacaccaggcttctggtggcatttctgttttttctttcatttaaactaacatccgctagtggggtggataatttgttggtgaagtcagtttgatagcacatataacatgtatccaaatagatgaaaaacttttaaaaaagaagcttaatgttaggggaaaaaacaagtattt

SEQ ID NO: 116091 - DNA, 1894 bp, Homo sapiens
gatcaagaccatcctggctaacacggtgaaaccccatctctactaaaaatacaaaaaattagccaggtgtggtggcgggtgcctgtagtcccagctactcgggaggctgaggcaggagaatggcatgaacctgggaggtggagcttgcagtgagccgagatcatgccactgcactccggcctgggcaacagagcgagattccatctcaaaaaaaaaaaaaaagagttttggtagtaatccaggaaatgcaagttaaaatcacaatgataaggcaatttcacacctcttaggctagcaaaaattaaaaattttggcaacatcaagttttggtttagtatacatagagcagcaagaattctcacagactgctggtgggaatatgaattgatacaaccactttggaaaacagttatgtagtaaagttgaagatttgcttatgttatgatttagcaattccattcctaagtgtgtattccagagaaacatttgcattttgtacacaaatagattgcaggtacaagaaggtttatagtaatatttttaaaaatagtaaaaccttggaaaaaaaccctgaatgtctgttttcagaaggatgggtggatagattgtggtatatccacacaatggattaccattcagcaaaatgaatgaacgacaactctataactgtgtataacaactggatgaacctcatgacttaatgttaaagaagcaaaataagaggaatagatagagtgttatggaacaaggagggaaagattagtcctaactattgaacatcttggaaacttctctgagaagttggccttgagtgtttcaaatcacattttgtattaagaatttttggccaggtgtggtggctcatgcttgtaatcccagcactttgggaggctgaggcgggaggatcacttgagctcaggagtttgagaccagcctgggcaacatggtgaaaccctgtctctacaaaaattacaaaaattaaccaggtatggtggcacatgcctgtggtcccagctactcaggaagctgaggtgggaggatcgcttgagcccaggaggtcaaggctgcaggaagcggtgatcacaccactgcactgtagcctgggtgacagagcgagaccctgtctcaaaaaaaaaagtttttgatgatatggaccaaaaaaaaaaagtttttaatgatatgtacaaatacttacattaggtcaaaatttttcaaattataatctctagtaccaaaggagaagaggtaggacatattctaaatttttcatggtaattaaaggtagatttatagatgacattttcttctatagcctctgtttctaccagaagcatataatagtttgtgtttctaaaaaagtattaagtataataaaatttaaattatcaaaggctcaagttaacatcatcatatcatacagaaattgtccatagttttgaaaagtataataattaataattgcttgatttcactttctaagtttcatgcagaaatttattttgaccatgacttacaaagttatgtccttgtggatcaaggcagtcaaaatggcacaattgttaatggaaaacagattcttcaggtgagtgtatatgtgttaatttgttacctgcacattatttttaaactgatttttttttatttctgaagggcataatctttatcatttggttcagagtagagttaagcccaaatgtgttacttcggaaggaatttccagaaaggctgaaaaaagtgtataatcagtgggtacttacttggctgttgagttttgacttctaattatgtatctatgccttattttcagttatgactccattgtaaagctattcagagtaagtgtgtaaatgtctcaatagcaactttgaaggtcgtccctttttttattgtctta

SEQ ID NO: 116092 - DNA, 1073 bp, Homo sapiens
tcagttaacacttaacatcctcagcatgtagcaaagtatttggcataaataagaaaatataggggctgggcgtgttggttctgacgcctgtaatcccagcactttgggagcccgaggccagtggatcatctgaggttaggagttcaagaccagcctggccaccatggtgaaacctcatctctactaaaaatacaaaaattagctgggcgtggtggtgtgtgcctgttatcccagctacttgggatgctgaggcaggagaatcgtttgcaccggggaggtggaggttgcagtgagccgagatcacgccattgcactccagcttgggctacagagtgagactgtctcaaaaaaagaaaaaatataggaaggcgggaggccttattcttagtctgtaagagtaaaaatggaaataaaactgagttatcaagagagaagaaaagggagatgtgatgcatttatcccattctcttaacatttcatctttttttattgtgatgattatatgttttggtaatagattgaagtctagaattggatatttctgattggatagggagactggtgggtttgacaagttgctcagttcagctatcttcatctccaatagtagtactttttttatgggtcattaagttggggaagtgtgtgcatgtgtgtatgtgtatgtgtctatttcatttatagctattttaaatatattttaaaaattataatcagacattacttacagtagatgtaaggtaaccataagtgattgttttgatttctgttttgtaaaatgtttcccctctagccgaaaactaaatgtgacccttacgtacttgagcatggagatgaagtcaaaattggagaaactgtcttatcctttcacattcatcctggcagtgatacctgtgatggctgtgaaccagggcaggttagagcccaccttcgccttgataagaaagatgaatcttttggtatgtgaaacagattaaatgtggctgtgataacatttctctttcattacctaaatgttctaaaaaacatcagtcagctactggctacatgtctaattgatacgatactgcatt

SEQ ID NO: 116093 - DNA, 1275 bp, Homo sapiens
aggctaatcatagaaaaaaaacctctagtttttttaaaaatagaatttggaaacttattttttctccccaaaagaatcagcagcacaggggaactatgtcacagtttacctcttcctgattcagaaatgtgtatggtttgcagcttttaaaaaccatttttttaaaactaataaatagtgactgaaccaatttatgcagtaaatagactaaagttcacagggcacggatgagtttatcaaacttcgttattttatcttgtcatttacaacatccatataagcaactagccatataagcaaaattcatagaactactaatgacttaagtgtacatctgttcttgtctccatatattcatgtaagatgcacaacaaaagaaacatcagaagtttataaaaataaatctgactatatgcatcctcatttattccctttagaacctaggtaaaaaatgttgcgaaaacatgggtagtggcgcatacattttgttatccttgaaatagcctaagtaatgttattgaagaactaatgaacaggtaacatattgtagaaaattagtctttcattgttttcttctgtgaagaatctgttgctatgtactgtatattcagcatttatatttggtttgtttcatagctaatgaggtatttagatatgaacaactgaatacatattgaaatagtgtgctggcttttgtagttttgataaagaccattgcaggcaatggaattgtgccagagaaatctgatttctagtacaaaaggaatacttagccagggcctcaagctcaagatacttattgaaaacatcctcaattgcaataaaaacattataacatgaaaaagagtgattttttgaaccggtgatttaaatgtattgatctgctttgaattttcaagcagccagaattttctagtttaaattggcagagttataacaaaggagagcctcaaatattagacaattgcagtgcggctttctgggcacaggtgtcactgctctgccacctatcactattctttttctgttcagtttttctctcaggtgtttgctgggaaattaacactggaactgacccttttctggcagtgaatgtaagctctagctcccccatctactataaagaaatgtcttcgagatgtagaaataaggaatattctgaaaataaaaattatacagtagtaaagataattcagaaagaaaaagctacctgttagaatttccagtctaaatggcacagggtagttacggagaaaaggggatggagaaggagaa

SEQ ID NO: 116094 - DNA, 1026 bp, Homo sapiens
ttctgtcggtctttttgtctttttattgtgtttgaagagctctttgtgtgttacggttgtggctgaagtgtctgaagaggtttctccccctccacattgcaggggcagctgaaatgcactcgagttttttgttttttgtttatactttaagttctagggtacatgtgcacaacgtgcaggtttgttacatatgtatacatgtgccatgttggtgtgctgcacccgttaactcgtcatttacattaggtatatctcctaatgctatccctcccacgccaccccacgacaggcccctgtgtgtgatgttccccaccctgtgtccacgtgttctcattgctcaattcccacctatgaatgagaacatgcggtgtttggttttctgtccttgtgatagtttgctcagctaaccaggctgttacggcctgtggccatagactgctggtcactcagcagatactgagactgaggattgtattgagctagaatatagccgcatgatgtggaggactgagaaggtgaggcagttttgccccgtgctgccttccaccggttaagacctccaaaatcgaagggctgcccaggcagaggatgtccccttgccacccttggaggggcagcgctgtgctggccgacatttgtgatgcagcctgtccctggctcaggtgaggcttccactaggtcaaaaggattaagacatcgaagtcagtgcttctcatccttgtgcccactttaactcctaacagatggcattcacctgtgcgacactccctctgggcattccagtttttaaggaaacccagagaggtaaaaagcatgacagtaatcagtcacctctggcactatcaggggcacatcagtaaggatgactctcagactttggcacaagtaagagaatctgcgggtttatgtgcagtttccaagctttggctcaagaaagcatatcagaatgcaaagcaatactcttgatgttataggaaacgtttacatcccttttaatttataaagtaaattagtcgtaaagattca

SEQ ID NO: 116095 - DNA, 2066 bp, Homo sapiens
cgtgggaattatgggagtaggattcaggatgagatttgggtggggacacagccaaaccatatcacacaggtatcagaattattgttggaagcatctctttcccaaccagaccgtacgcttcctgagggcaaagactatgtgacgttcctcttggaatgcttggcagaaagcacgcacctgaccttagcaggtgcacaatgagcatttgaatgagagttggatggagtgaatggatgtaagcaaaatactcattcattggcatctttgtgttagtttaaaaattttttcaaggaaaaattaagggagcttttttcattttcttattagctaaccacagaattaatgatatgcattctcattgggtatttggtaaggaagaaacgcgttatcacagggctttggctaattaaacctccccattatcttattttaccctagtgataaataacctattttgcatgaagttcaatttaggaagtgaaaataaatttaaggggtaagggtcttggatctgttactcttttttatttgctctttgtagtcaattcccaaggggattcctccaacttagactacttactctgttgaataacataatgtcagatggaaaaacaactgccttttagccattaaaatcttaacgtgggcatgtctgagcagtaaatatcggtagtttctttattgttcatgtcttaaatttatataacaccggagagtccaacagtgacatcatttgcactatctatgatctcagccacctgtttagaggcaaataatcttattatttctcttgacagatgggaagattgagactcgggtgggctggggctaaagaaacagagtcaggttcacttcacttaatgcagcatcccccaagtgtctaccctgtgccagggagatgaatgggatgagctcctcttccatgacatcctgggtgtgaacacagaatctccttctgcagagcacagcaaaccacgtgacaatgagcagcctcacatgctgggtttcctcctccaagcggcgcagcagtgggcttccccatgggactgtcccaccagcctccacagttaaggctgggctggccctgcctgagctcacatgcttgaggagccaagggttgttttgcttttttgtttttgttttttgtttttctgagatggagtttcgctcttactacccaggctggagtacaatcgtgcaatctcggctcactgcaacctccgcctcccaggttcaagcgattctcctgcctcagcctcccgagtagctgggactacaggcacccaccaccacgcctagctaattttttgtatttttagtagagacggggtttcaccatgttggccaggctggtcttgaactcctgacctcaggtgatctacctgccttggcctcccaaagggctgggattacaggtgtgagccaccacacccaggcccaagggttgttttataaaattattttttatttatgtagagatcctgtgatatacacactttccctaaatgtatacacgtgatcacatgcatgctttcttagtacctcattgcttttacttttgtgtttacctcttccccttctccctcctttcacatcagttaccattgcctcaaccatagtatctccttatttttcttcatctatagctatatattgcctctacagatatgtatattacttaataatagtgggatcatattatacactcttctgcatctctcttttctccctgaacagttcctccagatatccttgtaagacattgaacagaacttcatccttttcctctttaatggctgtataatattccctggtatgaacatatgttatatactcagccattttcctggtggtaggcattcccttgcttccagtttcttgtcattctacatgattctgatgtagattctgatgtcattctacgtgaacatcctgatacaagactgtgtttattggtgctgatagttctatagaagagatccccaggagtagaatctcaggttatcttttttttttttttttcaatacagcatttcgctgttgtcacccaggctggaatgcaatgg

SEQ ID NO: 116096 - DNA, 1078 bp, Homo sapiens
tgaagactagagtctaggatttatgacagtacaaacctaccagttgcccattcgttacagaggcatgtgctgaacgctatactttgcttttgtcaagctctctctctctccccctccctgttcacacaaagttagctttaggagcaattttcagggatgaaaatgttaaatttggtgaaaatattaagttgggatattatcagtaaagaccatccttttgcctgacggttgaagacctgaagcagtagttcaaaattgtgacagctcatgaactttgtgatactttttttggttgctccagagaaattgtgaatttttgttttctagaatatctataatctcagtttagtacttggcaactctagctactccatgtttgttcagtagaagaaagaatactgaatgaacccattctgtacatttttaatacttccctcaagaggctgcttagagaccaaatgaagtaaaaactgaagggacaatgagccccaattattagcagcttgtataaacttgtattaatctcattgctacttggcttaagtattaaaaggcttgacctgggtaggagtttaactcattttgctttatcaagaagattcccaaataagagcttaattcactctaacccattactgggaatgttggaaatgaaacccctggttcattgacttaacactactttgcattgtgtggatctcagaaagtatatatttgaagtgaaatttgagaccagagttatttatgcaaatcttacagaattattatcacagaactgccctaatatatttaatagtatccttttaggcctgtgactcggtgttgtattgtcttttctcaatcgtaaagttcacatgttctgtgcccttttgttgctgagataattttataaaaactttacattcatttttttgtagactaagcattctttttttgccgtaagagtttgagatagttgctaggcacgtggtggtgccccacccctttccaaagcacacaggtggaaaaataaaatctttaccatttggtcctgtttacagtggtggaaggttgtaatagtttccaccccctccccctg

SEQ ID NO: 116097 - DNA, 1065 bp, Homo sapiens
gttctgcttacagaggtgtgagcatagataaggaaagacaagggacaatgagatgcctagactagcaactgtatttagcccttaccggccctaggactgtagactgaggggcccctggcataagcggtactcatgaaggcacatgctattgccaggacagggcactgaagcagcgaaggagtgggaaagaagtgacttgacctctctcagctctcatcctgcagtgccctgccagtgcctcccactggtcacatccaacatgaagccagccacaagggaggcttgtgcaggctgcacagatcagcctttcaagacacagagcagggcagacagtggatgtggatgggcatagtggtttttacaattggagactaacttgcacagtaatcaactgttttacagtgatcacattgtatattttgttaattttagaatgtattattttggagaactttgagaaattttgcaagcatagaaaaacatccatttttcatatttaaaaaacgttcctcagtatttcacatttacttatgcaaaagcttcttgtcttttaggttgtaaactttgttatgaagtctcttaaactttgtacattctccttattttcccaatatattagtgcatatcattgtattgcgataagcctgaaacagagagggccacactgtctttcagattggcagagggtgctttaaaaattcctcttttctagataggggcatagatatttgtgaattattcaaaggtgatcacttgcctttaaatcaagttaatcaaagtggaatttagtttaatgtctttcgtagctcatagcttagggggaagatgctgtgtgtttgagacattcacatagctgcatatatcatctccttgcagacatagctgggaattattttgctgcacacattagtgaaatataccaacttgaaatgtttgtgctaaccgagtgacctgttttctgtgtcatcatgtgtgtaattctcttatgtctgagtaaaaggctgagatgaaggtctgtgtctctggatacccgtggggttgctaggaaatgattttcgaagtgct

SEQ ID NO: 116098 - DNA, 1014 bp, Homo sapiens
aacacatgtagatacctgttgttatgtttaagatcacagagtaatacttctttgttctctaaggctttcaaaaggctttggtgaaaaaaatgaatcgtaacctatcttttctcataagtatacctgaaatgtcaaaccaagaactgtattcaataatagtgaggtatgcgtgcggagtgcaatattttagccaactgcaagacgccattcctatagttgcagaaatgaagatatcagtgtgagaaggtaagtgtaacaagtaatcatgatacgggttagaagagcagaggagaatattaacctaactcaactgaaatggcttacaggcgcagtagtatattttcttatttaaattgctccagtctacctaatttgaactgtatactgtcttagtaccaccacttgtaaacacaatttaaaataagaaacaagaataaaagggggctttaaaactgctaccaaatttgtcactgcactgcctcataagagacagcaagagctagtcttatcaacagtgttttccaggcacctggtccaaaactggacgaagcactgtagggaaggatttcctgggcagcagctgtctttcagaagtcactcttggagaaacacactctatgtggactaatttgttaattttgagagctggataattaagctttaattaacacattttatcaaatgacaaattcctctcttgcctaagtattttctctaactatgtaaacaggtttcaactaagtatataaacaggtacttcagactattatcattttcatcaattcaagaggttgcctttatacatgatcttagatccaatctccaaaatttattaaacattcattttatgattatccacaaagcatgaaattttcaataagtataaagccccataagacaaagtaaatgcttatcaacagttgaaatgaaaggatattggtagaaagaacacactatttcccacccctgccccccacaacaaacactaccagaccacaacgtttattcaggctc

SEQ ID NO: 116099 - DNA, 1133 bp, Homo sapiens
acaatattaacaaaattctgattaaaatattagatattatttgtatgtgacttaccaatactgaaaaatgaaatgaagttctacacccagatccaaaggagtctttaaggcacatatctcacacgcacatgtgttaatgtggtattagacacttctctgcttttcggggtccctataatcagttttaattttctttacagatgtttctatactttgaagatcatggactagtgacgtgctccgctgatcatctcattattttgtggaaaaatggagagcgagaatctggattgcgcagtttaagattatttcaaaaattagaggagaatggtgacttataccttgctgtctagtttaaggaattaaaaatacacatgcatgaaccttgaacatcaaatatcgggtactactctgaaaaccattaatatattgatcacttaaattggtaattttttttgtcagtccataaaattctacatgtttaaattttttgtggacctaccaaccaggaacatgttgcttctcaggtcctagtatatcctccaaagaatataccacaagtttttccatttgactttgagctgctgttgaagtggtgagtgctgtgttttgagcttattttgaacctagatccttgtgaaaggtacaaatagaggtaatagttaagttatggcatttattagaagttttattatttggcttcctttagaattattgtgaagtttaaaaatagcctttctcctgcaaattttcctagtctttagtaactgttagtgttctatatagcacaaacttgaatctctcagccaaaaaagggaacatatatactgtttaagtatggcaagttttctttggtaccaatttgtttagataattttaaaaatgttttttagttctagctactaaaacctgtatgaactcaaatggataggcatcttgtgagggtgtgtttttcccagtgtgaattggcttgaagagccatgggctaaatgggtactagaacaacaactgcccctcatgtacgccaaggatgagctctagatcatttgagaggcacagtgtttccggagtcagggactgcagctgagcgcaactgccccatctgaccactgactcaaatacgaactgcttga

SEQ ID NO: 116100 - DNA, 1001 bp, Homo sapiens
ggtcttaatcaccattatttaggagctggagatagctgacagtaagggcagtgtgaataatgttgactatatgacaacagtaaacagaggatgcatgaagggttgtggttatatgtgtatacagttaaagccttaacagaatcgaattccaggggcctttatcaaattcatgaacagagtcctgtttctcctgcctttgaaggataatagtttgttagctttaatgaaacctatgccttgattttcattgtgcaaatatgaaagttttagttgaaaattatgaaatgcgtaagcttttaacatgtagaaatccagatacattaatatttgctgcaggcatcattgcctgtagtgaaggaataagatcagttgaggtaacagattagctgtgagaactaataacagtgtaatcagggccctaaggaatttcttaaattgttcttccctgtttcatagccaaagaacaaaaaatttcttttcatttgaaagggcattcatgcttaggaggagcagcggcagcatccttgttagtgagcatttcctgtatttcaggcactgtgctaaacactggctgctggagtttacagagagagatgaaaacagtccttgccctcatggatcttacccttgagtggagagaaggggtatagacctaataggctgttaccctaggctgcatttgatggacccaagtaagcagcagtgactcagaagaaacatttcttgctgaatcttgtaaatggttagaggatataggacttgacacttgagctgaaccttgaagtttagtaggatgagtatatagccttgtcatcataagctccttgatgttggggtacagtgtcatagttatctttgctttcctctaacaagtagctcagtttttaactttgtgtttatggttgggaggtgagcatggactgtggtaggcagaagggcaaagatagcatttacgtggtggcaaggagcaccttggctaggccggagcgctgggttcctgt

SEQ ID NO: 116101 - DNA, 1005 bp, Homo sapiens
ttcaaaaaaccagcttctggattcattgatttttttggagagtttttcttgtctctgtctccttcaattcttctctgatcttagttatttcttgtcttcttctagcttttggattagtactttttactttataaactctatgactataaaattatactacagataataaataagccaaaggcgtatttaggaatcaaacatgaccaagtagtctgttaaaatttgaaaatgatctgctgacagtctcatcttgcagtacataggcacgttagccatgatgtggatgtcagtgatcctgaaatgtttatgttgtacagttccctgcttcacttgcaggagctctgctcctttctcctcacccattaccaatgaaagatatggccagttgcttgggattgtacatcacagggcaaatctgttttcagaggggtggccccagggcaaccttagaattgtatgagagaataccaacaagtgtggataatgaataccagatttgctaaaaagattggaatgcccaggcagaaggttttctaagacagacaaaaaataactgataatctctccaggcagaaggctctgggtgctcctttattttattccttttcttgtattatgttgccagcatcttttggtaatcatgaagtactagtacttgtgagggatggatagacagataccaggtgagattttcatactaagtggcttttgacacaggatgaaaatccatccactaataatatataattgaggttgtttgtcatgaaacattttgaatgacctgtttgggaattagtttgccatgtgtaaactgcttaaaaatatgtgctgattggccaggtgcagtgactcacgcctgtaatcccagcactttgggagcttgaggtgggtggatcacctgaggtcaggagtttgagaccagcctggccaacatggcgaaacccgtcactactaaaaatacaaaaattagccaggtgtggtgtcacatgcctgtagtcccagcta

SEQ ID NO: 116102 - DNA, 1070 bp, Homo sapiens
tatttggcagtctctcttacccaaatgaattctaaatttactctgcttgggtttttactacaggttgagcatccctaatctgaaaatccaaaatctgaaatgctccaaaatccaagaccttttaagcactgacgtgatgccacaagtggaaaatcttatacctgacatcatgtgacaggttgcagtcaaaattttgtttaacgcacaaaattaccaaaaatattgtataaaactaccttcaggctatatgtataaggtgtatatgaaaaataaatgaattttgtgtttagacttgggttcagtccccaagatagctcattaggtatatgcacatattccaaaatccaaaaaaaatcagaaacacttctggtcttaagcattttggataagggatacccaacctgtaaaaactaacttccttaattaaatactgaaggtagataattttttaaagcgatagccttaggagctcaggttactgaatattaaatgttctgcttgtgaatagtgaaataagtgaaaaggctgtgagatactactagaattctggtaaatataaggccagaaaacatttcctaattactgggagcattttttgtatgctagcagttttagtgtgttatatacataaaatgtaattctcatgataatctagctccatctaaagcatgacatagaatatagatggtccccaacctagggtggtttgacttacagtttttcaactttatgatggtgtgaaagggaggtgcattaagtagaaactgtactttgaattttgaagtctgatattttctcacactagtgatgcatgggatgatagtctttcccagtgctgggcagcagcagcctggagctgcagctccttcctagtcagctataagatcacaagggtaaacagccttactctacagtgtactgtgttgccagatgacttttttttttgcccaactataggcttatgtaagtgttctgagcacatataagttaggccaggctaagctatgatgtttgatagatgtgttaaatgcattttgacttaggatattttccacttagaatgggtttat

SEQ ID NO: 116103 - DNA, 2004 bp, Homo sapiens
atgccaaagtatgaaaattcaaaaaatacaaaattttaatcttatttaacaaaatttaggttatcactagctatgccctgacttccaaaatgaataaatgaattgtgttgatttttgtgagacacacaagttttctttcaacattgcgtaatagcataatgtaacatttttctcatgtttgacttaatattacaaaagccttttttttttaaataaatacttaaggcttcaccagtttcttcagagcctcccttcctgatcatttgttactcaaattattcttttttgaagtatcttcctctcaccttaattttggattgttatctagtctgactgtgtcagatctttatttttcaatggctttgcctgtgataaaatcagttctttaacattattttcaccacattcacgaagtcctgcaatcttggaaagatttgccatttacattgtatttttgcatgtttactacttggtaaattagtcagagactgatggatgaagacactggatgggtaggaatagatgttggtgttaaataacgatggagtggagactgactttctaagtggttaataaatgagtggatatatatacttatttgtgtgtaggtacatatacagttgttatggtgacttttattttcttctatgaccttataactgtggagacttaaataacaaatacttggacaatgaggactccatatttttttcctgcaaactaagttactgatgtttttatgcttaatttacacaattatatttttaaatttatagaaaaaaatactcaaaattttctataaaaatatactaaaaattagcattttgttttagaaaataaaactatagttatggctgtactttcagtgcttgtttagattctgtgtgattgcttaagttaaattctgaataagtaattttaaatggaatgtatatgtatcttctatatggtagttgtacttaatgtagtcatttatgattatctaaattgtgaaagctaagcctattaacatttttattggtatttcagacaggggaaaaacttttagaactgaatggacacactcaaaagataacagctattattacatttccttccttggaatcttgtgaagagaaaaatcaactcatcttgacagcctctgctgatagaacagttattgtatcctttaatctggaagaaatgaacaagctgtagtggcctaaggagccactacatacactattagtctttagctgatagggtcttgtctgtatattcttgttatagcaaaaatgatttttgttctgttacttataagataccatttattaggtatctgaaaagtattagactggaaataggaggttaaggcttgttattgatggaaactccgtgactattgctgttctttccagagttactctatcaggttgtataaaattgatgaaatgggaaaatgtggacttaaaaataatttattttactatctcagtttgcttttcaatttagggaaacaacgatgagttggactggagaataatttacattttttttccccactatacagcagaagaaaccaaatggtcccaacccataaaaatctttggagcatctgagtctgatagaaaagtgaattactgtttgttcagtgtgtaatatttaataattaaaaacaattttataaaagtaaaattactttttctttacccatacttttaggtaaaaagttaagatgggatagcagtagtaaagtgcttatgtgtaacaggcattgttctaattgttttacatatattaactcatttaatctttaaaattagccctttgacataggtatttttaattcttttttttttttttttttgagacggagtttcactcttattgcccaggctggagtgcaatggcgtgatctttactcactgcaacctctgcctcctgggttcaagcgattctcctgcttcagactcccgagtagctgggattacaggcctgtgccaccacgcccagctaattttgtat

SEQ ID NO: 116104 - DNA, 1075 bp, Homo sapiens
gaaacttctggaacaggtggaagtcctcccgggtagatgtgagctccatcgggaaaagggtgtcacaaaaacaggtgctcagaggcaggggtgccaccgcggcaccccagaaccccgggtcagctcgcgcggacaccgcgtctgggagtcctggcgtggaagggcctcgggggttctcattctctccaagtctctttccacattttattaaagtactgaaaaggcaacaactctgtttttaccatgtcttttttttaagtctaaaataaattattccaaagggtcttaaacgggtacctctgatctttctggtttattaggccaaggacgacctatgaatttcttctctgcatcacagtgtatacatgtgcatgctcccaatgtccagaggtggtgatgcctcagtatttatttctaattaggttgttagccctctccttggctcagtttcatcatttagacccattcttaatgggacaaggaaatttacgttatttacacaaggtgaccaatgaggcagctgacacactttcctttattcatccaaccaacatttgctgagcatctactatatgttgggcactgagggggtgagagatgaacagagagacagatgcttggcttagtagagctcacaatggcctgcattgaatttttccactacagtagactgtggccatcaggatttgtacctgtaggaggcaaagataacccaggaagaagctcagtttgttttggtgggctctcaccctctcttaccttctcagtctgtattttcttctcacccagaaacctgagatctcaaggaagaaagtaatttgaattaactttcttaggtgttaagagttaatgtaatatccttcacggaatgttcccatttttgtaaaaggactgcaaggagaggcacattgcctagataagtgacttttccatatctgcctagtggtggtgggagacttgagacagaaggatttgggggttactgtgatccaaatactggttccctaatcagcctcaccagtgctgatggaaactcttgcatatttttaagaaatgtttttggggggtgtgaaag

SEQ ID NO: 116105 - DNA, 1037 bp, Homo sapiens
ctgatgccaatggtcctacaagcagctcccacaagtctgtaagtggccaagcagcatgagcaccctactatcctgggcaggtgcccggaaacctcggaggtgctacttggcatgaagcaactgctccttgcagggcagggatgtgccacagctgcagccctttgagattctcacagtcccgttttcaatttggagcctagagctgaagagataaattgagaatattgatcagctcatcagctcacaattaagatgttctttttcccccttccgaaacttggtgtatggctgtggtaaagggaggaatggctgtccctcatagcgactgcacacaggctctcaagccacttccaggttaccacaccataatatttttgttgtcattcattcttatctatccacagccatcaaatatcacctcctttcatgaggggatggtgcaaagtgggcagaccttcaagtgagaaagaaacagggataagcggctaggaaagggcgtcccaccaacacttgtagatcggaactgtcaaagaagtccaagtcctctgtctttctgtggagccacaagatctggagaaagggaagtgtgttcatctcaggaaaagattgaggactcaacttgagaaaaagaaaaagggggtagtggtggaataaagaagtaggcagcatcaaatctgttcaggccacatcttggcagaatactatgcctgccctctttgcttccagaatttcaaggccaggtgacatagcatcataaaactttaaaccttattgctgttagaaaataaacatgtgtgtgcacatgcacacacacatacacacacacagacacacaaatactactgtctaagctcacaagcactggcattacctgacccctgtttatctctctacctccacttctgattggtaggacacacaccagccaccttagcctcctgaaaattcataaaataatttttcctatgattcaaggcccttacacatgattttccctttccactcagtgctcttcccctattcttcacatagcaggc

SEQ ID NO: 116106 - DNA, 1017 bp, Homo sapiens
tccagcttcttccccccagcatggggagatgtttaaatgaataacaaacatcgatccacagatgtctacaaaattgggaaggatggtgaaaatactacatcctttgtggttatgtttcctttttgactgctcagtttgctgtaactggtgagcttgcttttagaagttggagctagaagcatcttaaagatgatctaattttgtaacccccagacttggtaaatcatgatactcacccggggggtatttaatacaagtcctattcctgggcccaggcccagatccactgtatcagaatctccagggatgcagccccacaatctgcatttttacaaacctcatggaaggattttggcaattagccaggagtgataagctctctcctgaatagctacatcttcattttacagtttggggaaactaacacattagaggtgacaccagtgcttctcaaagtgtgacccttgcactggcatctttagcaacatctgggaacttgttagaagttagaatttgttagagcttgtgaattctcaggccccactccagacttactgaatcagaaattctgtgttttaattaaacctccaggtgagtatgatgaacactcaagcgtgaggactgttgtgttaaattatcaccccagggtagcagttggtataatagacagctaggtccaaaaggggtcttactcacgatttctttttttgaaaagaacgcagtggcatggtctcggctcactgcaacctctgcctcccaggttcaagtgattctcctgcctcggcctcggcctcggcctcctgagtagatgggattacaggtgcacgccaccacgccctgctaatttttgtatttttagcagagatggggtttcaccatgttggccaggctgatctcaaacccctggccttggcctcccaaaatgctgggattacaggcatgagccaccgcacccagcccttcctcatgatttaatcacatccctcattttatggaagagagatggagatccaaaaa

SEQ ID NO: 116107 - DNA, 1018 bp, Homo sapiens
gtatcctcagtacctggcatcctgaagacgtatagtaaacttattgaatgaattggggtagtgtatgggagagcctgagctttggccctgtgtaagttggagtcctgttttgatagactgaggattcttgatctgtaataatagatagaattttaatgaatagaagttatttttggatggcattgtctaaagttttttttggtggctaaaacttagaaaatatttctttttacaaacacatattgtgacttgtcatggatttgacctagtcatttcatcttgtttaattcctgtaacgattctgaagggaattccataggaaaggaaataggaaaaagccactaagaaatattcctgtcactgatttttcacatatattcagattaaccagatacacaaaaataatttaatggcagtggttaaatgtgtaggtatagtatgattagctctgaagtaaaataatgatgttatgtttgaaattttcaacctgtgccttattagtaaaagaggtttaagttcaacaatagatttccacctgagaaaatagatgtgaataaagaacttctttgtatgttataattgagatttttgttttcaatatgagctctgacaaagctatttgggaaaggaagaaggtactgggacttaaagtttctattaaaatatagtattattaccgttaatctccttagtaaaaagctcagattgtctacctatttctttaaaggtatttgaccaaacattgtttttttggaaataaatgtttagatgagctctatgtttctttctgagaatagtttaaggaaataaagcttcctgctactctaagaaaaagccctatttgaagtccaatatgtggcattaacttatttactcttatcaattgggtttccctgtcattgatttgattttttttctttcatgatttgatgtgttatagtccagttttgaatgatggactttacgtccagaaatatcctctagaatacatatttctgtgtttaattctgtagtgtct

SEQ ID NO: 116108 - DNA, 1099 bp, Homo sapiens
ttcatacagttttgtctattgcttttctgtttttaattttgttgatttctgctcttatatattatttccttctgcttgttttaggtttattttgctcttctttttctaggttctcgaaacaagaacttatttaaattaaattaaaacaagattattaatttcagacctttccttttgattaatgtaagcatttagtgctgtaaatttcccaacagacactgctttagctgcatcccacaaaatttgacatgttatattttcatttccatttatctgtgtctttatttgagacttttttttggcccatgggctacttaaagtatgttgtttaatttctaagtagggattttccttctttctgttatgatttctaattttacttcattatagtcagataatgtattatgtaggatttcagttcttttaaatttgttggggtttttgttattgttggggttttttgatccagaatgtggcttacttcagtaaatatttcatgggcacttgaaaagtatttgtattctccttacttattagaacattgtattctcatttctgaggtagagtgttctacaaaagtcagttacaccttgtgcgttggtgttgttcagttcttttatacctttactgattttcatctaatatttctatcagttgctgagagtggggtattgaaatccccagcttatgtatatggatttgtctgtttttcctttcagtgctatcagtttttgttttacatatttttaaactctgttgtttaatgcatgcacatctaagatcactgtattttcttggtagattgataattttatgataatgtaacatccctctttgtctgtaataattattttgctttgaagtttactttatctggtattagtttagccactcctgatttattggctttttagaggcaaggtctcactcttttgcctaggctggagtacattgtcacgatcatagctcattgtaacctcccagctcctgggctcaagtaatcctcctgcctcagcctcttgagtagctagaactagaggcatgtgccaccacactcacctaatttttattttttgtaaacagagtttcactgtgttgc

SEQ ID NO: 116109 - DNA, 1056 bp, Homo sapiens
acaaggtcgggagattgagaccatcctggctaacatggtgaaaccccatctctactaaaaatacaaaatattagccgggcgtggtgacgggtgcctgtagtctcagctactcgggaggctgaggcaggagaatggcatgaacccgggaggcagagcttgcagtgagccaagatctcgccactgcactccagcctgggagacagagcgagactgtctcaaagaaaaaaaagaatttcatgctttgatagattgcacttacgttaggcaggtataggacttaagagcatgaggatcatgcttatatttatgactaaactatttttcttctgttccttcctccccccatctagtatatctactttggtattttaaatataatatgttttatatttacacagtttctttcttatggtctggagagaaagctaattttctaaaacatttttggcttttttataggttggtcaaagaaaaagtgatgtatgaaaaagaggcaaaacaacaagaagaaaagattgaaaaaatgagagctgaagacggtgaaaattatgacattaaaaagcaggtaaaattatatcataaataacaatagctaacatttacagaatgccatattaactaatgtagtttttacagtagtcctctgactgagattatattattatttacttctttactattaaaacttccatttaaagataaggaaactcaaacacaggttaaataactgcgcaaatcacatagttgttaagtgacacagctgaggttttgttttgttttgttttgtttgaaacagggcctcactctgtcatccaggctggagtgcagtggtgtgatcatggctcattgcagccttgacctcttggctcaagcaattctcccacctcaactctctaaagtgctgggattacaggcatgagccaccacacctggcatagctaagatttgaacacaggcattctggctctagtatctgtactcttaaccgctaaattctactgtcttttccaattttaagtatcagatataaaaatggactaatcttatattaattat

SEQ ID NO: 116110 - DNA, 1053 bp, Homo sapiens
cttggttcatagtaagtggtcagtttgttgttagctgcttttatcatcatatttaatttttatttatgtcaagtgattcaagcttttgcctaaattcattacatatgatatttcatgatataccaatatcataactgtctgtcgaacttcaccaaatggcaaaaaagttttaggagagcagatttgttgatgcccattggaaatgctaaaacctcagatgtcattcatccaacctaacttctttcatcagtgttatcaatctttagcttaatttcattagtagtatcattttttgatcagcttcctgaaatacactaacttagattttattcatttctgaaatattgatgtcttcattaacttctattttcattgactcttttaaaaacattgtggagaggcataattaaaaagagattgtaaaatagagataatactacttaaataggatcaaaagtattaaatgcaatacagtacctaaaggtctgttcatataaggccctcaatttaagtttgttcttttccataatccctcacacaacacaaatcttaaatatactgttcgtttattcagagacaggagagtttgttatcagctatatcagtagaggagaactgtatataacagggaaaaggaaattatactagaggctccaaacagggggatttaatacctgtttgaaggaattaatgacacaggtgttggtataatttttataaaatgccaaactttcattagttgatcaggagtcatcttacccactttttacagcatgttttttcttaaactaaatgttattaactgcttattgtgttctaggcactgtgggaactagcctgcccaaagaagactttttataaatccaggttaaatggattctctttttcaccaattgcttcatattacaaccataaccatttgttgcatgtgtgcttttgtgggtgtgcatgtgtgtgtgtcagggggatgaggttcctggagtttctaattattttcatttttataattgagagaaaaaacatgacttctttattatatcattaatatcttct

SEQ ID NO: 116111 - DNA, 1025 bp, Homo sapiens
cattcctttttcctctataaaagaaagcagttgttaccacatttgaatggcagtttggttatatttacatgatcaattaaaggacagattttcccctcatacataatacaagttagagtcagctggctgtaattacagctcctgtgtctttgtttaatcccaaatgttacagttattacttggggtttttaggttgaccagaaaaaggaatgtttgtcacagatgtatgtttatgtataatcatgatagtctatccacagtcagggtcctgaaagattctaccaagtaattcatcagaaatagttcaggaagactgcagaacaacagcttgcaaaaagttgtgatgctcttcaaatgccataaaagacataatttatatatttttttctgtttttgtgagataaagttagagatttttcgtgtttttacatgctaaaacaatactattctcctgtttaagcctccagttgtgaaaatgcaacattttaaaataatgtttactggcaaattcaggaagtcaggctgtaaaatgaccattttactttgagtaaacaggtgaagaatgaaagggtaaaatatttgatacagaatagactttttttaaactacaggctataaataaggtgacttagacaagaaagatttggagggcttcagagtctttcctagctgttaaaattgtgtcaagtacagctctatgccaagtactattaccaaattttatttaaaagtaattaagcagttaaggacttataacgtagttttttaaactccaaattttgatgtggtaaagtacaaattaaatatacattgaaaatggaccctttaacatataccaaatcagtgtatacgtataccatcagataggattattgtgtgaaaattatttgtaactcttaagtttttctgaatgaaaattattaataatgattattttgtcattcttttgtacaaaaggacttaagacatcaatatcagtaatatgaaaataggaatcttcatacatgcttcttggaccattttga

SEQ ID NO: 116112 - DNA, 1315 bp, Homo sapiens
atacagtattagagtagttgaatgtgtgtcgagtctaattcttttttccattttccagagagctgcttttccattaactttgggaaaacacagtggcagattcatttaaaataatctcagctccacccttcatataagtgacttagcctgtgcaataagaaattaagatcaagggacattttttcattagcctgtcgttttgttatttgcattccaaagacggcattacgaaacacaactgtatctgcaatataactcatctcaaggagccttaagacacttatggtagcatatgctaactattacaagatgcctgatggaaggatattaaaattactggtaattgacataaaatatgacaaagtgttttaggctttctgagcaaagcaacacacattacggaggaacggccccataatgtaactgattaatgaaggattgctgaggcatacgcggctgatgttatgaaaaatgaattctttgttgtcgtgccgacaacccagcaactgcagtcggaaaagactattagcgagaatcattatcaatagcgatattttcaaactctattatagcaatcaggctagaatttattcaatagatttacttcatttggtggtaattgataaataatcaaaatttatcaatgtgcttgcacacatttcactaacaatcaagcaaaagtggtccatttaccacctgacttggtccaaattaggattaaattgatgatcaattaatcttagaaggggcagtgttgtattttgtggaggagcagcagcaaaagtggcaaataaatggagtaaagacaggagattagtagaatgagcagaaatgagctgaaccgctacggttcgcagctaatgagcatgcagctggattgcaaatggctggatttatagtgttggtataaaaataaaactggctgtagtttagagctgtcacatgcatagacagaaattggagtatattctacatcatccgtctacaaataaaaaagccgtctcaggtaatacctctcattgggctaactgtataatattggcaggtagcttatggaagaaagaaaaggttgtgagctgagaggtatttttgaaagagcaggacagtcttttaatagttgatttattactgtgatgatgttacgaatttatataaacatttcttagagtaaatcagaatagtgtatttcctaattcatggtataattaggacttaaatcttaacacaaaaatcctagaaatgtacactctagtgtacacgtttcctgaagtgtatcagggcaaaaggcaaacagtaatgttgttacaggaagtgc

SEQ ID NO: 116113 - DNA, 1063 bp, Homo sapiens
aagaactctgtcttgtaaattaggcaatctggatttcagttgtagctctgatactaaatctctaaaacttaaagtggctcctccagcactattcttttttttttttttttttttttcctgagacagagtctcactgtgtctcccaggttggagtgctgtggcgtgatcttggctgactgcaacctccgcctcctgggttcaagcgattcttgtgcctcagcctcccaagtatctgggactcagcactatccattttgatacaaagtttgctttaatttttaaaaaatcatgagacttaataacttcaagagggatacattgttagaaattagtaactcaaagttcaaatgacagcagatcatttgaatttaaaaccttaaaaatattcaacatctgggctaacaattcttgaaataccataacctgggcatataagatggtccaacaagaatctcttcttacatcttgaatctttagaacttagttatagaaatattgcttggtatttaactattaaataacactatatagactatattttgcttatgaaacactgagtttgcagcccaggatgaaatactaatgaacataattttaatccttgcacttaaactgaaaaatgttatcattcagcttctcctttagtgaatgagtgaatattttactctcttcaaactggaagctggggaagtgaagaagaattctttccctacagatgaaaatgaattcagagaatattaaatgagttttcattttatttgacactggaatggatactacaaataataacctcataaatacatccaatagtatttttttaatagaggttttcagtttggggtgtttaaggttttcattactctctgaagcatgtgttaagtaattgttttattgttcaactatttttctccttaaagctcaaaagaatatgattttcctgcatgtaatgaagaaatctgttttacacagtgatggcatgttctgatactgaaatagaattcaacgaacagtggcctccattccagaccatttataattctgcaacagtgctgggtgcacattt

SEQ ID NO: 116114 - DNA, 1793 bp, Homo sapiens
ttaggaatatattaaagtatcatccaagcaactgaaaataatatttaatctcaggataaagtaaactcaacacttgataactcataataaacacaaaatatcttaaagagagaatgggtcctagtcttatattactacactattaactgatatgttgtattaccattttcacaaagagaatgtattaactaacatgaaggaagattggtcaatagtggaatgacagaataaggaaaatcacagcgtaaatgtttgctttgcccatctaagtgctgtccaggggacaggaattctgagtgtactttttgttatttgtgagatcatcctgtctccttcatgtaaatttgtagttactgaatgttactttttagcaaaggaactttttttcttccaaaagcaatcttacgcagattgcaagcttataaaacagttaacaaaaacaaagtgcctctgagacaccttcttgaaatgcttatgctctaggaaagaccaaaatctactttagttatgaagcattccatttatctaattctctttttttctggttccatgctcacaagtcaactttctagtgaggctgtggtattttatataggtctgcctatcacaggagaatgggctagcctaatggagaacacttttccagtgatggtattatgcttctctctctcctttttttttagatggaatctcactctgccacctaggctagagtgcagtggcatgatcttggctcactgcaacctcttcctcccaggttcaagcgattctcctgccttagcctcccgaatagctaggcttacaggcgtgcaccaccatgcccagctaatttttatgtttttagtagagatgaggtttcaccatgttgaccaggctggtcttgaactccggacctcaggtgatccactcgcctcggcctcccaaagtgctgggattacagtcatgagccataatttttaaattgtatttaaaaatacaattctcattgcatttttaaaaattggcattcgactataatatatcagcctcattaatcaatgttattctgcccttaagtcatgagtccacttatggcgggcccacagattgtgagcctgagaactagaaacttggctacaattaactgaccaaggaagggaaggcttttcaatgaggcccttcagtagactacctcctcatctctcttttatgagacatagagacctactatgtcaggttatgttccaacctgacgtagtctttagttccatgagtgttaattttttcttatttgaatccctattaaaatttgctttgtaaaaataaataaataaaaaataaaatttgctttgtttttaagcagagaatttgaacatcatttgacttttttttaacacacaagtttattgctgtcctatattaaccctctccccacctcctgcttagggattatcaagttgttgaggtttatgtactctacatgaaatgatccttgactgccatggtttacatggttctttcctttccctagtcagattttttatgattgttccttttatcagcttgctgtttataatactggtttctcctttcctcagctactggcttaaaatacaagaaaccaaatttatagaatcatacctaaagaaagaataactgttctgaataaggacatgaagatctctcctgtaaatcatatgtataagctttagtgtaaattttgacctctattttagctcttctgaggccctttctgggggcctctttttcttaagaattctgtttcatttaggtagaggtgcctgctaccttta

SEQ ID NO: 116115 - DNA, 1053 bp, Homo sapiens
aggttttttaatgtccttattagaagtttggaattccataagcattgtttctgtttgattatttttggaaagcaagggaattccagggacaatttgaaggttgcattgtagaagaaaagagagcagttgtttcctagtcgtttcatgatttttttccagctagattttttttttttttttttttgagacggagtctcgctctgtcactcaggctggagtgcaatggtgcgatctcggctcactgcaacctctgcctcctgggttcacgccattcttctgcctcagcctcctgagtagctgggactgcaggcaaccaccaccacgcccagctaatgttttttatatttttattagagacggggtttcactgtgttagccaggatggtctcgatctcctaacctcgtgatctgcccacctcagcctcccaaagtgctgggattacaggcgtgagccaccgcacccggcctccagctagattttttaacttagaaccaacttgatctctgatagactatgtctagttaagtgctacatagtaaggggttacccagtcattgtttacttaaggtgaatgaatttctgcataggggatttcttttaaatagaggcagttttgttttattgcaaaatttgttttattttgttttgtttttaatgcaaatttatgaatagagcacataaagctggccttgtcatatttgccaacaccatttcgcatgtaggtaaagcatgtatgaaagaataaacagtaagcatatgagtgaatgaaggacaaattaagccaaataaacttgaatgctcttagttgtattgaatttttaatagagtagaattataaaattaatatttgatagaaacgaatatctaattttcactaaaatgattaatcctattttaggaaaattaaagtcaagttaattataaatatggactaaaattagcagttgaatcacagcaaagataatgacaggattatattgaattgggggtcatgtttgacatggtgccataggtgttatgttaaatacagttttatttaaatcatattaatt

SEQ ID NO: 116116 - DNA, 1035 bp, Homo sapiens
gttgagacaggcataaacattgacaaacagttaaatagtgatagattatattggctttccagagagcttaagccttcatgcctctgctcatccaagaggtagaggtaatatccttaaggctgagatatatggggttttcttgttggtaaggtaaatgaaatgttcaaaggctttactactgcaccagagcagataataaggcaattagaactgttaaattgatgaaacaccagagtgggatgaattatattatgaattacaaagaaataagagattttacagcaacttttgagaccaaagaggaaagatgtatcagtaaagtgaagagaaattgatagttaaagtgctggatttattgacctgaaaaagccaacttttaaacattttagggacagtttcagaatatatcagctttgtaaataagtggaaaaaattatcagtttctgctgatagtttaatttcctctattaataagatgaatttaaaatgtatttcttcctttccattttttgagctgcagcatacccgagggatcatctagtcaaacctcctcattttataaaacgatgaacctgagacagggaaattaagcagcttattcagtattacattacaaagtagttgagttggaactagaacccagattacgtgacatgtcattggcttaactttatttgaccttagagtgtcgataagtaacttcttatataagttaatttatggaatactgtactttctttagaattcccaccacataaaataatcacactgctaacacttaaataatgcactgtttgccaaagttagctggaaaacaatcactagagagaggcaagcctttcgtttcagtaaggagtgcgctgcctgtttttttgttttgtttttttaaacaaaagctttggttcataatttcagtctaagatccacaaacattatcacattatcatccacacttagaaaacagacttctggaatactcttgagtaccatgagacttaatatttattatgtcctaaacttttcaggtgtcactgt

SEQ ID NO: 116117 - DNA, 1011 bp, Homo sapiens
tttttaatcttgtgtttattattaccttttaaaatataattttatttgtgtattgctaaaacgtgtcatttacttttggttattttttactttataagaagggcattttctgggacttaccatttttcacctatgttgataggattcagccctaaatttttactcttaggtgcagtacatttttttgatggttgtgtaatactccattgtttgataataccgcaatttatccattcctcttattgatgagcatttggattgtttcacttattaactgtgtttctatgtacattcttgttcatgtctctgttaattatgtctgagggtttttcttgggtatatacccaggaatgaaatcgtttggtcataagtatgtgagtattcatcttgtaagatgcgtatcttagttcaagctgccctaacaacataccatagactgggtggcttataaatgatagaatttatttctcaaagttctggaggctggaagtctgagatttagggtgctagcatggtcacattctggtgagggctctctttgggttgaggactgctgtcttctcattgtatcctcgagtggtgggaagagatctggagagctctctgaggtctcttttacaagggcactaatctcattcatgagggctccaccctcttgatttcattaccttccaaagaccccatctcctaatagcgttacattgaacgttaagatatatgaattggggcattggggttgggaggaagggatgggcacacaaacatttagtcgcttgcaatgccagacttccaaagggattgtacccttttatgttcccagctgcattatgtgggaattcctttcattgacccacatcctctccaatacttgatagacttcttaattttactccattatactgtctttgtttagttttcattttggaaaaaaattgttttgcttgtctttttatttatttatttattttatttatttattttttttgagacggagtcttgctctgtcgccca

SEQ ID NO: 116118 - DNA, 1035 bp, Homo sapiens
gagcagccatgagatacatgggggaagagtcattcagacagaagaaacagcaaattcaaagacttgaaaaagggagtaagattggcgtgtttgaggagcagcaaccaagtgaaagagaggaaaagggggtaggagattcagaaaagtaggagggagagggtacagatcttagaaggacttcatgtaaggacttgggcttcaggtgtcaccatctctatgagagtttcctggctatgtccaatgttagtgcccccttttctgtgttcccagagaactttgtagttttcactatgatagtactaaaaatgcattaagctatttgttctgtttactaggctgatagcttccaaagtatggtctaggaaccccttggggtccctaacacccattcaggggttctgcaaagtagaaattagttttatagtaactaagacatttgcctttttcactttcacttgctcacaattgtacagtggagtttttcaggggctatgtgatgtttgatactgcaacagattgaatgtagaagcagatacgagaatccagctgcttctcttccagacataaagatttgcaaaaatgtaaaatagtgccgtttttctattttttgttttgttttggaaagtaagattatttttcgcaaaataggttatttttgctaacattgtacattgattttgttatttttaagtaaattaacaaatatatttaaaatttttctaactaaatatttaaaaaatttattttaatttctaatacagtaaatattaatagagataattcacataaacaaagctccttgggtagagtccagattcagatcacatcaagcaagatgttttcttgtttgggatggagaatttatattgggatggctagcaatgacttttgggttgtgtggaaaaaggagacagttttgagttgtttttggttaattctaacagaagataagaaagcactgtaatactctatattattggtgaataaagtgtttcacatacatattttaccattggttgagatttaatccttcaa

SEQ ID NO: 116119 - DNA, 1054 bp, Homo sapiens
caggaccaaagggatggtgtctgatatatcattgcttttcacagaattgtttttcaacaaatagacacttaatagatatttgtcaattgagctaaggactggaggaaaccagaaaagggtttatgagggggaacacatcaagagactggaaataaaagtttgctttataaataaaagtgagagccgggcgcggtggctcacgcctgtaatcccagcactttgggaggccgaggcgggcggatcacgaggtcaggagatcgagaccacggtgaaaccccgtctctactaaaaatacaaaaaattagccgggcgcagtggcgggcgcctgtggtcccagctactcgggaggctgaggcaggagaatggcgtgaacccggaaggcggagcttgcagtgagcggagatcgcgccacagcactcccgcctgggcgacagaacgagactccgtctcaaaaaaaaaaaaaaataaataaataaataaataaaagtgagagacttagaaatggagaaaaaagagaaacaaccgctgttaagtaataaccaccctcaaatagacatttttcaggatagtatttttattttattagagatataaaagatatgaaaatatatcaaggatttgtttaaaagcaacaattttacattttttaaactaggaagagactagtctattgtggaaaatttaaaaattattacagttctgtcaaaaagtttttgtagtttacctagaattaactagaatagattcttaaattctagtttaatagaggggtctgtgtttgtgtgtttaactgcctgctaagttacatagactaatccactccaggttattattattattattattttgcaacttaagaaaaatagtagggacataggtatgtcgaaatctcatggggagtaggtggtatttcagggaaacaaaagagcaaaggtttggtcccagtgcttaaggaatttgtacattgttaagttatgcagtatacatgtatatgaggatttattcctagaacttcaagtatgaatgtacgaatgtatgtttttattctcatttt

SEQ ID NO: 116120 - DNA, 1993 bp, Homo sapiens
agttcctttaggaatttgtgtaatgtattcagttctccaaagtggtggtcagaggccatgtcaaaatggattgcaggtggtcagctcttcaccacattctgttaactacttggcaagtagttactcttaggagcaatatagcaggcaaccagatgtctcttcaagctggagagggagaaggctaaggccactcatcatcacagttttcccaacacaaggtattttattctccaggttgaatgtggagatgaaagatctttggccctgtatgtgtatgggtgttttgttttttcattgcatttttttgtttggttggaaattttgaaaatctgtagtaagcaaggttggaaaattttattaataatggcagtctaaaactcttaagacagtaaatgcttagatgtgtgatgtctattccagtattctacttccagtaatacctttataaaagaatataataatgttctattgtgatgctgttgtgtccaaatagaactgatttttttcttaataacttgtcataggtctaactaaagatcactcatttagcagcctcactcagaacctacatcttactgtctttgaatcatctggtatggtgttggcacattatactcagtaaaagtctttgcaatacacagatgaaggaatgaaatcttcctttataaggattttgaacctgatcggataagcagtagagagccactgaatcaattactatattacagcataatagttactatattcttgcaatatagtaattgcagaatagttatttattcttgcagtgagagttaaatagatgggctcccaggctccacttactacacgttattacatatgtgaccctgggaaagttacttagcctttaaaagccccagttttcttagccggaacatggggttaatgaaagtacctgttttttttgtattgttaggataattaaataaggtaatcatgtaaagcacttagcccaaatgcctgatatgtagtaaatgttcaataaatgctaactgctctcattattatcattaacacctatcttcgttcatttgtgctgctataaaaaaatacctgagactgggcaatttataaataagagaaatttatttcttatagttccagaggctgggaagtccaagatgaagaggccagcaagtatctggtgagggcctggtctcttgcttccaggatggtgcgctgaacactgtgtcttcacatggcagaagagcattaaagggcccaaggctgtgtgaagcctcttttataagggccttaatcccattcacaagggaggagacctcattacctaatcacctaaaggccccatctcttaatactgtagcattggaaataaagtttcagtgtgaattttggagggatacgaacattcaaaccatagcagcagcatctttattacttttctgtagattatcaacagtgtggatgaggacttaaggatgaatggttactgatccccaggagagaccctggaacttggctttgatttaaattgtgataaaagcttgtgttttagttgcttgttctgttcactgattgtctgtggagggagaaaggaagagtatgaaccttgtgttcttgagtaatttctaagactttgtaatgatcatctttttgtgaccattgctgaagcagtgattccctacccccaagccccagcaaaaaatgtggcaaggccagttttgcttttttattggactatcattaagtttattgtggggaagagtagacaagtgagttttggagaaccctaatttcaaaatctataaatgattcacacaatgattacaagacattcttacaattctagtgctagattatagttatatccaaatccttcttactgttttttaactgagttctctgttgttgttgagatcctttcacttccacaagtaagttacggagttctgtgtgtgtgtgtgcttgtgtgtattctaactcggtttgtttgtctatatagtatgttgga

SEQ ID NO: 116121 - DNA, 1049 bp, Homo sapiens
actgaggggtttcccaggatgtggaacacttcactgctaaaactgggaaagtcccaggcaaactggaatgattggtcacctcttctgtaactagctaacatagctctgttttatgtgttctgtgatttatttggaggctatttacagatagtacaactgtgagttgtatgttgtaccttaatttaaaacttaagtgcatggtgtaaatatgaatccttgacagagtagcttttgttctgtatttaaattattaatgatttagaaaataattttcactaaagtaggagaaaatgcagaattgatattttctaaatgtggtatttcagctaagtgacttatctgcaccaaaaaagtttccaagtgggatttgtgttcataaaaaagtttgttttttattagacttgtgataaattcaagaaattcttctgcaagtaaaaaacactcacaatcatttaacataaaaggttatttaactttaaagccagctttcaataaagcctgttaaactagttcactggtgagtgaatgaattgattaaaaatactttcttaaatatatctttttataaccattttggattggtaatggcttaaaatccaatgtgaacaaagaatgttagggcattggaaatagcactgacattggcccatagttttcctctgattaaatgaaagtgacaccagtagattagaatgagactaggacaattcacactgcaattttgttagtttaactttaacagtcttttaacactcttgtttaaatgtagctgacataccataattacaaatctacaagccttgattatagaattttacatcatgagcctgtggggaaattgtattgatttttttttttttaataaagcaagcattgttcccaaactgtggcatcttccgaagtttgtttatatctacatcctatatacaactgtgtatggtgtatatgctatgtatagcaggcatgaagacaacataaaaggtatgtaaaatctccactattagttcaatatatattatactgatataaaaagtgaagaatgcaaatga

SEQ ID NO: 116122 - DNA, 1443 bp, Homo sapiens
ctcaaattgcttataaattaatggaagtgtctcccatacattttaaaatgacttttctgttgacattttggggtatagcttcccacttatgtattaaaatgcaattaaagaaaaacccctaaactttctgttttagctgcttgttactcacattttgccttggtatatcaccatctaactccataaatattgtcccctattgtctcttgttatttttcacctgaaaattattttgctatgactctttccatcttctaccttagtatcctatttttattttattattatttatttttattttactttaagttctgggatacatgtgctgaacgtgcagttttgttatataggtacacatgtgccatggtgatatgctgcacctgtcgacccgtcatctaggttttaaaccctgcaacctatttttaaaaatctatattttacctcagcaaagtaaaaaatagatgaggcagcaatggtaacatattactaattgttggggctgaatgatcatggggcttcattatatttttctgtacataagttgaacatttttcatgataaaaagggtctaaaagatatgcttttttcctcctctctccaaatttagtttcaaagataccttaattcatgattcagacatgttcttgcttttgtgaaagggattctattcttttctttttttttttttaatcaatggtttaaaaacctatcctcgacactattttaaatctgttcttgacactctttttctggttagacgttcattttccatagcctcatttatcttcggaagtcacaacctttatttggaagaagaggtttaaagtcattattcatgccccaaatccttcaattttctctctagaaattgagagcaactagaaattatattctaggtatttgtcctagagttcagtttgggtaggctatactagaaagggtggattaatttagtttctgattagacctggtggaacacttcaggtgactcagaagttcctgatagtgggtctgaggaagaaatgtggacaggcaggttgaatgttaggggaatatggaaacaggcaataagtagatgatggtatttggcgtgtaggagatccagccatgcgtgcaagacggccatttcagcatgttggcaaaatggcagagttgacctaatggatagcagcccacattataaagtagaaacaagtttcagggccagtatttttaggccctgggaaaataggccggaggtttacggtgagtgtcttgttcctagagaaactttgttaccttgtacagtaaatggcaaagcatctgatttctgggaagtgagtttcaagagagagaggttagattactaggaataaagaaagagtctagatactaggaatggcttagaaggtgagagttggacagaatgaggctgaattggtgctaagcctctgactctgaggg

SEQ ID NO: 116123 - DNA, 1009 bp, Homo sapiens
gttcctgagttccaaagggaggaatgtgtaatgagacatgtctgaccccctcttcccatcatggcctgaattactttagaatgcccttagttgagaggaggggtccattcagacggttttggagcttagaattttgtttttagtttgcattcctgagtgctggtagacccttcagtgttcattagaactttattgttcagacccaagaagagcaaactttttgatgaagtattacaagagaaaagataaacagccttctgaagaagcaagttattttgttgtagcaatgtctactaaagaaaccaactggcttcttcctgttcgcccacctttcctttgtttattgatatttccaccagaggaaggaccaggcaaaagggagaataaattcactttttaagataatgcttctgagttttagcacagcatcccacttcccgggaagctttattgccaaggcaataaggagaccatgtgagtaggagttaaatgcacagccatttgtgaagtgagactgcttgggttcagatcttgattctgccctttattctatgttgtggaatatattacattgtgctgtgcctcttttaccttatttgtaaaatagagcaagcacccaactcaagcagttgttgcaagaactgcctgctatgctgtttaatacagtatgtggcaaatagcaagtgggtagtaaatgttaataatactgtttggattctcattttacatatgagaaactgaggtttaatgaagttaaaaaaagaaaaaaaaaacttgtctaaagtcacactactagttagtggcaatgcaaggaaaaggaccaaggtttcaaatctacaactttctcctttaagctacagtgctcccgtaaagagtatttttaaaattggtaataggaagggaattgagatgtatatttgaaaatataaataatccatcctgtccctcagctcagagttctttttaccagacttttaccagactggttcacttttaccagacttgcttg

SEQ ID NO: 116124 - DNA, 2109 bp, Homo sapiens
aatattatttattttttgagacagggtctcactctgttgcccaagctacagtgcagtggggtaatctcagctcactgcggcctccacctcctgggctcaagtgatcctcccacctcagcctcctgagtagctgtgactatacgcgtgtaccaccatgcccagctaatttttgtacttttttatagagaaggggttttgccatgttgcccaggctggtctcaaactcctggactcaagccatctgactgctgagattacaggcatgagccactgcactgggccagaaaaatatttaatattaacttctaccccataccatacacaaacatgaattctggatggaatgtagatctttttatgtgtgtgtgtgtgcacttttattcaactggtctcaagtcagtgcacaggtaagccctggctgccttcacccactcccagggacaccaaaagccttcatacatctcaagctgggggacaaaaaagggggggggggcacgaaggctcatcattcaaaataaaaaaaataagaaagtattaaggcgaagattaaaaaaattttgcattccataatttacacgaaagcaatgctatcacctcccctgtgtggactcggtagacgactgggccattctccttagacagaagtggggtggcttttaggatggcaagggacttcctgtaacaatgcatcccatgatatttggaatgactattaaaaaaaagaacaatgtacaatcaaagtcctcggccacactgtagaactttgggggatgctcgctccaaccgactgctgtcaccttcactgttccagtttttaaatcctgagtcaagccaaaaaaaaccaaaaaaacaaaacaaaacaaaaaaacaaataaagccatgccaatcttatcttgtttcctgcacaagttaggttttgtcaagaaaaggtgtaacacaactaagtcacagtccgcctagaagcatttgcggtgaacgatggagggccagactcctcatactcctgcttgctgatccacatctgctggaaggtggacagcgaggccaggatggagcctccaatccacacagagtacttgcgctcaggaggagcaatgatcttgatcttcgtcctgctgggcgccagggcggtaatctccttctgcatcctgtcagcaatgccagggtacatagtggtgccaccagacagcactgtgctggtgtacaggtctttgcggatgtccaagtcacacttcatgatggagttgaaggtagtttcgtggatgccacaggactccatgcccaggaaggaaggctggaagagcgcctcggggcagcagaaccactcgttgccaatggtgatgacctggctgttgggcagctggtagctcttctccagggaggagctggaagccgcggtagccatctcctgctcgaagtccaggacgaggtagcacagcttctccttgatgttacgcatgatttcccgctccgcgtggtgatgaagctgtagcggcgctcggtgaggatcttcatgaggtagtcaggtcccggccagccaggtccagaagcaggatggcgttggggagggcatacccctcgtagatgggcacagtgtgggtgaccccatcactggagtccaacacgatgccagtggtacggccagaggcgtacagggacagcatagtctggatggccaagtacatggctggggtgttgaaggtctcaaatatgatctgggtcatcttcttgcagttggccctggggttcaggggggcctcaaacagcagcatgggttgctcctcgggagccacgcgcagctcattgtagaaggtgtggtgccagatcttctccatgtcgtcccagttggtgacaatgccgtgctcaatggggtacttcagggtgaggatgcctctcttgctctgggcctcgtcgcccacataggaatccttctgacccatgcccaccatcacgccctggtgcctggggtgcccaacgatggaggggaagactgcccgggcggcattgtcgcccgtgaagctggccttgcacatgccggagccgttgtcaatgacgagcgcggtgatatcatcatccatggtgagctggtggcaggtgtggactggcagt

SEQ ID NO: 116125 - DNA, 1039 bp, Homo sapiens
aagtttagtatgtaaatatctgacccacgctgactttataatcaatgtttctgacatcccaaagctagctatttattacttatgaattagtactctttccataactattttttgcatgtatgttgaagcatagcctgtgcaggagttaaatgatgaataaatctggggtagtggtttttgccttccgagggccaaaacaaaccaattttgatcatgctgtgttccaattaaatatatcctttctgaactgtgaaatgagaatgtcagaacatctgatcttctagtcttccgctttaaaacattgcttccaccatttgtgtccactagaacatagagacctagttaataaaggcagtagcttttacaccagctagcagattatgttgctaggatgatttgcttagtgtgtttccattgcagcgtaagcagatgcctcttttctttcatacccctattctttatagtactgagacttttgtggcaataggatttcaaaaatatgtccaagatactaattctaatttctgtcaacatactgacaccaaaattgacatttgtctctgccaactttatattaattgtaacattaactctaagttttttaatagaaaagagacaaaatgtgccttggggctgtgccaccctgaaattcaaacaacagtgcttttgtgttcctattcaggcataatctccttctctatggtcccaaggcacaagtgttaagtaaataaagggactaataagactattgtttacataattataaccctgtcagaaatagggacctctgttgaaatatttgttgagtgaattacacacgtgatgaccgaatctgtgggaaaagttgcataaatgaatgggaaaatagagccacctcatatcctttggtgacgtggttttacaggaatatagaaacagcattctcctatgaagcagaagagcctgaaaaatttagacaaaagaaatgcataaacctgtgaggagccttagaaaagagagatcattttagggctggtgatctttatgtttctcaaagatg

SEQ ID NO: 116126 - DNA, 1506 bp, Homo sapiens
attttttagctttcctatataaagaaagagaatgcatcattggcctgatagtgtggggaataatttttttataccatctctgaagattagagtaggaactagagagtcctaaattatggtggttgtttattttttattttaacttttctcatttgaacgttagaggaaaatactacaatattgttaggtgattttttaaataactgggaaaaatacattgctttgtgtaaattctctaaaactaaatcacgtgtaaatgctttttttgtccttcactattaattcaatagtgtaatggtttaactttaaaatgcaattttatagtcaacaaaatagaattttttacaacttacaaattctctgcctgtttaaaatgttctactataataactcaaggtaataaagatttataattttaaatcctttggcagatagcgctccaaatcactatactttggtattgatgtttaggaggcttattccaaccagtatttcttacatataatgatcgtgcgacttcattacacatttgtcaactttggactaattatttttatacagctagggcagggcactgcatcttgtgatcgtctttcttactaataggattctgtctgcttcagcaggcagtaattgaaggcttcatgtacagagtacaaaaaaaaaaaagttttagcctgagtgggtcattgtcacagcttctggtaaccagtagaacagaaagcacaagaaaattgaactcagaatagaaaaatcagaaaccaggaagactatccaagagaagaaaaagcatgtcttagagctgttgcattaagtatagcaaatctgattctgtgtaaaaaatgttatgtttgtgactaccctggagactgacgcagcctctcagataaatacttttaaattcatgctgtaccgttaatgttaattgttagaacaattgaattataggatttcttttccttctaacaaagaacatgtatgatttatagccagtttgttacaaatcttaaaaagtatagtttaagtgcatggagaataaatctgtgtattatagatattagatttttttcaaatttgttgttgctatttggtctgtttttataattatgactatagttaagacaaaataactttttaagaagaatgaaacttttttttatttagctttgacaaccagcttattctgtctttttcgtaaatcttaagaattcctataggcttcaaagattaaatgtcaattgctggagataatagacaaagacatttaataagatgaaatacagatatagccaaacagttttaccttctcagttggtgattacaaacagcaagtggttggtgatagaatgaaatgaaaaatatctagatggtgtccttttaataacatggagcccgtcatacacaggcaatacatctttaactgtcatcgcacttatttgttctcatttgtggtgttactgcttttcgaggttgattggtctccccgtagtccctccctgtgttaca

SEQ ID NO: 116127 - DNA, 1050 bp, Homo sapiens
aggccatttaccaggtattgctgctagttatcctggaattactttgatgtgttctcaagcagcatttggcaatgagagatctttgaatgaatagaaaaaaatagcaatagtaacaaatacatttatatattattaagaagtaaaagcttactagtttacataaaccccagattgagtatactttaaagagactgaaattgatatttcatatgtgtgattctaagtttttatcctatcatacttaaaattagatttaagtgattttttactgaatttttacacattttcctatacaatgaggattttaaaaaacttcgaaacaattgcattttgttttagttttataattatcttgtaaattacatcctaaagtagtgtttcttttgttgaaaaaaagttaaaattttggccatgagcttaaaattctgtaaatgtaattttcaaaaagaaattaataaaagggagccttcttttgcttttacaggagtgctaacaggaatgaatgaaacttctgctgtaatcattgctgcaccacagaatttcactccctctgtgatctttcagaaggttgtaaatgtagccaatgtaggtgcagtcccttctggccaggataatatacacaggtaggttcactaacacacgatgtggaggtgaagatgacttgaatatgtataaatatataattttaaattcattgttttctttggaaataataacccctaaacatatatatatatacacacactcccttttttttctgatggtatagttgttgattgctttgcattaaggctgtctttcccatctcagagcatccttatcatactggcatggtctttcctgaaagatatacagagcatattcacattttataatagcttggtaatttataaagttaccctttttgaggtggttgagagtttatcttatttcaccagattcagtagatgtccaggaagaactattctataaagcagtatagttggacttttttaattgaaagggaggacgtttgggtactacatacagatttccttttgatagccatcc

SEQ ID NO: 116128 - DNA, 1042 bp, Homo sapiens
caagtccataaattaatagtaatatttttgctgggcattatttaagcaataaaaaagaacgatgaaatctttctttggatttgcatttcttggaaagttgattattgctatagaggaaaattatctttgtgattttatttttctattgacaaattgaattgattcttatatttgctattcttaccctttgctggctaaagcctgcctctctgctttacatctgctcagcaaaccaaggtgagtggcacacggtgactgaataaggctttggcacatttattgttaaggggatattctttttttgaaaagtgcagctaaagtatatctgaagcagcagattattatataccctttcactccctcagcttttggttagaatacttaatatttcgatcaaattttttgtgctctgctgtgactgagggatttttcgctgactagccatacagaaccttaagtgcatgagagaggtgcacttggagaatagctgtggtcctctgtggagttgttgccaaaattcctttttcttctgccattttacttctatggttgttgattatttgtctgaataaatctggcagctgtttgctatgtttaatagagcagaaaggctactctgaataaagctatttgaaaatttgtttatatgaagtatttgtaaatccttgcaagtctcttggcatttctgtatcattctttctgtcttcctgaattcattctttgatgtggaacttgatgctggcaaatttagcacaggtttaaagagtcttttcaatagcatctttttagttatagatttcagcaggtttggtaatagaggtctcaatcctcaactttacacatgtatttgttatactactctagtaagagcttagcttatttccacaaaagatacctagaaatctctcactaacggaaaagcctaaatcagaataaaaatccgtttcctcagattttatcaatgcaaaattctggaaggtaaaatgcaagtaaatttaaggggtgtgtgtgtgtgtgtgtgtgtgtgtgtgttacaccagct

SEQ ID NO: 116129 - DNA, 1019 bp, Homo sapiens
agaaacactgaaacacctttgtcttagttatataagtaaagtaaccatatgctttatcacacatatcaggacactttagagagtgaaaggaggcaccagctggacaggattccacaacaacagccataaactgggactattcctgggaggactgggatgaatggtcatactatatatgatactctgcaatgttcccccaacctcttctgttgacatattaggctgctcatcattcccaaagtacaggcctagaatgccctctttctcctcttggaagtaaacttagccttcattcctgcagaatgctttccacatacctaaggtagtgcctgccattccattataagtgtaatttctttccctcccgctagacttgtgagcttcaagggccaatctcacttggctttaaatccccagatattcacacactacataggatcaaggttgtattcagtgtttattgaattgataaataaattggatttattggtttgccttcaacaatccacatatggaaaaaatataaggccacttacaagaatacaatacataatagcataaaataaaagtcgattttatgttctttttttatattatgtcatttgtctgtacccacacatgaataaattcaagtgtttcttaacctaatgtttagtatttcttatccacaatccctgtttctctagctaccatctcacaggctgtgggatccagttctaacatgaaggtagaagtccctctatgggacttcctgaaagcttttgcttttgtaataaaaaggaacagatttggttgacatagttactcaacactctctcatcaccacccttccttcaatggaatgtaaactaggtacctggagatacagcagccatgtggcaaccatgaggatgaaagccaacatagtaaggatggcagagggaaagctagaggaatctgggcctctaaagggttttttaagccactgaatgagcctgtgactggtaactctaagacttcttgtattataaacgatcaat

SEQ ID NO: 116130 - DNA, 1216 bp, Homo sapiens
gtgaataatattttttctaaatttctttcaaactaacattaggaaaataattcatgtatttcacatagaaaatgttcttgactattaaaagcatttacattagtatgttttgttattataaagatacaaattatttattttagattttgttaagcacaacagcatgctagatcaaaaattttgtgtgtgtgttccaaaaagagcactttgtcttgcatcaaatgtaattgatcctgaagcagtgtaatcacaattactcactttcttgattggcctgcccaaaatcagaaaatggaaaccgatcgacagtgtttaaatcaatagcttcatagtaatgcttgtgggggtagggagatagtggtaatgggtagatcaattggtcttagatgccaatcactgactgtgccttttgcatagtaaatagcactttttgcttagtgatgtgctgtattagtcttggtagttcaataaaaagaaaaaaagaaacaagaatggctgatattgaattttttccttgaaatacattatacaaatcgatacataaaattatgggtaataacagcatatttgataagaagccttcagaaatgctgggaacatggaccaaaagcctgtcagatactcttttattagttagaataaaaagaatagagtaaaatgatcctactttagcttctggattaattctatatcattataattgtatctatggataaatagatatagacagaactgttaaattaagccatgtagttatatgtatatctgataagcatttttgcctcttttttgcttggattttaaatggtcatcaaattaagttcttgattaaatttattgagatcaaatatgtgcgcaatatacataaatatatctgtctaaaagttagtgcagtacataaacagatcctcatcccccacaggcatgcatgcattaaccagtgtgggaagtcacacagcttagtgctagttagagaactgagcacatgtttttgtccaaagatccattaaaaagaaaatacattctttaatagtgaatgaacactgaaaatataagaacagatgccattagctgaccagaaattatgaggcattattgacagaaaacaaataggagcagataaacaataacagagaaaataaaaatcacagggtaaaacactcgtgggggaaaactaccataatggtaagaaccaatctggcagaacatcaagcac

SEQ ID NO: 116131 - DNA, 1051 bp, Homo sapiens
tttaccaagaaaatattcggagggggaaataaggaaatatttgttttaccaaataattgaattatattgtaggtctacaaaaaataaaacaatatgggactggtttaacaggacaatcaaggcccagaaatatctcctagtacataaataattagaatttttgcatttaaaatcattgagaaaagactattcattagctcatgtagggacaattagttcagtatctggagaaaattaaatatggagtcaatatatcaaaatcaattccatatgaattaaaatttgaaaccatcaaaggtctggaagaaaatataagtgaatagttaacttgatctcaaagtagagatcattaaggcaaaggaagaagccaccttatcctgggggccatggtcttcagtttacagtaaaagaaaataaaaacaaaaaaacagttcaaagagtcaggattggaaatgaaggtccagacgttcattttggtagttggctaaaacacccaagaaaatcaattgacaaactgttaaaaccaataagaaagttagcaagatggccaaatatagaggatctagggaaaaaaactaacaaaaaagtttataaatccctgccccccagcaaaaaaaaaaaaaatgagtatgtttgtaatattaatatatgcttggaggttacagaaaaatttcttttttttttcttttcttttctttttttttttttttgagacggagtctcgctctgtcgcccaggctggagtgcagtggcgcgatctcggctcactgcaagctccgcctcctgggttcacgccattctcctgcctcagcctcccaagtagctgggactacaggcgcccgccaccatgcctggctaattttttctattttgtttagtagagacggagtttcaccgtgttagcgaggatggtctggatctcctgacctcgtgatctccccgtctcggcctcccaaagtgctgggattacaggcgtgagccaccgcgcccagccgcttacagaaaaattttcatacagttttgagggcatttacttctttgtatcatttct

SEQ ID NO: 116132 - DNA, 1489 bp, Homo sapiens
aaatcatagaataaacaagtgagttctgtgtgcaagattggcaaaaagtaaggggagcactaaaatttaggattaaaatacagtgtgtttagagggctgtacatttagatgttttaaaggcttattttttcatcaaagtgttatggatctatgaaatcctgttcttaaaatgaagggacacttttctgaaaatacccagctcaagaagagacgggaaattgtttcatatcatatgattatctccctggctagttctttttttcaaagattactgtctatcagactttgtgtcttaaaccaaacgggcgacttcatttttcccctccctgggaactaagtgtggaaaggaaccctaagggtccactgctgtctcctagtggactaaactaaaatgagaggaacagtgggaagaaatagattaataaagactacagaagaggagctaaaagttagaatttgccataaattggatggagagttcactgaagcaaacctcagtcgattgtggaactagattcatgccgtgggaaatctcggaatgacttagccgtgacttctttcctgttggcatggtgtctttttcagtaaactcctaaggaaaacaaacaaaaagtactacaagttgatgataaggtgggtgggcaatatcctgtataaaaatgaaactatgttctagaagagttggatttatttctggacaccgacctttttaaaagcaatgcatcattctccatccaacaaatgctgccatagccaataatatgttggcttgtccattttcggcttgtagtacaaaataaatgaaagccaaggacattacaattgggagggaaagaggactattatttaaaaggcttttaaatgatgtcactatatattcttttaacaacatcctctaaaagcctttgaaaaaatagtcccttcctccctcagttgttaacaaagaccatactggggactgctctttaaaaggctgttaaatggtgatactatattttttaacatcaacatcatttagaaaccttttagagaacagttctcttcacccacaactaacagaggagggaaaaacagatgcgggggaagggattacttttgtaaaggcctttggatggtactatcaataaatacagcaatgttgttataaaagcatttttccaatggtgattcagctttttgacatgtacttttaatctcaggaccctgcgttatctgacagattggtgttttaacgtgggctgaaaactcaatttactaataatccaaataatgccttttattgaactttctgcagtttaaaaatcagtttcacatatatggtctcatttgatcctcaagacaactcagtgaaacagacaggatatgtatgattagccccattttacagaagaggaaaacagaagctctgaggttgtggtttagctaaggtctcaccatttaatatgtggctgagttcaaactataacccagatcatttgacatctggtct

SEQ ID NO: 116133 - DNA, 1023 bp, Homo sapiens
tctagtcagtcatcttggcccctccccactggttaatatgttagtttattacattactgagagaattattcccatcaagcccatatctagaaagtggttgtgctacttacacattccttttattacttagcatgtaatatttaagacagtaaaatggggattaagttattgctttaaattatttgactaaacgtagcttaatattccattctttatatttcttaaatgctctctctaaaaatacagcatggtaagctgaaaaatgaaaaataacattttgattttatttttctgtcaatagagcagatctaaaaatttaaagcacatctttctaaggtaacatttacctcctcacatctttagcagctatcagacatgacatgggacatattcattgaccctaaaaattttcatcagaatcatgcactgaaagggggcagccccagccagacaagaggctcatttcaattttaacggctgtaattaaaggttaattcactgagtcaggattaacaaggaaagtacaaatgataggcaagcagctgcctttataatacaagattagaacaatgcaattacaataagaattagaaaaaatcaacttccagaaagggtcttttaatgaatgaattaaattgtgatctctaaacatgcgtatataaggtaatgcttcttaaggaatcatataaattgatactgtatatctaagcatattatgttaaatgtggaaacaacagttaacactaaaaactttcattattagtaagttgcccaaaaatgtacttgtatatatctgtacatgatctttttaaatggcaaaattttttccctacttcatgctccttttttttttaatgtccactgtgtttacctgaattgtaattgatctttccctcttcctgcccgaccccccctgcaagtacttcttatgtttataccttaaatccatttttcttatagaacgtattcctaaaactccttttccacctagtgttaattagaaagttgacaagtgtcattttc

SEQ ID NO: 116134 - DNA, 1699 bp, Homo sapiens
ataacagaccattttcatctctccttttcctagattactaaaaggagctactttttaaaaagagattgttattaatttttagttggaatttttttattgcaaaatatttttaattggcttaagcaaatatgtgccagtttgtcctaactggcggatagtactcataatgttagttgttagtattttagtaaaattccccacagtgacaaatccgctgaatcagatgctaattatagttattaatgaactagcaattatttgtggcaaaaaacccaggtcacccaaaaaaacaaaggaaacatgcacacagatctgcaagaaattgaaggattaaagaggttgtgataaagaaagccttaggcctttcgacttcccttcctcctcctttgtggtaagtagttctgctggctgtgagttcacttgtttcagagctgagagttcactgaacatctatccacttttccctaagattatgatttttagcttttaattattattattaaatataccacagtaggaaataagatgatttttaaaatataatttatttaaaaatgtaatatgtttttaaaagattcatcttttatggcagttttgtcatcttcggtgaaaatatgtaaataaatgagtttctgaaattctatcttttaaaaaacagttcatagtctgaaattatgcatttaaaaaaggcagttcatagtcacacaaatttgatggaattttgtgtgactatgaattgctatatttcaaattttgttgctactgttgaattgtggtattgaaatgaaaaatatagtttttaagcattatggtatcttagattatgcattggtcaatcatatagcaaatattatttaattacatgtcagccaagttaacttctgttaccactgttccccttaaaaacagtgccaaatttttttctgaacacagggcagggcatggtatggaaattaataattcttattctaatagtattaaatctcttaacatgagaaacctgacctaaacatggaagatgttatgatatttacaaaacctttatttctcttcgaaggaagagaaacgaatttagctgtagaatacatgtccaatgaacactaagaattgattaccactgacaagagagtatggagtaaaaacaagtacagtatataaccctaatatcaaagaaaagtaaaaaccacttaacttagaatatatcagacgtgggctgggcgtggtggctcacgcctgtaatcccagcactttgggaggccgaggcaggcagatcacgaggtcaggagttcaagaccagcctgaacaacatggtgaaaccctgtctctactaaaaatacaaaaatttgccgggcatggtggcttgtgcctttaatcccagctactcaggaggctgaggcaggagaattgcctgaacctgggaggtggaggttgcaatgagcggagattgcaccattgcactccagcctgggtgacacagtgggactccatctcaaaaaaaaaaaaaaaaaaaaaaaaaaagaatatatcagacacattgttactcaaatcattcagggaatataattatatacagcttttataagcctatcagtaagtgtttttccttaaatttgcagctgtttttcattactgaatttatgacttttcccctccaaatgttaatatggaaaatctgctttacacctctgtacaaataata

SEQ ID NO: 116135 - DNA, 1104 bp, Homo sapiens
taaacacattattcatagaggaggaaatatagatgataatatgcgaaaaaggttcagtggtagtaatgaaaaaatgtagaattaaagaaccatcttgcctgtaacattagcaaaaattacaaaaaccaacatctgttgttgctgaggtatgcaatgaagcaggcattatacactgctccactggtaaaagtataaattatgacatcattctggatggcagttgggccatctgtataaaaagccatcaaaatatgtataccttttgaccaggtaatctcatgtctagattcttcttctaaggaaataattagaattacacagatttatgtgcatggttgttcaaacctaaatgtctagtgatagtagtgatggttacaaaaagtatgcaaaaacaatttaaggaattttgtacaattattaagatgtttttattacatattttaataagataaaatatggtataatgtcagatggaaaaaaggatacaaaatgttatatatataatctaaattttgtaaaattgtacaattgtactgttttcaaatacaaggaaattgaaagagtagaagaaactgcatcataattttaacagcttttctgaatgatgagattatggatgttttatatttaattttcttctgcatatttttaaatattttccagattttctctaatcaagatgtaatacatctattacccaaaaagcaatacttgtaaaatagaaatggaaagcacatatatgaatgacgaggattcctttttatttgtttgggtctttttcctttccttttccttttcctcttccttttctcttcttttctttttttttttttttttttttttttgacagggtctggctctgtcgcccaggttggagtacattggtgtgatcttggctcactgcaacctctgcttcctgggttcaagccatccttctacctcagcctcctgagtagctgggactacagccacctgccaccacaccctaatttttatatttttgttggtagatatggctaatttattggctaattttttaatttttgttggtagagctagggtttcaccatgttgcccaggctggtctcaaactcctgggctcaa

SEQ ID NO: 116136 - DNA, 1025 bp, Homo sapiens
ttttttagggagattactgggtgataaatgttagtgataatgttatgtgataaaaattttcacaaactattactcaagatatttatatccttattttgttataggatttgccattatgttttgaaagctaagactaataactgccatgacttgataataagttgactaaatcaagatgttaaatagaattgtcatacatttattaatcaaagtaatttaattagatttactaacaaaataaaaatgttgcttttaataatttgaattaaacgttcatgcacatttactaatttgggccttttcttacagttaacccagtatccactccagttgcacttcccacaccagctctttctccaagtttgatggctgatcttgaaggtttacacttgtcaacttcctcttcagtcatcagtgtaagttatttttaaaatccaccagctcggttttcttatgttgccattgtatcttttttattaaaatgtaaatacttgaagtggattcttagttttgaacagattcttctctaagaacaagcccaatttagctaagaccttttaattttttaaataatttactcaaaccattatcttctcaatttttttcccttgttgtccacacttaattatcatctgtatgtttttctctggtattgttatatatctgtaacatacaaaggttcttcaccacattgacgcagtacatatacctgaactgtgccacaaaaagttgtctacattaacagactttcatttccgtaatcgttttattcctaccacactattttttcatagactattaaaaattcatgactgtttttatttaaaagttcaagatttttttttctgtcttatttttgtacatttatttacatgtgttggtgtctttaaaattattctttaatgttatttatagaatgtgatgtgaagtgaggctagaacctacctgtcacaaaataatgcaaaaaccgtcaacatatcatggtatttgaagctgcaacaactgtttattgtgttagcatatta

SEQ ID NO: 116137 - DNA, 1056 bp, Homo sapiens
tatagaaacataaaatatctagtacaatgcctgtcacaaactatatcagaaaaggctgacctatcacaagcccatcaaaaatatctgagctatgcatatgttatttctttttcttaagtaaacctgtttaaaagttattttcaagaatatttgtggactttctaccaaagagccactttacgtttttatgttagcaagaagttgtccgattgtagaataattacatacctttaaattttgttctgacatttataatttttaaacacaaaatagtttaagagtttgcatagtgggtaagaaatactatatgctaattgagacaaatgttgattcaggaaaacattttatataaccatacagaagtttaatttgttggtaccactaagcagaggaaaaaaaagtttgttttggaatattaaggactactccacagatttttaaaacagaacgtgtgataaatgaaatatttgttattttataggagaaagaaaagaaaacaaagcaagatagaactcctcttaccaaagatgtttcacttctagatctggatgattgtaagtattgtaatttaaaatatttcttctgtgtttagtaagagtattttttatttttatagtacctttcatttacatgtcccaaaatatatcaatatttattgtgaaagacttatagatgaataaggcaagaaagttttggaaatcagtggtatttgtttctttcatctattcagcatatcacttcattatcacatgaacaaatatagatggccaaatacaagtacacaaaattcattttaaaatcttttgctttagtaatttatacttgtttgctaaatagtcatccataccttataacttctacattgtgaaatgtggattatggggattgacacatgtaacttaaggaggtagaggattaaggaatgtaaataaaaatggaaaggacatcaccatcttccacttggcacaatttcagtaggaatggaaatgggttacaaagcctttggaggccagtttggctatacctctcagtcttttaactgcaaaaaatctttgt

SEQ ID NO: 116138 - DNA, 1036 bp, Homo sapiens
attttagcttcaaaactaatgtttcttctatttttttcaccatcttagacattgtttactcatttgagaaatggagagagggacaaatactgtttcgttcatttttaaataaggaatgaaaattaaaacaactagatgatgtggagtgttcagtgataaaaataattactttgaagaataaaattagtgcctttttaagtgtattaataatgtatattattatgtggtccttgaagtttctgagtatcaggacaagggaaaaaacaagtgaaatttaaattattttaaaatgttacctatgtataattttacgtaatgcttttgttcatgtatgtgcactgttgtaggagctctaacactgtgtaaactttaaatagtgataaaatatattttgctttagtggtaccgtctcgtggctagaggaatacttcaaaaatatttattagcacattagcaataagctatagacttttggtaaattataagttatttgaaggcaggactatatctatcttggctgttatttccattgcttggcacagaatctaatatatatttaaaattctatacatacctattgaatgaatgaatgattaaataaacaaaaacattttagtagaaactttagttttggtctgtgattgagaaaatttaatgtaaaaaatagtatagattagaaagataaactttgactcaattatatttaacgccctactctttgttggcctttagttgtttgtaatgcacttaatactgttttctttttaaaagatttacaaattttttctgaatatctaaccaaactgtgaacagttcaggcttaggggcactgtattctagttcatggatatatacattttgtaagtacagtagaccgaataagcaaatctctgctgggggaagccctagttatatgcagatatgtttttgaaatatttattttctcaacaaaacagtagatcaagtgagtgagtcctttcaactctaaaaagaaagagcctgggaatgtcatttatagattttaatgaatatcttt

SEQ ID NO: 116139 - DNA, 1029 bp, Homo sapiens
accaactgtatatacgtagcagtgtttgagttgctcttgtcagttgtttttatctcaggttatatttgtgtctcaaaactttgctaattccttttgggaggtgcaaagaaactgagtgaatctcttaggtgctctaacgatcagtcactaggatttgactggtgtctgaatgtcagtaaatgttaagatttgccttaataaaagattttggcaataaagatcttttatttgaaagattcttggggataaagtaaatttggcatgtggtgtgaaataaatcatggataagagtgaaaggaacaattttttgattggttttatgttctatttgaaaagtaagcaagttttagttatgtttttacaactatttttgtatgttgcaattatataacttttataaatattgaagaatattgggttttactgttataatgcaaagccttgcctctcagtttatgtctttcctgatttcatttatattttaagttctctaaaataaaaatattattcaattgcagttgagacctttgaaaggaagtgaatgccattaagcaggctttcttattgaagtaggcgtactctaataggaaaagatctgttttagtgggttagacttctttttaacttataaagaagtctcaatttactagcagtgtacttttgttttaaagcacaagtttaagtgttagcctcagatttttaaaatcatatttgtcagttaacttgaaggaaaaaagtcattaaattatctttggttgataattctaattgaaaatatttcatgcaaatatcttgtcctgtgaggctagaaattagctttgacttcttgttgatttcaaagcacagtatggctttgacagactttacatactgcttatcctattttatagtttcaaatttcaaacctctttacaatggtttcctcttagaatgcatatttgatgcttgtcatgtcagatcttttttgctatttgccttttttttaatcagcatgaaaatgaacatgcataatacattaacaaatctttt

SEQ ID NO: 116140 - DNA, 1039 bp, Homo sapiens
tttttttatgactattcccctactacttaaaagtctctgcatcccttttgttcttacttttttgacctttcattcttttggttgcttcactttttacacgcctctgacacccaagtgtgaatgttgaccccaaattagtacttagtacacattagtcttttgagatattaattgatgtgaatgaatttttctttaatcttcttttttccctctaaatttttcctgttgtgagacctcattcactcctatagcttcagctaaaacatttatattaattacttccatggtaacatctttcagtctttacattaagtttcagcttttcttcccaaattcataccaaatttttagacctctctgaggctactggttttccaaacctaatacaatcaaaagacatgctctaccatttgtcaccagcattcttttcattctcccagatctgaagccccagaattatctctgactactctgtcattctgtatgtttagatagttaccaactcctatatgttctgtgcgttatttctcatgtctgtttcttctttccctactgccactattctagattagctcttcattacctgcatagaccattgccattggtcatcctctgaccaatgctttcccaaccccaagtccttctatacaactgccagatggatattaaattcacctgtcctgatggcccactgccatttgagttcagtaaactcaggctagcttgcccaaacctaccttgtcttaaccctacccaccttgtgttctttctttctttctttctttcttttttttgagacagagtcttgctctgtcacccaagctggaatgcagtggcatgatcccagctctctgcagcttcgacctccaagtctcaggtgatcctcccacctcagcctcctgggtagctgggactataggcatgcactaccatgcttggctaattttttgtatttttaatagagaggggtttctccatgttgcccaggctggtctcgacctcctgggctcaagcgatccacccacctcagcctcccaaa

SEQ ID NO: 116141 - DNA, 1068 bp, Homo sapiens
atcctcatctactcctgtgattttattttttctagataagcctttcccttataacccaactctgcagaaatgctagaaactttaaaaaatctcatcccttgccactgaaatcaaggaactcttacgcatatgaccttttttgttcttggctaggttgtgacaaggggggggttttgctgaaggggaagtgaaaggaagtcacaaaaatagtattgagcaaagaattataagtgtacatacatcataagaaattgagactattcactttttaaaaatattgggcattttgcataatagagtgtgttttaaggcttcaattaaagagtatacattctttagttagtaagaatttgcgtagccatttatttaaaaacaaatggaaccacttatataataaaataataatgctttttggtaataacatttttaacactgaattttgcctgcttagcaggaaaaaaataaagtataaattgcaaaaatatagttattaatataaaatgtattctatctgatttcaagtctagttaaaagaataaaaatatagaattcagacctaacgataattatctttttggtctttaataatcacccccttcctataactggaccatgttcatgctagacttcaagtatagtatttttatatacaactgtgttattctgtttgttgaaaatatggccaaactctgcctttgattcagttcaatttcttcttaatccaatattgttttcgtttatttgttctgttaactggaatctcttcaatatgttatctgagtaggcaaggatgaaaattaatttattgaagtagacaattgccctcccccatccagagatttattgttaaagaatgttttaaaaattggctagtatttgtcttgccttatttcacattttcttgcatatattaaaacctatcttaaacttgaatttatatttaaaacttgtgtctgtatataaaataacctgagatttttatttttaaaaaattcacataaaatcttaagagattttatggtttattaatctggcctcatataaaaacttatcacttagtgagtctga

SEQ ID NO: 116142 - DNA, 1008 bp, Homo sapiens
tttttctgtctcagaattttttttaactttgccagtatgataattttttaaagctcctaataagctttaaacatcttcaaaaaccaccctttagtaatcataaatatttatgaccaaatttaaattttacactccaaggtattttcatttgaagggagatagtatgacatagtggaaaaaatacggactttggaatgagacaggcttgagttcagattctagttctgcccctcttgttatgtgcccttgagcaggttatttaacctttctaaatattaatttcattattgtaaatgggataataatgtacccaggaagagtgcatttaaattagataattagtatgattggtatgaagtgcctagccctttctggcccacagtagattcttaaaaaaatacacacacatgtggtagagagaactagacctttagtttccaggaaaatataaagcaccacaaggcatttgtcatcccctgagagaagggtgtttggtcatctcacatgttattccttctccttggagaactgtttccctgcccatctgccagccttactcctatatcttggcttatatgtctctttctccaggaagcattcctaattggatcaagtttttttaggtgtctctccacatgttctcctgacacgctataatttattacttattacttattatactgtattatcactgcaaccttatctgtatcctccagtggaccgtagaccctgtagggtagacacacagagatcctctgtgtcttactaaccatcgttatccttagcacctagcataatgccaacatgtagtcaataattaataaatatttgttgagcaggtgaacaaatgaatggtgttaagcacttaggtatgatcatttgatattttaaaagtttatatttgattagcttaaatttttagcaagatagtactttagaagaatttcctttgaactggttaacattttctcatagaatgtgtttaaggtcacatttgggaacttgtgt

SEQ ID NO: 116143 - DNA, 1892 bp, Homo sapiens
taaatattctgtgtacactaatatcagtttttctaggaggaattattttataaaaagtatccctctatatttaaactggtttttcaaagagggaagttgacttacgtgtcccagctttttaaaaggagtaattaagtattttaccaccttacaagtagccattccagttggaatcaaatagttacataccttggttttcatattgtttcttatttaatgttcttattttaaagcgataaaaagcaattcagttttgtagaaaaactattaaaattctggatgtgtttgtgccaagacatgtatatggattgtttaactgtgctgtcattcttaatattcacagtaaagtaatttttagagaagctacatttcagagcaacacctctaaacacactgactgattagcttttttattgaccattatgggggagattattgtaatctatggactgaaatcagttttttgacctatgaagagcttcctagtctatatttattccttgacatttgaggtaatatgccaattaccttgagctctgattatgattgttctctgttatatacagctcatattgtttattttatatttttccctatttttaatagatagagatcatttccagcttggcaccttatctcatactctcaacattaaagctactgggtacctggaattatctaattggccagaggtggcgcccgacccatcagttcgaaatgtagaagtaatagagttggtaagttgacctttctgaaattaattttgccaaagcagtggaagactctaggatagctattgttttatataaaagcttttttggagagttgaaaattgaaaattgttctagtatttctaaatgtaatgtgttagatataccttgcctttatagcaactaaatattatagtattcctatgccattgtacatgtactgttccttttcttcaaggaaatagagaactgaattctctgcatcagtgccacccacatttgtgctattgcatttgtagccgcgtagattcaatttctaaggtatttagtttcattggatgaagttttttctactttgtttagagatttgtaagcttcctgacaatatccttctgaataatttctgctgttctctttcagaaaaaccacacaaagtgttctagattttttgatgaaccatttttaagtgaagcctgaacataaatagggagcattgtgtaccaaaaatgtcctttgacaaggtcacaaagtgaataatatggtgctttctcatcaaaaacaaatttgctatataaatactctttttctcaatctttaaaaaaaatgctggccattgagataaaagaattaacattcttttctaatattatctgtttctttctcatatatacaagaaaaagtgagagaggccttctaattgtatttagcaattatgcaaaatatatttaatactttaaaatgtggagttaacaaaaaaagcagttaagaattgtattctggatacttttctggtggaaaagatacattgaattaggattcagataactggggttctttactaattcctgtgggaaagtgagttaacctccttgctctcaatttttctgtatacagtggaagaaaacctttattactttaataaatagaatttctataatgatcatggccatgtaatttgattcctctgagaaattattaaatgtttctcttaaccactccaacttatcctggctttgaagcatggccggaattaataatagcactatttaggaacccctgacagtgtacgatgataatgttttataaaaactatcttgtttaaacctaataatgattgtaagggatggttattgttattcccacattgcagatgaggaagccaagtcttagataacttaaagt

SEQ ID NO: 116144 - DNA, 1385 bp, Homo sapiens
aagcaatgtatggttgtttttgtgagttttcaaattttacataagtagatattctactttatgtatatgtttgcaactttttttgcttaatatcatgtttttgaaatatggatatgtgtagatataatttaattactatctctgtcagacatttaagtttctacttttctgctattaaaaaagaaagtgcttccttgagttcttttttactcttagtgagagattttgtaaatcacactgatgttttagggattcctcctaaagttaaaagcagattctctcttgcccgtgattcaggtctttggagaaatctccttcccccaaagcctctttaatgtgatttaacaaaaggagacttggacactctgaagtgacatctctatcctttctttgatatgttttcctggcattgaaaaactcaagtaaatataatacagaaaggaagaccttacagaaaacttttcaagttgacaaaaaggtagatactattaaattcagaaattacatctaagtcacataaagaatcctgtttagtcatgaaattaagaaactaattagggctgggcacagtggctcacgcctgtaatcccagcactttgggaggccgagacgggcagatcacctgaggtcaggagtttgagaccagcctgaccaacgtggttaaaccccgtctctactaaaaatacaaaaaaattagccgggtgtggtggcacatgcctgtaatcctagctacttgggaggctgaggcaggagaatcacttgaacctggttggcagaggttgcagtgagctgagatcgcgccattgcactccagcctgggcaaccagagcgaaactccatctcaaaagaaagaaagaaagaaagaaactaattagatggaacaacggtactgcttaggtttgcctctggtgtaagttaagaattctatgtagagtttacttcatttaccaaacatatttgtttgtatcatcctgttaaaaaataacagcaatgtagaaccaatataaatctttactatgccgaatgcagacttctgtgtcctttttatgtaatagtaaagatattattagaactatagtattaatagtaaaatatatattaggactatattttaagagacctttttagttatttgtactgacttataatctattagaagaaagctattgtttgaataaatatttcccagtttattgtcagagtattttgagaagtcttttaaataatgtatttctttttttttttttttttgaggcgagtcttgctgtgtcgcccgggctgcagtgcagtggcgcgatctcggctcactgcaagctccgcctcccaggttcacgccattctcctgcctgagcctcctgagtagctgggactacgggtgcccgcca

SEQ ID NO: 116145 - DNA, 1081 bp, Homo sapiens
catgtatgcttctaaaatcattgtgctatacaaaatcacacaataaaaaccatagggattattagaaaaatgcagttagagtggcaacactcaaaaactatattggtgacatattttttaaaaaggaacctaaaaaaaaaaaccagaagtacaattttacacgtgttaaatggttaacaaataaatactacaatgatactgctctttatattgaaaaagacttgaggtttgcttatggaagaaaggctatacttgttcagcggtagaaagagggttaatctgaaattggatggaaagttgtgcctcctaatgagcatgaatatggcgcataacacatgtagatgttaacctctgaagtacatgtttgaggtatgtatgttttgtgtattcctacacatctctgtttagctgggtgcatttttatgccttcacctagtatttcttgcagaagaaatcaccacaaaattcatgttatgcccaaattgttccctaatatgccaactgagttggaacaaatgcacattttcaaaacaagcattagagcagaactgactgtacctacctcacaaagttattatgaggataacatgaaacagttcatgtaaaatgcttagatttccttgcacataatagtgcctagttcattttagttatccttcttttgtaaccctagcgagcaactgctgtattcttcttagggaatatgatgatttacagtaaagaaactagtctagttactgacaaaaagtgtattcttattaggaaaaaaaactactgatttgggtttatcctactgagattttctaagtaggatgctgaaatctccccgcccctcttttttttcagtctgtgaagaaaaaaatggttagaaataagtatcaagagtagaaaacactcttagaatactctcacacaggagtaatttcacttttatgtggggaaaaagttgaaagactgaaaccagttgaagttgctgaaatctagaactgttaaggcagtataaagatttagcatgagttcgttgaaatagtctactgaagtttgaggaagaaaggatttaattaaacaaattaataacaat

SEQ ID NO: 116146 - DNA, 1035 bp, Homo sapiens
gatgatttttgtgggcattgaggtttgggaactgctgttctagagcaggggtcagcaaaccatttctataaattgctagacagtcaatatttttggctttgaggaccatatggtcttcactgtaactatttctgccattatagcacaaaagcagcaacagataatggagaaacaaataggtatgggcagctagactggcttctagaatttgttcgtctctgatagaatctagattctagaccatcggtttttgctgtatgaatattttctaagatattctcttcgaaatcaattttaatgagatttcctatgtgtttattttttgataactgacgaaaattcataaatacaggattaattcctagatatacattaaattaattaatagctgtaaaacttttgtaatagttaaaaccttttctatgttaatattagagtatgattaacttacttctaactatgtaatctgcttctcatattaggttcctgttgctagagcaagtattctttggctaattggagaaaactgtgaacgagttcctaaaattgcccctgatgttttgaggaagatggctaaaagcttcactagtgaagatgatctggtaaaactgcagatattaaatctgggagcaaaattgtatttaaccaactccaaacaggtgagaggcaaatgttagtcaacctatctaatacgtactttcctcttcactctgatcaaacagcgggggtctgtgccttcattagtctgaccattcaacaatttctaggtgcctgtttgtttcaggttctatgttagatgatactagtgcaaacagatgacattctagtctagtaagagagaaaacagattaaaaaatgaaatagtgtgtgttaatgctgtagcagaagtattgacatacagtggaattctagacgaattataaagtctgaagtcgatgtgaggtcagagaaaattttataaaggatgaaactcttgactaagggcttgtaagagtggtttactgtacagaaagaggaaagcacagggtcagagtc

SEQ ID NO: 116147 - DNA, 2539 bp, Homo sapiens
cacctggctgatgcatcaactttctcaacagttgctggactataagccaaataagtacagtcttacagctctatatagcaaagcttatttttttcagcttttgtttttctcagaagataaccattaatagatacaaaaatatggtgagaattcagtattcacaaaggaaaataaaggaacaaatagcagttttacaaagccagaaaaaaaataagaaagaaagaaaacaaatgtaaaataaataataagtatttaaaagtaataaagatggaagaaataaaatcaaatatttctcatcttgaatatgaatggactgaattttctcatcaaaagacagacttacaaattggaataaaaacaaaaactagctacaggccatttatagttaaagcaccttaatcaagtgataaaagttgaaaataagaaggtaaggaaagagatattaagcaaatatgaacaagaaagtgagatttacagttaattaaaagcatttaacaagataaaaaggaacattataaaatgaaaaaagggtaatttgtaaagaaagtaataagcacaaacctatttgcacaaaaaatatggcaaccaaataaatatgtaaaggaaaaatctattcaaaatgtgaggagaaattgataaaatagttacaatgtgtgactgtaatgtatttctctcatattagatatttctagtagacagatataagtaagaaaattaagtaatcaaaaacttatttagtaaatatagctaaaaccttatatctcttgaacagataatacccacttttaggagtatatccagtgaatattttcaaaaaatcaagaatgtatttaggcataaaggaagcttaaagattttgcattctttgaccttaagcaatgaaatgagacttaaataatttaaaagggtaccagaccagttgtaaagtaagaaatgtactttcagattaaagaatgcatttaaagaagaaatgcaaacttttttctaaaacccaggaaataaaatgctttatttcaaaacatgtaggacatggctaaagttataaagatcaccatttttaaagtatagggatataaaataaaagaaaaacgaatcaaaacagaagagggatcaatgctgattttgtaaaatagaatacaaaaaatatatatgagttgaaaagtacatgttaaatctggtcttttggaaagaaaataaaacaaaattcccttctaattattatgaagcagagagaggtaacaaaagtagacaaatctggaatatgataataaaagaaattaaaatacaagaaagctgtatggaattctacagcacacatttgaacttaaggagaatgaaaagctgataattagttgttactgctcatctaacgtatctgaggaaactgaagtgcttgaaggtgggacaagcaaggaagaatcaaaacaatttgttgtgcagaaccctcaaaatggtcaaccacaagttaccccaggagaaggtgatgagggatgtagcagacataacttcaaagtcaggaaagaagaatgattgaatccccagaatctctctgttccagtcaggagagctgtttatacaagaacaatggccatgtggaaataaaagcagtgttttattaatccgaccaagtacctgataactcctaaacgtaggcaagtgattttaaaatgtgagccttaaaataagagccttaaatgagacttctgtcctcctgaatctctacctatttcaccatcaaacccaggagtgtcattctaaaacactgcaattttaggaaaagccagtctgtccaatatctaaggacaatgggtcaatattgagcatgttttccttcagtgcctgagccactttattagggcagaatcctgggtccatctttcttctggaaggagagagaacagaagtgatagcaagacctcttcccacctggccaccttacctatccttaaaagaagaggtgaaagaagtgggaaaatgtcccactatacacgggtgtgggaacaggcaagaggatggcctgggtctgccctgaaaatctggctcttggggaaatggcaggaggcactaagggagccattgcacaatgtggcagacaaacagaggatgaaggaataatccttcatctgattaataagtaaatatgaccccagtgaggtgaagttaattgcctccttgatgtaacaccatcagtgtgggatcagaaccggtctcaacagcttgctgaccagtattcttcctagtttaccacactcattttgtcgctacccagtgatccagtatgaattttggattcagatttggagttctgatcctagttccaccactaaccagctgtgagatgtgggcaagtttcttaactcatttgttacctagtttcctcatatgtctagtgcagatcatagtagagcatacttcatagggctttggcgatgaatgactgagaaaatacgtaaagctctcaaaaacagtgcatggcacatggtaagagctcaatagatattagctatgtaatttgttttaaaaagagaacatagatttt

SEQ ID NO: 116148 - DNA, 1035 bp, Homo sapiens
cgtgtctctagtcattgtaacactgctcatatttagttacttcctacgaagtgatacagcccccaggaagaaccacttgtctaaccaatagctaatgaactagcacagagaactctagatggaagaagacaaagaagagagatatataggtgactgtatatttacacatgattatgaggttggtgcaaaaataattgtggtttttaccacaatggcaaaaacctcaattcctttgcaccaacctaataaatgtatagcaatagactaggaatgtctaaccaaagtgctaaatttgaactcttgataaagaagggggcataatataaggaaaattctattaacctagaactaaaaacattgaatattcaggaaaactgaggaatgagattaaatggaggtcagaataaaagaatgttaaaggttttgtgggaggaagagagtggagagaagtgaaattattatggtagtctcatctggtgttcaaaaagtagtaaggtaaaaataattatcttgaggtgaaaaccatgggttttagtgagggaaatagttaataccttgtttacaggtaatggtagagaagtatgtatctgattatgagaaggaactaggagttctgtatctccccagacttcttgtgcaaaatttagttaaaacttgtgctagtaaactcgttctggtcctgtttagaaaggaagaggcaattataagtactagggcttcaggagagtgcagctgctatacataaaacctgtaacagtgtatgaggcctgtatctggcaaaccctaggctttcttggaagaaaactttcttctatttgagtatattcatgtccagggatacagaagatacttttgatgtgtaaactttctttttctcgctcattctctctctttccctttttttttttaatggagtcttgctctgtcaccctggctggagtgcagtggcgcaatctcatctcactgcaacctccacctcccaggttcaagtgattctcctgcctcagcctctgagtagttgggattacaggcatg

SEQ ID NO: 116149 - DNA, 1059 bp, Homo sapiens
tggtgaaattattaaacatatggccaaactcctggacagtatcactgtgagtatcaattaagagatgtttgctgaattttattcagtaagttgtaattttgttaaaataaatggtcagcctaaagggtaatggttaggagagctgaagtgtctggattccaattctgagattctaagatttcttgctgttataggagggaattacaaatctgaataggggaaaggatagaatgagcctcgtggtattagattggaattggagatagcagtgtgagttttatatatcaacagctagatgttgggtgagtatatatgcatgttcatgtgtcatacatgaaatgaatatacaaacatctgtttcccagagctgtcctttgagaggagttagaaacaataccattgagcacactttgtgcacagattttgtttttttaattgagatattattttatactataaaatttactcttttgaagtgtatcattggtttttgatcacttataagttgtgcaatcaccagtatgtaattgcaggacattttcatcaccccttaaaaaaaaatccataactgagactgcccagtctcccttcactctataccctggccactactaatctacttttttttatctttatggatttgccttttctggacaatatgtagccttttgtttctggcatctttcacttagcatgttttcaaggtttgtgtatgttttcgaatatagtacttcattcctttatatggtagatcttagtttttaaacacaaatcttgaagagtggagcaagatggccaaatagagggctgcaatgattgtcacccctgcaagaacacgaaattttagcaactaattacacacaaaaaagcaccatcataaccaaaaatcaggtgggcactcacagtatctggttttaacttcatattgctgaaagaggcactgaagagggtaggaaagacagtcttgaattgccggtgtcaccgctttctcatcccctggcagcagcagtgtggcatggagaatctctgcactagggggagggagagcacagggattgg
